United States Patent Application Publication US 2011/0191912 A1 - sequence listing, part 19

SEQ ID NO: 30127 - DNA, 3003 bp, Unknown
  misc_feature (1)..( 3003): 2750-1469P.txt file - cDNA_ID_3026244; gDNA_ID_2214568; Annot_ID_186082
gcacacactatattttttgtgttgacaattttactttttgaatgatcacactcgtgacaattaatgggcatgatattaaacaacacatcaaaaccgtgtacgcatcataagtcgttttcatttgttttataagagcaacccagggtccaacttatgttatcatggcacttataaccaaaaagtcttattaatattagcatttttgttagagccaacgaaaaaactagatttttttgtacggtgtgatttttattagatgagactgatttagagtatatgttttacgattgtttggtgtttaaatagtatatctagtcgacagagaagcgatatacaatcttccaagcaaaagctgattgtcgatgtagtggaaatcattgtgtgtcgtcatgagttaatgtgggctagctcatgattattgtcgtctcattttgccaatgatctttaataccatggtcaaacggcaatacctattttggttaactagtgttttacaaacgggtaccatccacaatatcgacttaagttgtatttagctactttggtcgcgataaagtagcaactttgttttccctatcacgtttttacttgcaagttgcaaacatttttattaatagttgatttcgaataatcactaaaataaacatcaaatgaaacaaaacacatctctataactttacaaggaaattaatatagtaaatatgtaaatatatttagttacttttaaatatatattaaaaattaattactaaaaatattgtgactaagatattaattttgaaaatatatatatggttactaagatattagtcaatcaatcttttcctaaaaaaaaaaatattcagaagataatcttttaacatgatcacctctacatattcaattttttttgaatttgtctttttacggacaaatgaagtggcagagagcatcaattgtactcaccattttttccactataaaaataaaaatattagaaaattaagagattttttcttagaaaaaagaaaataagatttaaataatgataaatatatatagacttcaaataggattgttggtgaaaattttgccttgctatttatacctttatagtttattagtaccgtgggagatttttgttcaaatatcatgggcgttatgataacatttatatgaattcatatgccataaattgtaattattatttttgtaaaagtaaaatgatgtcaattcaatgtccagtcgctaccaactcaatggaaattaatacatttgagtgtactaatgtgtttttcttgtgcgtgttaataaaaaatattcgatgtatgaatgattcttaactgatgtaggagttgtaggacactagctatatcttgaatcacatcagaaaagtttattaattctaagtaaatacgcataaggattgaccaattaattcacaacataaataacataaaatcagaaaaatcagttttaatatttagctctatcattaaaagtgacggattgcccattgctttccacaagataataactatcgtgacttagctaactcgttaaataagcaaaatttctctgacgctcaaaactataaaatctaatgatgtttgaatctttatcaaaaaaactagaatttgtagcgacttcgaatacataacaacaaatcaatacaacacactatacaaacaacaataaaaaaaaggatagaaagagaaactattacatgcaggtaatgtggttgcagccttcaccccgatcaactatactcatacagttttgacatttcatccatcctagactctttgttgcagcatcaaatagtccaatctctgaattcttataagccttggacttaataaactcatctcaagtctttatcttacatttttaggcataatttgaaactacattcaaggcatttggaaggttcagtctgagaataaccaaagttgcgctttgacatgagaagtgaacaagatgggttaggacattacattttgtccaaaacgtggatcttgtccattttttctttctggattataagagtcatttgatgatatcagcaatatcgtgaaaatattttaagagaataactaattctaaatcccaaaaactttgggttcgaaaacgtaggttaaagacgaatgtgttaaacattttgatcaaagttaaagagttaaaaatttatgtaacttgcaataatcaaagaaaaatagaaacttggatgaaggcataaatttagggttatgacttaaggtagaaaagagatgtagcagtgcacgtgtgctcccaaaacctcatcatcatagtgtagtgtcatgtgcataattaaataaaaaaactcactggcttgtaccattattaatcgcacaaggagtattacaaatcagttgttttcatcattctactctcatcatttcatttcctctcatcattagcttcttttttcttcccaaacttattctattgcatgatctagtcatttcttttgctaacaatttgttagtaaaattttttagatatttttgatccaaggagttttttttccaataatttttcattggtaagaacgccttcttacacctattctttttttcgtcaatttcttgcacctattttaaaaatgcaatttgatatcttttcaaataattaaataatattttctttgacaaactaaaatgatttatatatggcaaaaagcagaagcattaattaactttatagattcactttttctttttatattatggatttattagcaagacccaaaacaaaggtcaaaacagtcgcgaatctcaatacttcctcaatctcttcttcttcttcttcactctctctctctctctcgtcaccaccactaacacttccactgattcatcattctccactgagaaacatttctctcgttaattcaacacttcaagtctctcactctccgtttcttcgagtgttctttggttctcctttgcattttcttgcgtctttggactcattactgtttcttactcaatccgaagaatg

SEQ ID NO: 30128 - DNA, 3003 bp, Unknown; identical to SEQ ID NO: 26320
  misc_feature (1)..( 3003): 2750-1469P.txt file - cDNA_ID_3026248; gDNA_ID_2214568; Annot_ID_186081

SEQ ID NO: 30129 - DNA, 3003 bp, Unknown; identical to SEQ ID NO: 26321
  misc_feature (1)..( 3003): 2750-1469P.txt file - cDNA_ID_3026252; gDNA_ID_2214568; Annot_ID_186080

SEQ ID NO: 30130 - DNA, 3003 bp, Unknown
  misc_feature (1)..( 3003): 2750-1469P.txt file - cDNA_ID_3026267; gDNA_ID_2214568; Annot_ID_134996
ttgttattagagtatcttaattttctatgatttatttacgtagataattcattgaaaaattaaatgaatttatgtttaaattctcatctaattattatacaatagattgaaaaagtcacccttagtcaaattgttcatatagttttcttaaattgtctaattaattaccaaattaatccttgtctgaaaacttttacaaaagctaatacagaacaaatacaaaaaaacgtgtaatcatatcatataaacaccagtcgcagcgtttcgtagaaaaattcgatttctctaaagccctaaaactaaaacgactatccccaattccaagttctagggtttccatcttccccaatctgtacgccattttcgatttccttttttgttgtttactttagcttcatcgaccatgtttaggtttcaaattgagtgtttgttctgtttctgtagagtataaatggcggatacgccttcgagcccagctggagatggcggagaaagcggcggttccgttagggagcaggatcgataccttcctatagctaatatcagcaggatcatgaagaaagcgttgcctcctaatggtaagattggaaaagatgctaaggatacagttcaggaatgcgtctctgagttcatcagcttcatcactagcgagtatgcattcccaatttttcttctttcaatcgaatttgttggaaaatattttgctctttggtgaaaaaaattgatcatttgttggaactttgggtttgtgagagatagttttcttaaactagctatggattgagtttagctcagagagttttttgaagtttatagagcaaagattatgtttttttttttgtcacaatgttaatcaaccattgtttggtatgggtttaccttaacctagttcctttcctatagaccattttgcagattatttcacatgcttctactgtgttatatcttaactctgtcaaataaattgttagatttttttcttcatttaaccatcttagggtataaaagccgtatcttgatcatgtttcaaagattcttttatctttaggatctgtttgtttttgttcctttttgttcatttaaggcaaaagatatgtttttcatcatgaaggaattgcttgtgttgaatgcgttttaggtctctgattgatgagttttatgtttcttataacatcagatgcccccgttctttgttaggaagaaataagttatcatgtatgaaactatgatttatctattggttcaagataagcttgtctgatgttgcgcttaagtctcttttgctggtcttatgttgattcgttgactgtaatggccaattgactggtatctgtttctgctaatcagggccagtgataagtgtcaaaaagagaaaaggaaaactgtgaatggtgatgatttgttgtgggcaatggcaacattaggatttgaggattacctggaacctctaaagatatacctagcgaggtacagggaggtatgttgctttgactccctaatcatgtgttctgaaatccttaatatcctagtcaagagattagtagctgtgagtaacatcgaagcttgccatgatagcagttttacaatcccttcaatacgtcttgtgtagaatttttgaagcaagaaagataaatctagaccaacagtcaggatgcatattagtaaattttgaaagacatttattactctctcttttgtgcttttgttgttaacatacataataaaatcaaaatgtttcttattaagttgagactaattcggttcttttcattccctgggattggttgctgacacaccacctgctgatgcagttggaggtaaataaaccacatacttatttctactttatattccattccagtgttgcccattggcttcttacgttttgttgtgaaattatgatagggtgataataagggatcaggaaagagtggagatggatcaaatagagatgctggtggcggtgtttctggtgaagaaatgccggtatgattttgacaagtatagatgataccaatgctatacagcctatattgtacttagctctgacttcatcattttgattcaatcacagagctggtaaaagaagttgcaagtagtgattaagaacaatcgccaaatgatcaagtaattcttctctctatcacacggcctcatgtacacaaatgaagagcatagtctatatgcatgtaggttcatatccaatcttcacttcgttacaactgatgatagtaggacatgccttgtaaacttgctgatcatgttatattttgctgtgtgaatgaactatggctagtttcaaaattgtttgtctaacgtgaaattctctaaaacggtgcaggggaaattagagatcagtgagttgtttatagttgagctgatcgacaactatttcgggtttactctcaatttcggttatgttagtttgaacgtttggtttattgtttccggtttagttggttgtatttaaagatttctctgttagatgttgagaacacttgaatgaaggaaaaatttgtccacatcctgttgttattttcgattcactttcggaatttcatagctaatttattctcatttaatacaaaatccttaaattaaatttgtacagtacctttgttttgggtatagacaattacattttaagtcagttgatctgtatcaaatactacacttacaaaatcacaaagtaaaggcagcaattaattttgctttgaattgaaaagctttgagagagtaatcaaatgcttaaatcacgaaaacttacaaatttcaaaattttgtctctccataaattctcttaataaaggctgttgtttttccaatttgaaaattctatttttcaaaatcaagaacaggctatggaatttcaagaagctggttcatcatcaagtagaatcatcttcctctgtttcctctcctatctaaaatctctttagtcttcagaaactgattatactttgtgcagcagcaagagtaaagattgactttgtgcagccgatg

SEQ ID NO: 30131 - DNA, 3003 bp, Unknown; identical to SEQ ID NO: 25979
  misc_feature (1)..( 3003): 2750-1469P.txt file - cDNA_ID_3026267; gDNA_ID_2214568; Annot_ID_186073

SEQ ID NO: 30132 - DNA, 3000 bp, Unknown
  misc_feature (1)..( 3000): 2750-1469P.txt file - cDNA_ID_3026271; gDNA_ID_2214568; Annot_ID_134993
taaagaacaaattcttttacttatgtaaaaaatcctaaactttaaagaacaaaaattaaaatacaaagataagtaattaacattttattgggcttctaactggatttggttctatttatttgggcctacgtttgaaaacctcggtcttaaagaatttgtgtccagctccagcacaaggagaggcttatagaccatatgtcttttggtgtctgtttcaatgggcttacatgttttgttttcaggcggcctcgtcttcttgacacacacaagtttgtaacattgggcagtgtgaaacatacacaaaactaaacactaattaattctcaaccacaaatatttaagtgtgatggtgacttggtctcatataatatgtgattttgtaattttgttcgaaacccgcatatagagttgttaccaattaatacctaaatctttattccggatacgtgcttttaccaatcttaaacagaccaaaagaaaaactatgactaagttgaactgtatatacgtgttttaaactgtatatacatatcaaattgaatattaactatatgacaagattatcaaacgggaacaaaaaaaaaactatatgactaagttgtgatgttgtttgtcaaattttatgtacgtcaacaattcaacataattgacattatcgttgtttgtgtgtgtgacaacaattgattatagtatttttatacatgaattttatgaaggacagtttggtcatttttgtcggctaagtgccaaatttggcagaagcgtttttttgcatgcaaacagaattcagtcgacgctagaaatatttttcaccttcgtttgtttttcaaatttcgacattatcttagccttagaaaccttatcttgttctcgataaggtttgaacatcgtgatataaatatgtacatttcaaagctttataaaacaaaatcagaagtgtcaaagcttttaccaaacaaattaataatgtcaacgaaggggctattaaaagctggtttcgtcaaagtttgacttttgaatctgcaacctcaccgacgacaccgacaccaagacgtaacgtacgtatccgattctataaatgggactcaaatctctaaaggtgagcatacaaatacatcagaagactacataaatatatacaagagtgaagaaaaatgtcgaccgaatgtcctagtaagtttttgtatttgtattgtatagttcataattaaagttttatatgtttgtaaatagttagctaatgttcaattagatatggattcaaggcatttaaaattgtaattcaatagctataacatatatgattacattttctaaagtctgttagaaggttaattatgttacatatggtcaatccatggtgatgtttctagttcttttgttttcatttactcaaatatgagcttcttgatctccaaaatcccaaacgtaaatgattgaccgatctaacgtaacgtgatcgcagggaagaactcgtggccggagcttacgggaacaaatggtgactatgcggccgtggtgatagagagagagaaccccaccgtcaatgctgccgtgattttggatgggagtccggtgaccgcagacttcaggtgcgaccgggtcagagtttttgttgatggaaaccgtatcgtcgtcaaaacccccaaatccggctagacttgtataatttctatattcataatgaaaaagctatagacgagtcgtggttggttagtaatcaatcatgtaaaataataatcgtttgccttcataatttctgtgttactgatgcctaaagttatgaatgaaaatagtatcctatatttcaatttgtaatgtttcaatttttttttgtcagccaaattttttgatttaaagttcaaaagaacagattgtgataacgatttctaagagaaaaacacgtgtggcaagtggcaacgtgtagacaacaaatggttgaggggagaaggagcaccccgacctagtcctccgccttgaagctcttccaagcaagaatcaggaaaaccaaaaattagcaaataatggataatggaccatttcaaataaataaaataataagtgaagtacaaattaataaattaaagcaggcctgttttgctgccaaaataaataaattaaagcacttatgatatatacaaattttagaaaaagtcatatgattaacaaaattttacaagagtattttaagctaatagaccgtttagtgactagtgtgatcatcttgtagaggtctattacacgtgttagtgactagtgtgatcatcatacacatgaatttttctacaaaatacacatggatttttctacaaaatacacatggatttttctacacatacacatcccagaagctctcctaaatccaagctttccacaacccaagggtcccatgcatagtctaggtttatcgaggcccaagcttagcttatgcatacatgctccttgtagccaatatgctctagaatcctgactccacaaacatgagattcatgtagctcaagttctccatagtccaggctttggtaaacatggctacatatcattctttagattttctagattctagcttccgagagaccgtactctgaacgttaactcacgagtcatgtgcattaaatgaaatacatacacgacgttttgtatacatcacattcaatctaccaaaagtattattttacaccaaccaaatggatgtaaaataatacaaaatggaactattcaacataagtataccaattcaatgtccatttcataagtataccaattcagccacatataatagttagcagaaactacataccattcaaagttatagctagtttatatatttgtaataaggacttttcaccagttggactttgaagccaccaaaaaaagtaggtgaaagtgagttggtggggggattcaaaagttccacatgacaaatagataatcagtataaataagattagttcttcttatattgtcttattcaatgcacacaaacatttacccaaaatg

SEQ ID NO: 30133 - DNA, 3000 bp, Unknown; identical to SEQ ID NO: 30132
  misc_feature (1)..( 3000): 2750-1469P.txt file - cDNA_ID_3026271; gDNA_ID_2214568; Annot_ID_186071

SEQ ID NO: 30134 - DNA, 3003 bp, Unknown
  misc_feature (1)..( 3003): 2750-1469P.txt file - cDNA_ID_3026283; gDNA_ID_2214569; Annot_ID_186121
aacaatcatacgaatatatgtcaatatcacttactatatttaaacttaataattattagaagcccttttctatatatacatgcgtgtatgttgtattgttatatataaataaaaagtacacttatttacttaaaacaacgaaaatattttatatttttgcttctgcaagaagcatgcagtcgaacatatggacctgcgttctttggagttgttggattgttggaatcatatgataatttcagcagacgcctatacattaatacttttcattgtgattttttgtattatatatatggactaactatctgacactgtaacactacgtgtaataactataatttttttagtttataaacaaatggggtctaataacttgaaatgtactcttcaatgtgtgaatccagccaaatttggtcattataaactattttttgttatattatctagtgtttcatttattggcatcccaactagaaaaatgatatatatgaacaaacaaaatataaacaatattttacttgttacgttttggccttacactttttaaaattgaaatgactaaacccatttgcattgcatcagcattagtggtttatttattgttaagtatcaaagccatctctgctcatagattccgcgcatgcgtttgtacctccactaaccatctcaatatttatttcctttggtatttgatctctattataccaacttatttttttacatatataaaagagatattaccaaatatgttgaatctaaaaatattaaccactaaacttagatataccttaacttcgtgaatatacatatacttgtataagtattattaataaaacataaaacaaaatgactatacatgaacgaacacatcttttatcgtatatcatttcatatgttttccaataatagatgttttggaaaatttaaatttttatacaaatacaaaaaaaatatgcaaattttatataacactttcaatgttattctattagttagagatttagagttgaaatacttaatttaaataactaacaactaataattaactataaaacaaagtgtattgcattgcaatttgtaaaaatgttcttcgtatttatataatgtctaaaacatacaactttataaaacgagtgagtattgcagatatcttactgcaataatgccgacaaaaaatataaaagtaaaaatcttactgcattaggtatgctttcgaaagttaaaagttttcaagtggcaaacatttgtccgcctagacaggaataaaacaaaaaaaatattcataaaaccaaaactgttgcttttactaaagaagactttatgctacatttttaacaaaaaaaaacaaaaaaactttatgctaaattttatattttaaatgtgacaattaacaggtaacaacacgctggaaaaccagcagagatattaaatccggttaaggcttaatatttactgcttacatttccagtgacaatatagagaatctaacattaaattatatgaacatgagattaataaactcactatagtaaaataagcaggagacatcacgtgaagcgtcggattgtttgtcataatgtcttcatcgtacggcaacgcgatgaattgaaacagaagacatcacgtgaaccagtgctacatggttaactcaatcattaacggcgtatattttcttgtattgattcttctccggatcgttaactatgctcccgatttaacaccgtcagttcagtatttatacggcgcaataaattacgataatgtagcctcttgagagaatgttttgcgggttggactttggagaagaaaacaatcatataacctatctatataaaatcgagtagaacgagaaataaaattattgtaaagcgagagtgcattaggattatgtggtctaattatgaaagaaaaaagattatgccaataatgatgatatcgaataaacaccagcacgatggttttctaataatccacaactaaacaaacgtaaggcctttatttatctatttttatgttaatcttgaactatcgaagcacgacttgagctatctatgagttattacaaaaatatgatgtcgtcagtttgtcaccgagggcttattaattagataaattacaaaccaatttttgtccttcatataatttcatttaacggatcatgaaaattaagaatcaatacgatacaaaatgcataattgtgtatttgacgtgataaaagaacaacgaaccaatgcacatgtaaccatgtgataacgtatcccccgaaaacaaaaaaaaatagccaagacactacagcgaagtcgtcttttgtgatgtcgattctatatcgtcgcccccacttacaacgacgtcgtataggtttaatcatcaatcatggtttcatttataaacaatccaacaaaaaaaactttgtatacgttctaattgataaaacaaaattaaaaaagagagggatggatcctaacactgagttacagagacattagagacaaatttgcttgtgacttaactaggtcaatataaaacaaaatcaaagaaagttccaaaaaacgacactgactcgtatgtcccccattcttacttgtcacccatctaatctaaccatctcctaggcagcttcacgagccgtagtctaatctaaaatcttatcattagacatttctatatatattttaatttctttacctttttacaccactgtagaaaaccacgaattttactccataagttgatatcattttcatttacgtctccgtcactctttctccctatccactaaacacagatcccaaaaaagaaataaacgagtaaaaaatgtaaagaaacgtccctttgtttctacgcgattttctgtaaattttccttcgttttctcgcagtttctttctcaccaaacaaacccttatatcactctatctctttctttctctcacattcaaagcttcttcttcttaactctacccctaacgtcctctcatcttctctggcagaacagaaaacgatg

SEQ ID NO: 30135 - DNA, 3000 bp, Unknown; identical to SEQ ID NO: 12765
  misc_feature (1)..( 3000): 2750-1469P.txt file - cDNA_ID_3026310; gDNA_ID_2214570; Annot_ID_135049

SEQ ID NO: 30136 - DNA, 3000 bp, Unknown; identical to SEQ ID NO: 12765
  misc_feature (1)..( 3000): 2750-1469P.txt file - cDNA_ID_3026358; gDNA_ID_2214570; Annot_ID_186143

SEQ ID NO: 30137 - DNA, 3000 bp, Unknown; identical to SEQ ID NO: 26325
  misc_feature (1)..( 3000): 2750-1469P.txt file - cDNA_ID_3026364; gDNA_ID_2214570; Annot_ID_186141

SEQ ID NO: 30138 - DNA, 3003 bp, Unknown; identical to SEQ ID NO: 25983
  misc_feature (1)..( 3003): 2750-1469P.txt file - cDNA_ID_3026384; gDNA_ID_2214570; Annot_ID_186133

SEQ ID NO: 30139 - DNA, 3000 bp, Unknown; identical to SEQ ID NO: 12757
  misc_feature (1)..( 3000): 2750-1469P.txt file - cDNA_ID_3026388; gDNA_ID_2214570; Annot_ID_186132

SEQ ID NO: 30140 - DNA, 3000 bp, Unknown; identical to SEQ ID NO: 12771
  misc_feature (1)..( 3000): 2750-1469P.txt file - cDNA_ID_3026394; gDNA_ID_2214570; Annot_ID_186127

SEQ ID NO: 30141 - DNA, 3003 bp, Unknown
  misc_feature (1)..( 3003): 2750-1469P.txt file - cDNA_ID_3026433; gDNA_ID_2214571; Annot_ID_186192
gcaggtaaatctttaacatctttagtatagttatgatttttaagcctatgttaatgaatgtgagtgttttcaggtagctcgtctacaaaactggttgagagttcagatgggtggagaaccgcttcggtgacgggttggttcagcagcggtatggttcatcgggtagtctcgtcggctacagtgaaggaaggaagagtttatttaaaccatattgttggatttgggtctaaaaagaaacacgtacttgtagaagctgtgttttagagtcttcttagttataaatcgcttcttaaattgtgctaatgatctcggtatgattctattgagatctgatgtaaaactttttttatcatgttttatgttgatttttcattatgatcttacgtgttgaaatttaacatatatatattgtgtacatagattagttgtagatggtatgtcgacgttatcgaaaattgaaaatttgttcaatttttaaaacaagttggtgctgcaacgcccgacacacacacacaaaaaaaaaactcattaatcttactatagttttttgtatatgaaatcaaatcttcaaattaatgattgtgtccggcacgttattcttaaaatcaatagttgcacttaacaatcaaattatatcgctagttcatacttccgcatgttttttgtttagttaaatatggaatacacacttgtttttcttataacaaatatcgtggaacttttggagcggatttgggatgacgtcttagattatatagaaaatagaagtagattttgactgaatatcatcaatgaaaggaacaaagaaaaatatttaggttgatttgatagctaattaaactagatgtagactgatttatataacaatattacaaaacaatgatcaacaataaataaatgtctttctaaaaaagtttatgaataccaactaaactggtggaacaaaccattattgtgatgttgtaaatttgtaattgactttttcgataaattaatcgaaattgactagaccggtgaaagctaaaccggttccatctaattaaaatgagaaaaaaaagtagtggtagtaacttcgtctcgaaccatgcgcgggattaaagagagcgaattatacgaccactatggcaagacgcatttaattgaataaataatactagatttgcgcaaaatagttgttatacattttgaacaaaatatataatataaaaaccaaataatatttagatccgtgatgtacaggttgaatctatagaatttttttagaggaagtaaaaaagaatcaaaatctaaagttaaaattaataccttaaattttttgaaaccttagagagagtcttcttcccgtaaaaatatatattttactttatactgaaaaagtataatattttctatgattttttggcaaaaaaacaaagaaattgtatcacggaatctgcaaaacaaacatattgtttaaaaaatatttctaaaatagttatttaattgatcgtaattaatatgtcccctcatgtcttatccgttgatttatttttagtgacaatccacaaaaatcggccataatctctacttgatagttttttctttctattttgatattgaaaggttagtcctatgtttgactaatattgaggaatcttctttgttgatgtattttgtgcaaattttgaggaaccaaagagaatttcaattccaattttgggtggattcgagctattttattgatttatttttggttatatctcgaaggatgttctgacaatcaatagataatttgaaggccaacactgtttttgcataaatataggattcttcatctcaaaaattaaaaagatacataaataatcggaactcaccatataattgatctgttttggttctcgtcctagttcttcttgtacttctctttccaatttcttctctcctttcttctttcccatttcttctcttctttcttctttcccatgactatgattagattttttttggccctttttaccagcaagatgttatcttgtccatggaatttttaaaactagttcaattttgattaattattttaaattgaccccattataaagtagaaattaatccttgtaaaatttagtttaagagcaaacaattagatattatataactttttaggccaatttaaatcaaaacaaataaatataaaataaaaacatgtctattgaaatgatttcaacctcataattttgtcctcttgttagtctatcatttttttatcatccttttttttttcattcaccatttttcattgaaaattaagttaaaaataaagttataggttaaaaaattaatatacattttaattttaaatacaatgttttgatgattttatctaactgattatataaaaaaaatattcagcgtcttcaaaaaaaaaaagaaaaaaaaattattcagttagaatattgattcaaagaaatttttcaatgggtataaaaaatagcaacgcaaattactttggttgaaaaaaactaaatttaaaaatataattcgagttataaattgagctataaactcaaataaaagttttaatacgaaattaaacaatagaatcttctgcaattcgaaattccttttggtacgtccatgtcttctttccgccatggaaataatgccatctgttaatcatcaatgttcattgcacctcttcatctctagggttcccatttctaattctctcttaaacccttctcgccgttttcgcccataagtttctcaattcccaaattcgcaatcgtaatggcgattctcctcaagctttcgtcttgctgatcctttaaaggtacgatttttctattcaatttagtatcagccaatgattagttattgataattggttctgaatcgcttggattgtgttttcactctgcaattaggttgttgtttggtttttgatcacaaagtctcatactttttggttaagattcaatcaaaagagtcaaaggttacttctttgttactgggttttgagtaatg

SEQ ID NO: 30142 - DNA, 3003 bp, Unknown
  misc_feature (1)..( 3003): 2750-1469P.txt file - cDNA_ID_3026439; gDNA_ID_2214571; Annot_ID_186189
tgtaataaaaaaagaagaagaagaaattgttataattttaatacaaacatatataatatataaagtagagttttcaaagttgttaactcatatgattgatgagatatcgacatgtattaaatctaattttgttaatatataaaaaatcttctaaccctatcgggaaaataaaatatatacataaatcacaaaaattatttatataatcaaaaaatttaattatattttatataataaaataattcatattattagcgaatttgttttttttaaaggaccgttcaaatatgtttttttgtgtattttgtcgaaatttttgttatttttctttttattttgttaaaataactctaaaatatagatttcaaacaacacataaaatagtgagatgcatagataaaggttataatgggaaaactcaatagtatcaaagataaatgagaattaattatagtcatgtttgtgtaaaaaatttaggacaagttactaatatttaaagtttaagcctagttatttagtaaacaacaaaaataacttacgttatctaacgatatttttggagaatagatagattgaaataagagttagaacactaaatattgaaaacgtgtgtgggttactatttaaaatttaaatatcataaagaattaaaacacgaagatgaaatatgtagaaatattttttcagctcttatccattaaaatgaaatatatagaattaaaattcagtatattttcatgaaatatatagttaaattattgcaaaatagaatggataaaattaaattttggttttaaaatatttagataaaatgaaaaagtgtacattgctattagaattcaattattatttgaaaaattatatatgttttttatattcgcctatttaaacggggtttatctaatatatatatatatatatatatatatatatatatatatatatatatatatgatcttataaagaaataattaaaagatagagaggaatggacgagaaagcaacatgacagttctctcttattaactttcactcctcttcttcttattaatactgagatccaccagaaaagggttattgctattgattgatgaagatgatccattgctttacgagtacgattataacttctaagcttttttatatggtttcccatagatattcttagctttaactgaccaaggtagttatatgttgtagtcggaatagccattaatatctcaggtgcatcgcagcactgtaaacgccttgcaagcctggacaggtggacagtcatggtctagaagaagatcatgttcatagcttttttggagactttggcttttatagaaatcaaggaataagaaagtattttaaagtatagaggctttaggtattttaagtcatgctagaagtgaacaattggcatgggaggctgctcaattgaatcttgtaggagagataaaggaaagagaagtacttccaatgttttctccaataattttgtgccagacgagttgtttttaggaagatgcaaaagtagtacttttaaggcaaaatgtcacaggaggaggagtctctcaccgattcacttggaaatggaagccttattatatgagccatgaataataatatcctatcaagacggataaattatcagctttttgaaatacattgtgtagaacttgtcttaatagtggaattccttgagaattaaaccattttctctaatcttttcgatgaatttgcttcgagttaagttttttatttattttcaaagctaattatttctcgttcttgtaacttcaagttgattgtttagccaagacctcataaacctttactttcagaagtttcttatgtacacactctttctcctaattggattaccaatcaaaaagtgaatttttaactagtacaagattgaaaaaagaaacatttatataatatccgtttagattgaaagaatttttcttttgttaatctttatctcttttttatatttcgatataagccgtttctcggaaaattaaaaattctaagccgtttatatggccataagtaatgaggcagctctaagcccgaaatagccggtggccacacatattcacttgggacttggcccttttaaaacacctaatttcatgccttttcccgctaaacttgccactttctcctaaccaactcatttcttcatataaaaccaacaacatcacacaaaaagagccctcatttattcacctttcttttcccttaaatataatctttataaaaaaaattaaaaattaaaaaaaggaagtaaattgaaaaaacaaaattggtcccctgtcttcttttgttcactggacccttttcttggcttcgctaaatcatactatctctatcttctcaccgacactttcttcttctttgatcatatcatatttatcttcactacaaaaaaaacaagtaaaataaagccaatcttcttaaatatctccagaagatctatcagcatttacgtattcaggtcctccaatgtaagtttcttttttactttcttattctatttgtgtcaatctggtttcattagtcgtggcagctgggcaggtacaaatgctgatggcacatggcatcaaaactatcaatttatttatgtcctaaagacaaaatttaatgataaaatacaaaggatttaggtgatactatgttgtctcttaatgctcatcgtgtatctcttaaaaatccaaaatcttcttattttccttatatttaattaaatgtgtcttgaattttcaagtgtgtctctctctcaatactctggagtttttgtttgtttgtatctgatagttgttacaacatcaattttctgattattctatctttcaacttccctataaaataattatttagagaacaacataaagtttgtattttaaaaatatttaatagccattgattacttttgtaattgcgttttctattagttcttctcacaaagaaaaaggaagaaaaaaaagaagttgtgagagcaaaaaaaaaatg

SEQ ID NO: 30143 - DNA, 3000 bp, Unknown; identical to SEQ ID NO: 12786
  misc_feature (1)..( 3000): 2750-1469P.txt file - cDNA_ID_3026454; gDNA_ID_2214571; Annot_ID_186180

SEQ ID NO: 30144 - DNA, 446 bp, Unknown
  misc_feature (1)..( 446): 2750-1469P.txt file - cDNA_ID_3026476; gDNA_ID_2214572; Annot_ID_186232
ttatgcgaaaatgttaaacttgccaatatattttgaccaatttagtgacaaacttggcatgaaactatctagaaatagtttcctatcttatgtgtgaccaaagctgttttcattcatagaaagacagtcatcttatttaaagaaattcctttttttctggtagattcttagttgacttctttctgtggtttataacttataagaagctgaagacatatactatttatagtggagaaacaactcaaaaagggtctaaaactacatatgtctatagatgtccaaagtgtgttttttaaaaacagcataacctataaacagcatatacatctgtgtgtcatttgtttacaaattgtttctttgttatcaaaaggaacacaacatttattttgttatcgtcttccccattttgacaagaactcacttaagattttgaagtcatggaaatg

SEQ ID NO: 30145 - DNA, 3003 bp, Unknown; identical to SEQ ID NO: 26337
  misc_feature (1)..( 3003): 2750-1469P.txt file - cDNA_ID_3026488; gDNA_ID_2214572; Annot_ID_186229

SEQ ID NO: 30146 - DNA, 3003 bp, Unknown; identical to SEQ ID NO: 26338
  misc_feature (1)..( 3003): 2750-1469P.txt file - cDNA_ID_3026494; gDNA_ID_2214572; Annot_ID_186226

SEQ ID NO: 30147 - DNA, 3003 bp, Unknown
  misc_feature (1)..( 3003): 2750-1469P.txt file - cDNA_ID_3026498; gDNA_ID_2214572; Annot_ID_186223
cgaaacgagattgtgttaagaaacataacgaatccatggttcatcgatttagatttctagggttctgaacggagattgtaccttctaaacgacgagataagcgaacgattctagcgatacagccgtcacagtgaaaatcaatcttaagaacgacgtgaaccggcgacgtcgtattgttctgtttctttttcttctcctcctccacatctccgtggtaacattcacacacttgcggattctccattttcgtctctaacttcttctgcatacaggtttaaaaaaaaaacctcaaaaaaaaaaaactcaaaaagcaaggagacaaacacattagcagagacagagagaaccttgatggaggatagagaatagagactggagtatctgtctcggtttcttcaaaggaaaagtggagaagacgacgaaaatgggtttcagagacggctgcgtaacagaagggagtgtagggaggtggttcacagtgtacgtacaactttgttatagtcctttccttactcttgctttttctatttttgttttcattaagatcatttatatattcaatatttttttaaaaaatgaaataagttctattaaacaggttattaaaaaaaaaaaattgttagtaatttgagattcctatttttgttttggttaataatgtgtgaatttggtttacactaaaaaaatgtcgtgcaagaaaatactaataaaaatgagaaatgttgagaaaataaatctttttaatcattactagacagtagacatttttctttcaattccattaaaaatggaaaaattggtcatcatttattcaatgttatttagtcacatagttatactaaaaacaaatttttattgcgtttgcattaagtttccaaccaataatgaataatcacgtcaaagttagaaccaaagcaaaaaaaactaaaaagctcaagaagaaaaggatagagacgacaaaactccattgaagaacttattagagaagaagaacaacaacaaggaagataacgaaagtcactaaaatctttcaagacccatgaactctcaaatcactcttttcttcttcttcttctcaatcctctccctctcccaaatctcaaattcatcatcactactaaaaccacacccatgtccaattttacccctcccatcctcccaacagctccaatggcaactcggatccatggccatgttcctccattttggacccaacactttcaccgactccgaatggggcaccggaaaagctaacccatccattttcaacccgacccatctcaacgcaagtcaatgggtccaaatcgctaaagactcaggcttttcccgcgttatcctcacagctaagcaccatgatggattctgtctctggcctagcgaatacactgattactccgtcaaatctagccaatggagaaacggagccggcgatgtagtggctgaactagcttctgcggcaaaggaagctggaattggacttggtctttacctttctccatgggatcgacatgaacagtgttatggcaagacattggagtataacgagttctatctgagtcaaatgaccgagttactaacaaagtaagctcctttttctcatatcagtcaaatgggtttgtgattccagttccaagtttttaaaaaggttgaatctttattaggtatggagagattaaggaagtttggttagatggagctaaaggagacggagagaaagatatggaatatttctttgatacttggtttagtttgatccatcagcttcagcctaaagctgttatattctctgacgctggtcctgatgtcaggtggattggtgatgaagctggtctagctggctctacttgctggtcactctttaacagaaccaatgcaaagattggtgacactgagccttcgtgagtcactctctaatgttgaaactttctatagatgttagggatgatagagatcatagcttgaagttgtttgtttgatcttgtaggtattctcaagaaggtgatggctatgggcaagattgggtaccagcggaatgtgatgtatcgattcgacccggttggttttggcatgcgtcggagtcgcctaaaccggctgttcagcttttggatatatactataactcagttggaagaaactgtctcttcttgcttaatgtacctcctaattcttcaggattgatatctgagcaagacattaaggttcttgaagagttcagcgaaatgaagaactccattttctcgaacaatctcgcccgtaaagcattcgttaactcgagcagtattcgtggcgatcaaagttcacagtttggtcctaagaatgttttggaagaaggattagacaagtactgggcgccagaagagaatcaaaacgaatgggtgttatacttagagtttaaagatttggttagcttcaatgtgttggagattcgagaaccaatccatatgggtcaaaggatcgcatctttccatctcgagacacggaagactggaagcggtgagtgggagagagttgtgagcggcacgacggttggtaacaaaaggcttttacggtttctgaatgttgttgagtcgcggtctctaaagcttgtggtggacaaagcgaggaccgacccacttatatcgtacctcggactctacatggataagttttcgggttctagtagaaacacaacaaagataacaatcacaaggacactaaaggaagagcagcaactacatgatttgtaagaaataactctcaaggattcatcacataagtgttaggtattcttgagaatatctatgtgcatcaagtcatatatgtgtcactatcaattcttgtatgttaaggctctaacttttactctattgctttaaaagaaatatgactttttttcttcaatgacataaatttgaggatttgggtcttcttttgtaactcggcccaaatgttttaaagaatttcttatggattggagaaaacttttgtggaaaaacagagaaagccctaaagttaagagacatg

SEQ ID NO: 30148 - DNA, 3003 bp, Unknown
  misc_feature (1)..( 3003): 2750-1469P.txt file - cDNA_ID_3026501; gDNA_ID_2214572; Annot_ID_186222
atgtcgttaggcgtaaacatcaagccgaggtgcattagcactaaagtaaacaagtcgaaggaccatatatgttctttaaatataggaactcaattcttatttggagaaagactttgcttcgtatgaacttaaaggccgggactcatggaaacatatttttttataagttgtaaccattaagttcttcatggaaacatgaaagcttaaaattctatttccaaattcactatgtcgaaaagtggatcctctccacaaaaacgtactctgatatctctcaaaatagaaaatactagtgtatttttttactactctcatgtgacacagaccatcacaatatatccttcagactttacttcttcttcttttttcttttctgtttcctattagtttatttacctcctagtatatatatttgtaataaactccaaatgctttgtcacctcgaaactcacataacgctgcaatagctctgatcttcctcactgaaaaacccagtcattgggccttccatgaacctgtaaggcccaatcccatgagtgcatccatttccaggttgacaaggagacccgactttggtgtttacctctgcattgtccttgtctttcttcttcttcttcttctcaggcacgacctggacggttttcttcagcttgcgtttcaaattatctgtcacagacttgatgtccattgttcccatgactgttaccgtttccttctctttgtccattttgacttgatacactcctattgacaaaatcacatactcaataccattagacacagattaaaatggccgcaaacaagttctgtatgagtcaaaccaaatacacaaagtaatagtcaggaaaaattcttacccttggtcgtagagacagccttttgaattctcttgatgcaaccatcacaagagcaattcactttcaacaccactgtggtcacagcaacctaagaagaagaacagagaatataatgtcatagcaagtaatttcgaaagactaaagtacttattaacccatatgatcacctagaagataacggctatagtacattatctacaaaggaatggtacgagttaagaagattgttacttgaggatcaagtaagcctgagaaaatctaccttttgatactacttacttccttactagttatcacattctagtcatggtttaagtgtttgtgagaaacaaatgtcctaatcagagaacgtatgcaatgaatgtagagcttaccacagtctgagtcttatcattagcctttttctcattgttctctttggtgtctttctttggtttaggagatatcagctccactttcttcttgctcttcttctgaagtttctcagcaatcttcactggatccatgataaacccaatcagagtcagcttgttcgaatcaggatctgctctcactgtttcaactcctgatacagtacaacaatcagaacaagtcaatgagccattgagcatcgatagcaatttcttgtataccaacaaaaatcatgaatcaaagactcaaaaattgactaatttctttacaatcgctgtgttttcaatagcagaaacagagaatatttatgatcctgaaactagatctaagaagaagatcgataaacgtaaataaacgaggaagagaacaaaacttcgtcagggtttagggtttaacaaaaactctcaatcgctttcacgatgctcgaaaccattatcggagaagaaacgaaacaaagcaaacgattaacacggatgattcgactgagatttcagcaacgaatccatgaaaatccacaaaacagagaaatcgaacccgagataaatgcgaaacgagattgtgttaagaaacataacgaatccatggttcatcgatttagatttctagggttctgaacggagattgtaccttctaaacgacgagataagcgaacgattctagcgatacagccgtcacagtgaaaatcaatcttaagaacgacgtgaaccggcgacgtcgtattgttctgtttctttttcttctcctcctccacatctccgtggtaacattcacacacttgcggattctccattttcgtctctaacttcttctgcatacaggtttaaaaaaaaaacctcaaaaaaaaaaaactcaaaaagcaaggagacaaacacattagcagagacagagagaaccttgatggaggatagagaatagagactggagtatctgtctcggtttcttcaaaggaaaagtggagaagacgacgaaaatgggtttcagagacggctgcgtaacagaagggagtgtagggaggtggttcacagtgtacgtacaactttgttatagtcctttccttactcttgctttttctatttttgttttcattaagatcatttatatattcaatatttttttaaaaaatgaaataagttctattaaacaggttattaaaaaaaaaaaattgttagtaatttgagattcctatttttgttttggttaataatgtgtgaatttggtttacactaaaaaaatgtcgtgcaagaaaatactaataaaaatgagaaatgttgagaaaataaatctttttaatcattactagacagtagacatttttctttcaattccattaaaaatggaaaaattggtcatcatttattcaatgttatttagtcacatagttatactaaaaacaaatttttattgcgtttgcattaagtttccaaccaataatgaataatcacgtcaaagttagaaccaaagcaaaaaaaactaaaaagctcaagaagaaaaggatagagacgacaaaactccattgaagaacttattagagaagaagaacaacaacaaggaagataacgaaagtcactaaaatctttcaagacccatgaactctcaaatcactcttttcttcttcttcttctcaatcctctccctctcccaaatctcaaattcatcatcactactaaaaccacacccatgtccaattttacccctcccatcctcccaacagctccaatggcaactcggatccatg

SEQ ID NO: 30149 - DNA, 3003 bp, Unknown; identical to SEQ ID NO: 25153
  misc_feature (1)..( 3003): 2750-1469P.txt file - cDNA_ID_3026507; gDNA_ID_2214572; Annot_ID_186217

SEQ ID NO: 30150 - DNA, 3000 bp, Unknown; identical to SEQ ID NO: 12797
  misc_feature (1)..( 3000): 2750-1469P.txt file - cDNA_ID_3026521; gDNA_ID_2214572; Annot_ID_186211

SEQ ID NO: 30151 - DNA, 3000 bp, Unknown; identical to SEQ ID NO: 12824
  misc_feature (1)..( 3000): 2750-1469P.txt file - cDNA_ID_3026560; gDNA_ID_2214573; Annot_ID_186263

SEQ ID NO: 30152 - DNA, 3000 bp, Unknown; identical to SEQ ID NO: 12816
  misc_feature (1)..( 3000): 2750-1469P.txt file - cDNA_ID_3026564; gDNA_ID_2214573; Annot_ID_186262

SEQ ID NO: 30153 - DNA, 3003 bp, Unknown; identical to SEQ ID NO: 25990
  misc_feature (1)..( 3003): 2750-1469P.txt file - cDNA_ID_3026595; gDNA_ID_2214573; Annot_ID_186252

SEQ ID NO: 30154 - DNA, 3003 bp, Unknown; identical to SEQ ID NO: 26341
  misc_feature (1)..( 3003): 2750-1469P.txt file - cDNA_ID_3026599; gDNA_ID_2214573; Annot_ID_186249

SEQ ID NO: 30155 - DNA, 3003 bp, Unknown
  misc_feature (1)..( 3003): 2750-1469P.txt file - cDNA_ID_3026615; gDNA_ID_2214573; Annot_ID_135106
gattgtaaatcagggaaaattggtttctgatgagatcattgtagacttattgtccaaaagacttgaggctggtgaagctagaggtgaatcagggtttatccttgatggctttcctcgtaccatgagacaagctgtaagtattattcgttttaagcaatttttgataatcaatctccattatcatttctaacagtggattgtcttttggttcaggaaatactgggagatgtaactgacatcgatttggtggtgaatttgaagcttcctgaggaagttttggttgacaaatgccttggaaggagaacatgtagtcaatgtggcaagggttttaatgtagctcacatcaacttaaagggtgagaatggaagacctggaattagtatggatccacttctccctccacatcaatgtatgtcaaagcttgtcactcgagctgatgatactgaagaggtggtgaaagcaaggcttcgtatatacaatgaaacggtaagcccctctattgtccttttccattgctagtttatgaacgatcaggtgttaattagtgcctttttgtatttttctatatgcagagccagcctcttgaagaatactaccgtaccaagggaaagcttatggagtttgacttacctggaggcatcccagagtcatggccaaggctattggaagctttaaggcttgacgattacgaggagaaacagtctgtcgcagcataagttcactatcaaatcccggtatttaaaattctttgcatgtggaatacatatgcgtaatcaattttgtgttggaaataaaagtaaaaagaaaaccttagattgtttttcacctcaatagaaataatcatacacacttgcgcaaactattatttttccaccagccggggattttggctccatgagagaaatatgatgtatcatgattgtttgagattgctagtgacattacaggaatgtatcaatacttctacaccacttgttatgcattgagtttaatcgttatgctcttgtgatatgttttttttggaaaatgtgatgaatgatgatattgcggctggccgagctggctggttaaagaactcaaccagacagtaaagtaaaacagccgcatagattaaacgggaacttataaccagctcttgactgtcctagcattggcggtgcgggatagaatcgttccttacatcatggaattgatgctctcattatcggtcattgtgtattacttgctctgttatttgttgtgatcaaaacctagcttctgttttacgtttgccgtctctgaatttttttttggtttttaactctccctacgtgagtatggatggtaaatacagattcaatttgaaatgctgaacgggacttggctcatagcaatctaaatcacagtgacaaacgtgtacttcgattgcctttgtgatggtcaatcaaagctgtaatgttgttggtttttgacgctaaccggaactaaactcctttcactgagaggtctcgatgagagaaatcattgtcatgaacgaaataatttaaaacatgatttaagattacagaaaatgcctaacgcaaaattattgacgaatcacaaggcaaggaagaagtagagaggagagttgataagaaaagagaaatcttcatagaaactaaaactgtgtacaagtgtttatatacattgattaagcttcaacaatcttcttaattaaccacattgattagcttcaacaatcttcttaactaacctaacatattagttagacaattaataatgtcaactccaatatttgttgaaactccaatattgttataaattgcaagctaacaaagtaacaattgataggtttaataaatattttcgtcaaatgatcattgggtagtggtatttaataatattttattaactcatgtagtgaaaagtattggacaagatgactgaattttcttcgtctcttatctaacagaggtgtaaccgaaataaaccgaattcaatttggttgggttgagttaaaataaaataagttggtacagttcagttcacgtgtttacttcgaacagaacaggctcgtgcgcgtgtcaacaaccaataagttcttttggtcgctgtagtcttcaactaaaaccaaacgacaccgttccttgtggccgcgttttccaactaactttcaacttcaactaacgttcaacgagtgtccatctcctctatctctctttttccttttcattggcttcttcatcactatagagactaaaactgaccttgatccatccaacgttccctatactgacacgtgtatccatcacagtgtcggctaaagctcaaggaactcataccaagaaatacatcatcatctctcaataatcacaaaccggatccggatcaatttggatccatcagattttcttcgttccctaactcctaaaaaggagagattcttcaaatccttatcacaacttcagtttttgcattcaccgtcgtgagtgttctacttttggtaatgattcactagtcaagtttctttctttatgctataacttgcaactagatcttgtactaatggaattgatgtttctccaatcatcttctttgattttgctccatctttcttttcctaatttggaaaaatgagtctttacctatagaatctgataaatatgtctcttacataattgattaaggtcaagtaatggaggtgaatgatggtgaaagagtggtaatagcaaaaccagttgcctcaagaccttcttcaagttctggcttcaggacattcactgagcttcttactgattcagttaccgtatctccgcaaacgacttgccacgagattgtagacgctgctataagaccaaagactttgagattcaatcagccagtagcagcttcggtctcatgtccacgggtatcgagttgtctatttaattcttcgcattgttatcttctttccgcatcctctagtcttgactcaactatttctgataatgataggctgaagtaaaaggtattggaaatggaatg

SEQ ID NO: 30156 - DNA, 3003 bp, Unknown
  misc_feature (1)..( 3003): 2750-1469P.txt file - cDNA_ID_3026615; gDNA_ID_2214573; Annot_ID_186242
tctctcaaaaggtgcgacctttttttttctttcccattttctgttactgtgattctgatggagattctcttctttgttcgattttggatccatatagtctgaaattgaatgtttagctaatcggactttcattattggatctgaaaatttccgtctatctctcgatagatctagtgagctaagtccatttgaaagtgtttctaactacatttgatcagtatcataacagatctattcatatatattaaagtcaatggctttgttttgtttgttatctgtatgcataattgttaaacaatctcttgttacttgatgcagctatcggagattgtaaatcagggaaaattggtttctgatgagatcattgtagacttattgtccaaaagacttgaggctggtgaagctagaggtgaatcagggtttatccttgatggctttcctcgtaccatgagacaagctgtaagtattattcgttttaagcaatttttgataatcaatctccattatcatttctaacagtggattgtcttttggttcaggaaatactgggagatgtaactgacatcgatttggtggtgaatttgaagcttcctgaggaagttttggttgacaaatgccttggaaggagaacatgtagtcaatgtggcaagggttttaatgtagctcacatcaacttaaagggtgagaatggaagacctggaattagtatggatccacttctccctccacatcaatgtatgtcaaagcttgtcactcgagctgatgatactgaagaggtggtgaaagcaaggcttcgtatatacaatgaaacggtaagcccctctattgtccttttccattgctagtttatgaacgatcaggtgttaattagtgcctttttgtatttttctatatgcagagccagcctcttgaagaatactaccgtaccaagggaaagcttatggagtttgacttacctggaggcatcccagagtcatggccaaggctattggaagctttaaggcttgacgattacgaggagaaacagtctgtcgcagcataagttcactatcaaatcccggtatttaaaattctttgcatgtggaatacatatgcgtaatcaattttgtgttggaaataaaagtaaaaagaaaaccttagattgtttttcacctcaatagaaataatcatacacacttgcgcaaactattatttttccaccagccggggattttggctccatgagagaaatatgatgtatcatgattgtttgagattgctagtgacattacaggaatgtatcaatacttctacaccacttgttatgcattgagtttaatcgttatgctcttgtgatatgttttttttggaaaatgtgatgaatgatgatattgcggctggccgagctggctggttaaagaactcaaccagacagtaaagtaaaacagccgcatagattaaacgggaacttataaccagctcttgactgtcctagcattggcggtgcgggatagaatcgttccttacatcatggaattgatgctctcattatcggtcattgtgtattacttgctctgttatttgttgtgatcaaaacctagcttctgttttacgtttgccgtctctgaatttttttttggtttttaactctccctacgtgagtatggatggtaaatacagattcaatttgaaatgctgaacgggacttggctcatagcaatctaaatcacagtgacaaacgtgtacttcgattgcctttgtgatggtcaatcaaagctgtaatgttgttggtttttgacgctaaccggaactaaactcctttcactgagaggtctcgatgagagaaatcattgtcatgaacgaaataatttaaaacatgatttaagattacagaaaatgcctaacgcaaaattattgacgaatcacaaggcaaggaagaagtagagaggagagttgataagaaaagagaaatcttcatagaaactaaaactgtgtacaagtgtttatatacattgattaagcttcaacaatcttcttaattaaccacattgattagcttcaacaatcttcttaactaacctaacatattagttagacaattaataatgtcaactccaatatttgttgaaactccaatattgttataaattgcaagctaacaaagtaacaattgataggtttaataaatattttcgtcaaatgatcattgggtagtggtatttaataatattttattaactcatgtagtgaaaagtattggacaagatgactgaattttcttcgtctcttatctaacagaggtgtaaccgaaataaaccgaattcaatttggttgggttgagttaaaataaaataagttggtacagttcagttcacgtgtttacttcgaacagaacaggctcgtgcgcgtgtcaacaaccaataagttcttttggtcgctgtagtcttcaactaaaaccaaacgacaccgttccttgtggccgcgttttccaactaactttcaacttcaactaacgttcaacgagtgtccatctcctctatctctctttttccttttcattggcttcttcatcactatagagactaaaactgaccttgatccatccaacgttccctatactgacacgtgtatccatcacagtgtcggctaaagctcaaggaactcataccaagaaatacatcatcatctctcaataatcacaaaccggatccggatcaatttggatccatcagattttcttcgttccctaactcctaaaaaggagagattcttcaaatccttatcacaacttcagtttttgcattcaccgtcgtgagtgttctacttttggtaatgattcactagtcaagtttctttctttatgctataacttgcaactagatcttgtactaatggaattgatgtttctccaatcatcttctttgattttgctccatctttcttttcctaatttggaaaaatgagtctttacctatagaatctgataaatatgtctcttacataattgattaaggtcaagtaatg

SEQ ID NO: 30157 - DNA, 3000 bp, Unknown
  misc_feature (1)..( 3000): 2750-1469P.txt file - cDNA_ID_3026619; gDNA_ID_2214573; Annot_ID_186239
gatctatcgagagatagacggaaattttcagatccaataatgaaagtccgattagctaaacattcaatttcagactatatggatccaaaatcgaacaaagaagagaatctccatcagaatcacagtaacagaaaatgggaaagaaaaaaaaaggtcgcaccttttgagagagaggtccagaagatgcaagctcttcacggacgagatcgccggtggcgatgtgaggaacgccgagaagggttgatagtctactagcgtaagttccttttccaacaccaggacatcccaaaaacacccactgaacatttctatctttcggagcaaccctgctagctccgccgccgtgaagaaacggcgaaggcgacgacgcgtggctagcttcggctgaagtagagtagaaacggttaccaaagccaaagagggaggaggatctagccacacgcactaatctcgccattgcagaaagagaaatgtagagagatagaagcggcttgagctttgagcttaccctaaacaagaacgtgcacgaacatatgctctttagattcttttcccattttgccctaaagttaactgacgtggcatgtgactttttctctgagatcatggttacatcatctgacacgtgtaataacccaactccacgagattaaccaacggtatgagaaaatcgatttcgattttaaattgggattattattattttcagctttctctggaagcaacaatggcgattgctctctcgtcgtcgtcgacgatcacgtccattactctgcagccgaagctgaagacgattcatggattagggacagtacttcctggttattcggtcaaatctcactttcgtagtgtctctctccggcgtagcgccgtggtcgtgtcggccattaccggagcttcttccggtgagcttaagtgtcttctctttctatattatattgaatacggagattctagattacttactagattatattgattctccacaggagctggaatagggaaaggtacagctgattcgctagatacagtgaaagtcttggatttgagaggaaatgagattccgatttctgatttatggaaagataggaaggccgttgttgcatttgctcgtcattttgggtaattttctcattatatttgatgattctggtttatgactatgtgtaactatctaagattgcttgttatgttttcagatgtgtgctctgtcggaaacgagcagcttatcttgcagaaaagaaggtaacagaatgatctttggtttaaaaagattggccatttatacacaattgaagtcattgagtgatacctttgagatttttgtttaggatgtgatggatgcatctggtgttgctcttgttctgatcggaccgggaagcatcgatcaggtaaacaacattttgaatacgcaatttttgtaagcgtaagcagttttaagctgctgcttctcacgttatgaccatctatgtatgcaggctaatacttttgtggaacagactaagtttaaaggaggtatgttttctcttgattactaaaaaagcctggtgagtagttccttttatgagatgatctaattatctgtaatcaactttctctcaatacagaggtctatgcggatccaaaccacgcatcatacgaggcgcttgagttcgtttcaggggtttctgttacatttacacccaaagtagagtgacttctacttagcatattataattaggtaaccaaaatgttctgcttttgtggtctcagactctcagtagcttctgtggcattattataggctgctatgaagatactagagtcttacatggaaggataccgccaagactggaaactctcgtttatgaaagatacagttgaaagaggcggctggtaagtttaagagtatatgaatcattcattccttctggttagagatcgatgagattactttccgtttttcttaacaactattgtcacggaccttgtgcaggcaacaaggcggaatcttagttgctggccctgggaaagataacatctcttatatacgcaaggtaatctctttcgtctaatcttgattgtgaaactagcctcatatttgggaacctagtataccgatatatcttttcaaacacattgttgttttcaacaatttgtttgcggatttcaggacaaagaagccggtgatgacccgcctgttgaagagatccttaaagcgtgttgtgcttgaagagttgaaagaatcgcaatcgaaaaatagatatttaaaaaacagtaacgacactgctatgcccggatactcaactaaatccataaaacaccattaccacaatcacaacgaccacatttgatatataggtagggaaagaaaaaaagacaagtcgtagaccgaaagtaatgatcattgtttcttgatttttgatgatcattatgacttatgagtcgagatcagcgaaggataagtgtggcccttgctagaagatatatatttttatttccaaataaagatgtacatcaaattcacataatccagttatcgaaacaattttgtctctattgatatgataacatagttgatcaaaggtaagactatagattactatcttgaagtcccacaaaatatgtcagcttaggcatctcctatcaccatccaacatttgtttaaggttacatttcaaattactttatacatgtttgttattcctcataagaactttaaacattaataaaaacaaataaattatagataacagtgtggaaattacatgttggtcaacactagatacgattctaggcccatctgttatgcacgaaaccgggctggatagtaacacttaacaggccgggttcaagttcagaaaatacccgacccggaacaagatttggatccaggactccatttcttccctaaactaaaaccctactcatcactaaaaactcttgcttcctttgtccttccatgtcgaattgaaaattttcagaaaaactcagagacaaaggttccatttcctgtaatg

SEQ ID NO: 30158 - DNA, 3000 bp, Unknown
  misc_feature (1)..( 3000): 2750-1469P.txt file - cDNA_ID_3026664; gDNA_ID_2214574; Annot_ID_186289
attagtgaactccaaaatccggcgaagcaaaaatcgcactttttccggcgaagaggaattgagaaacctccggcgcgagatagcaacttcgttatggctgagaaggagaagcgggtactcagagtttccccgaggagaaaactgtcttcgacaaaggcaacggtggaactggataagtttctcttattttccgtctggagattaaaaatttgaattgaaaatctctgtttacgccaaaaatcagcttttgagtattaatgtggataaatcttgtgtacgtacacgaattcgtattgtttacatccttacttaattgtatatcactccaaattgcagacagtacaagtgttgctccgacggaagatcttatttatgccaagaaaccacatatgggaagaatgagcttcaggtattatactaattagcagtgatcactagcagatagtgcaatgtttcgttttgcagcacaccttcttgtctcagtgaaattccattttatggtcaatactttcatggccgcagattgtcaaattaaaagtaaagtagtgggatttcacaagtcttactctgaaaccaagcccattaatgaattcggaaaccaagaataaataaatatgtatacagtatataaactatttctgatgcggctataaccaaaagtaatcatcaatcaaagctctcgagttccaaggagacttcaccaatataaagagtctcctcatcaaaggactctgaacttgacgaaatcttgtgttaatttcctacactagaagctgaaagatttatggattttgataatggcgaagcaacatttcttcaagcctcttcttcccggattccactgtcatttggtactctctctctctctcactctttcccttcttttatctctgtctatgcccctctgagaagctcatttagaataaactgccaaactggtctggttttgtatttacatgttgcttgagacaattcatgcagccttcttcttgaagaatatagaaggaagagacgagtagaagacggcggagctgagataggacgtgtcgaagataacttgggaagtgaagatagatggacagagactcactgacggttgtaaagagtttgctctctcacatgatgatagactttagtggtatgaatgataatgtaaatactcgattaaagcctatctttataaacttccatataggcatgaccacggttacggttattacggttacggttattacggttacggtttattaaccaccggttacgtttataaatttttgttaatcttaaccttaaccgttatatatacggttaaaacggttacggttaaatacggttacggttaaatacggttatggttaaatacggtatttgataattatgatatagttaatatatgagacaaaatattatattttttaatctttataataaaataaataaataaatagtgatatatcaaataatatttattttacgtaattatgtgtttcaaatatttatagtgaatcaactatctatttttcttaaataaaccaatgaataaacaaattaatggtcataattataataattgagttaattacattttccaaacaaaaacaatactaaagagaagatgttgtgaacattaagaaacagttttaagagtataataataatatgaactacttatgatttgatttatggtaaaaagagtagtggagtaacttcgatcgtagtagtgggcatattaaacgatttaagttactattttagtgaaataattatttatttagaattatacacagttacaactatatttttaaggttttaaccatacggttaaccgacggttttgatacggtttcggttaattaatggttacggttagtatattttcttaaccgtaacgggtctattttcacggttaacggttacggttattaaccgttttatacaattacggttgggttacggttaataaacggtctggttacggtccgaaatacggttacggttagattttggtcatgcctacttccatacattaattaaaaactctcaaggttcaggaattacaaggattgaacaatcaaacaaatgaagaacaagactagattctcagcatctcttcgaatctaatctctccatacgatagtctcataacgactaatcctccacttgattcaacatgcttttccccaaagcattctctccttatttataagcagcaatcccaaggcacaaccttaacccttcgtacgggtgatccctgtcacctcatcaacctcctcacttgtcatatcctcacacgtgtgtgctactttgtccttctttctcctgaaaaacaccctgtgtaacttatcacatgatcttcgaatcggtgacattgttgttttcagacaagagagagatctgtccttccacgttacactgttggggcctagttggtgtgagattcaatatatgtcttgtttacacgactagagcaacctcggttagttgtgctgtctttcgaactctgtccttgatattttaaaaatctgctgagataatagaatctgaatcttaaagtagagataatcagtttaactattaccagtttgatttgttctcttcgtttgaagggaagattcaatggaagaagaatccaagaagagaaacagagtcttcgtcactagatccttcttgttgtgtggctaatgtcatggcttcgagtctacagcttgtccgccaaagagccagaataacaagctaatgaagagtctctttccccagaactagaaagcagtgaagataccaaccttggtgagttttgtttcgtctctcattctaatacgtgacattcaagaatcagtttcactattaccacttgtatttattcctgtcattttctgggatgattcaaaggaggaagaaaaggaagaagaatccctttagttttgtggctaatattttgcctacgagtctacgttatgacaaactggcgaggtgaatggcataaaaaatgcaaagaagatg

SEQ ID NO: 30159 - DNA, 3000 bp, Unknown; identical to SEQ ID NO: 12852
  misc_feature (1)..( 3000): 2750-1469P.txt file - cDNA_ID_3026705; gDNA_ID_2214575; Annot_ID_135172

SEQ ID NO: 30160 - DNA, 3000 bp, Unknown; identical to SEQ ID NO: 12843
  misc_feature (1)..( 3000): 2750-1469P.txt file - cDNA_ID_3026705; gDNA_ID_2214575; Annot_ID_186331

SEQ ID NO: 30161 - DNA, 3003 bp, Unknown; identical to SEQ ID NO: 26001
  misc_feature (1)..( 3003): 2750-1469P.txt file - cDNA_ID_3026709; gDNA_ID_2214575; Annot_ID_186330

SEQ ID NO: 30162 - DNA, 3003 bp, Unknown; identical to SEQ ID NO: 25995
  misc_feature (1)..( 3003): 2750-1469P.txt file - cDNA_ID_3026712; gDNA_ID_2214575; Annot_ID_186329

SEQ ID NO: 30163 - DNA, 3003 bp, Unknown; identical to SEQ ID NO: 26000
  misc_feature (1)..( 3003): 2750-1469P.txt file - cDNA_ID_3026728; gDNA_ID_2214575; Annot_ID_186316

SEQ ID NO: 30164 - DNA, 3003 bp, Unknown
  misc_feature (1)..( 3003): 2750-1469P.txt file - cDNA_ID_3026766; gDNA_ID_2214576; Annot_ID_186353
actcaaagacagatgatgcagaaacactcttgatctcattcacattatcataatcagaatactcttgaagacccaaactaatcgatctagctatccctgaagtagaacaatcagtaatctcactcacaacatcaacatctttgcaatcatctaatccactagcaactacaacatttgaaaacaacaaaagcaaagaaaaaaagatgcaaactttagattcaaatagagacaaaaggcgttattaaaaagagtattaagaaatgattaaggggctccaccataaaccctagggtcatcaatttgattagacccagatctcattgtaggagttgattcttcttcttcattcttctttctatcaacacctagaagaagcatactccttaacttccccggagaaaatccgccgccgctactagtaacctattcatcggaggaaacagagtttatcaaatcaaaaacagagatgatgatgaagtgatttgcaaaaggaaagtttgtactttgaagtaagaaatcagaaaattgacaaatctggcttttgatatccctaattttacgcaaaacccagtttcggtaaacgtgaaaccgaagcattttctcacctgggtctttccgattcgttcgtaatccatcgaaagagaatctcaaaaatcttcacttttttctcgagaaccaaaaatcctgaaaaagagtgatgcaaaatgtgtaagaaaatataatagtagtagtagattgttggtgttatcagaactcagaagcattatttgaaaggaagagtacagtgaatgataagagagcttggaagcttgtgaaagtacagagattgatacacactgtgtctttctttctttctttctcaaagcttctctcttttcttttcttttttttggttttttttttttttggtcttaagctgacatcaaaataagggacattcacagtgatggagcctttaagttaagcaactgttgtaccatctgccaaaaaaagaagaagttaagggacattcaataatcttgatctatagttcataaatcttacataattcttcacatccaaattcgttgttgattataacgcaggacttgctatttgaatcgaaattttacccaaataatactatagttatattatttggtcagttctctatatagactagagtttgttgtaattcttgaccccccaaaaaagtattaattcaaaatattaaaatcttaacttttgacccccaaaaaaacacatcttattttagttaattacttaatttaattctgttttgcttttgcacttcttaatttgtacttaaattattttacaacaaattaattttttttgttgatacctaaagtgataaaaattcgatatcaaaaatgcaattttttttgagaaacttactagattttaggttatatatatttttcactaaacattatttcttgattagaactatagaagtatattacaatttggcaacaaaaaaatatatattagtgtatttagttatatatgttatatatgtatatatattcttttaattttttaaaatgtctaattcataaattaactcatgttcgttaaaactcgttcatataatttgtactctaaattatacttgattatataactcatctattaaatgaatttcattcatactgataaaaaaccaagctgagttgactcatctcatgagctaacatatcatttcgacacctctaattaggactatagaagtattttacaattaggcacacaaaaaaaagtatattatcattacgaagaaaaaaaagtggtggcctggcctccataggatgctcatgctgtctttgaaggcccataagtaaggccatgcctatttgacggtcaaagacaaaaatggttccatttgaccaagaagatgatcatatagtattatgacagctattgtactccccaatccaacacagcaacacacgaatgcctagtcggtgattcatcatgaagattaattcctacataattagtattatcttctaacaattctcatttttcaaagattcaagcctgcagctccaaagtgagaatcacggattgtacttaaatcgagtgcgaatatagctgatgtttagaatttttggaaaatttctacgtttcgtagatataattttttgggattactagcaaaacccaaacctccaaaaattcttaatctcgaattaattatattttttttatcgtcgatttattatttattacaaattatataaactgttatatagtcgattatactacgaacaattccttccaaccgttattagatctacgacagccgccaccaccttttcttttttcatgcttttgatggacattttttcaacaattttttttgcgtagaatcctaacaagcagttataattgtacatcgttggaaatctcttacatacttacttccattaatctgcaaatcagctaataaatttctatcgtcgaagctttttgtaggtatacgtttttttatttctctcactttaaaaataaaaaccaaaaaaattttttatgcaaaaacaaaatgatctcatatgaggactcttgtatgttgggcctggccctgaagatatctattgtaagaaagatcaattaaaaaagtaaaaattaccataactgtcattctctaatcataatagcttactttgcttcacttgattaggcataatatttgaattctctttgtgtggatcaagccagctttggtttgctctttatccacatgtgccacgtggagcagcgtgtcagtcaactttcaacaactacttgactctcccgacgataattaccggctatctccggttctcgtttccgacgtcggccgtttctttttcatttttgtcgttttttttccaaatttttttatttcgggaaaataacaaaaaaagaaagaaataaaaagaggtgattcaaatccagagagttctcattatgtatattcaaaatctgaatcgagaaggaatctgactcgtgtagatg

SEQ ID NO: 30165 - DNA, 3000 bp, Unknown; identical to SEQ ID NO: 12860
  misc_feature (1)..( 3000): 2750-1469P.txt file - cDNA_ID_3026770; gDNA_ID_2214576; Annot_ID_186352

SEQ ID NO: 30166 - DNA, 3003 bp, Unknown
  misc_feature (1)..( 3003): 2750-1469P.txt file - cDNA_ID_3026794; gDNA_ID_2214577; Annot_ID_186381
ttcgcggtcagatcgatattgttcacttcaagcttttggacctgcagttcggctgctttcatccggttcatgactttattggctttctccacggccttggcattttcatcttcacttcgcttgaaactctcaatttcaacatccttgtcaaagagttggtcctcgtgactgcagaaaacggagttgaactctaggattaactgcataataaaaagttgttattcaactaggtcatccatggacataacaaatatggattcagttcgggccttaccttgccaagttttctggcaaagcgaagatagttttccttgttgacttctttcatctcgtcaaaaggagctatggcagaaccaggcggaacgagagtcctcattgtatccgcaaaagtcattggaggagctaaatcattttgaagtcagatcgaaagacaatattcaaaagttgaaataattgatgagttcgttacctggaagagggacgttgcgacgttccgattcgcaggtttcagattcccgagaagacagaaccaccaggttctgaggggcttccttcacaatccccttcaacttcgctcccttttcctcatggcgagggcgggaagagcgaggtggggaggggttagtctcttcgggttgcttccttttcttatcagcagcccgcttctcggagtcttttccagcggggtccttaatagtctttccagagcccgaagtgggggtttcaggttttttcccagctgacaccgaagccttgttggtcgtctggcgggacctcgacccagagtcagattgttggtatttcgatttctctagagaacgaagtttgctgtcctcaagggtccccgccatcacagttttgtcggatttaatccgcgccttttcctgctcggctctctctctctctcaagtttcttttctgcgcggtacgaagggagagacatgtcggctttgtcgattattcgtggacagaaaggaggcgaagatacggcaaggtcagttcgggatctgattctccgacctgaagctcgaattctatctatggtcaaggactcccaacctagatcttggcaacagaaattcgagaagtgagcagcgaaagtatgtgaaacgggaggcatgctgactttaaatgaaaacaaaaacataaaagaagatggtcagttcaggtgccacgaagtgtttgcattcagaaattacaactaaattaagttgtgttttcctaaagcgaattcactatctaccggtgcgagctgcccattcagatacaaataagccagtcttgtttccataagtaagatcattcactggaaagaagaagtatgattttctccattgttcatctttatctgggaagtcatcgaaaactcggaaacctttccgaggtgacaagaaaaatgttccctttgttcgccctttcttaactgcgtatagctgaaggagatcgttcagtgatagagaaaatctgtcttcttcagctagagtaatgaggcataagacagttcgaataacattcgggcacaactagggaagtgcgattccaacgcatagcgaaaataaaatttcgaacgcacacggatgccctgggggaggattctcaggacagaccgtcggttcgggagaaataagtggaatctggtgaggaatttggtgggctcctctcagcagcaagagtctgctcgaagtcgagagcgaagtcttgtatttttcgaacttaccatctattagaaacacttcgcgaactactttcctcggaggcatgacaaacaccgcgaagtaatttgcaagaaaaaagtcatatctgagggccgtttttcgtttattttctgaaaagctctcttaagcagctgaagaacacttgaagatcttcttcaagaacccaggagcagagaaaggtccgcgctgtatttaatcgatcggcgaaccggtgagacggtgaatctaagaatttgacgacggaatttgaccggaaagaggtgtagaacggcggtgacgttgagttttcttcgaatttctaaacttaaaatctaagaaatcgataaagaatctactccaaatactaccggcctaaacctactgcgattctaggtctaagattccggctatctattgattcaggtgaaattcggaacaaagactgaacgaaaacgaattatggaaaggaggagtcggggttgttacctgaggcgaggaatgagtctggtagcttataagaggtcagtcagaaggtgaagggttcgtcggtttatatagaggattgaatgggcgggaaatccaaaaccctaggattacgaagcgtcacactctttcaaaggaaatcctcgaaaatcacgcgattcagtttccttttttacctcgggagattcttgttatcccgaaatggcgttctgagatctccgagaatggcgccacgagttgaacttaagtccccgaagtgttcacttcgaggacttggggggcaaattgtggatgttggatttcgtatccggcccaatacgcggtctgagcccagcggagggcccatcgagagaagtgggcctgtttaaagaagcccatcggttcaaaagtcagattatgctttaattcgagtaacggaaggatctcgaattaaagacgctcattaattgctcgagctggagagttcgtaacgtttgaagtaaacgaagcgagattcccggcgtagaatcagcgtagtgattaattcatttgattcgaaatatttgtataaatgtagtccgattgcaattgtagagagacgaatgaattgacactgaaactatacagaaataaacaaacacttttccgattgatctttgttcgtttaacaagtcttaagatcttcgaaacacgaccacgaaattctgattgtggattccgacatccacaaatattttatatgtaattaatatgtgaggtgtaaggtaagccaaattaacgtcaatatgtctttagaagaacagaacaccgatgcatgttatgaaaatacatgcaaaatacaaagatg

SEQ ID NO: 30167 - DNA, 3003 bp, Unknown; identical to SEQ ID NO: 26010
  misc_feature (1)..( 3003): 2750-1469P.txt file - cDNA_ID_3026821; gDNA_ID_2214577; Annot_ID_186372

SEQ ID NO: 30168 - DNA, 2610 bp, Unknown; identical to SEQ ID NO: 12891
  misc_feature (1)..( 2610): 2750-1469P.txt file - cDNA_ID_3026864; gDNA_ID_2214578; Annot_ID_186404

SEQ ID NO: 30169 - DNA, 3003 bp, Unknown
  misc_feature (1)..( 3003): 2750-1469P.txt file - cDNA_ID_3026877; gDNA_ID_2214578; Annot_ID_186397
acatgagtgaaactggagcatcagaggataaggcgcgttcgcatgttcgacagatgatcaatgacttgtgggatgaaatgaattatgagaaaatggcacatagctcttcgatactccatcatgattttatggaaacagtgataaatttggcacgcatgtctcaatgcatgtatcaatatggcgatggccatggctctcccgaaaaagccaaaatcgttgatcgtgtcatgtccttactcttcaatccgattcctttagattgaacttcatattgattacattaaatatcatatggttttttgaattctaggacatagggttccatgaaactatatatatttggtgtaattttataacaaaataatatatattatatgtttatgaaacatcaacattacaactttaacaagagctggtatatatgcatgaacaaataatttcaggtaataacttttaatagatcttacgagattggggacccaaagccatagttccactatatatgttgttatacatgtgtcgaccacagataaacatgttaatcacttgaccatcgtaaatcggttggccttgtaaacctctaaaataattaaaacatgttaaccactttacacttcaaagaaaaaaaactggaatgacacctaaacaatttttgtttcaaataatatgtaagatggttataacctatgatatctttttgtctttttctatttttggtgacgcatgacttcacggatcattggcgtcttcttcgacaacatgtgatatctttcactatcgttcatcatgtccacatgaagtacgtcattagtagattctttttatctagagacaaattaattgtaaccaattataataatacaattaagaaacgttttttgcggacaacgtaagaagcttgtacaatattatatatagagacaattacatctagggtaagtggtgtaatacttttgttcaatggccactttactgcagataggttcagctctaatttacaataatgcacttgcgaagactcttccaggtcctcaacctttcacatgcaccataatggccaaaatgacacctggtgagtctcccgttgttcctcgtcgttccacaaactatcagccttctctttgggaccaccgcccatctcctttttatagaaaataaatatgtggtatatatatgtaagtaattaatacctgtataatattaatctataatgaggtcatatatatattgagtactatattgttgatagctatatatgttcaatacacagcgttcaaaaagatgaaagtgtgtgagatcagagagagagagatttgttgaaggaaagggtgagaaagatgctataagaagaagaattatctcgaccaattggagctaattgacgatctacgtacataaacttggggttcccaaaaataagacaatactaataatacgatgtggccattggttttaacttttaatagaaaagtatctttattcgaatgcacatctcaaagcttggaacgtttcatatttttcattcgacttgtgggagccatatattgctggccacatgacagcatgatacgacatgtgataacactaagatcacacaaacatttgagacttaacctttacacagataaacacatgcataaccaaatcattggcctaaggtggggtcaaaactcaaaaggtttcacaagccatcgatcgtagtatctgagaaatcttccccattaaattttttgaactgagggatctgcaacgtaaaaaaaaaccagcttaaaattatgttcttattttataactctaaattatattgtgtctaaacgttgttaggagtgggtttctttaatgttttcacatgtaatacgtctaaagtcatttggatgcaaacatgaaagttgaagatcaaataatatggagaaatatcctagcatggtacgtattcaatgagaagatgccaaccgttggatcaaattaaaagttggaaaattatagggaaacaagtgaggtttaatttagctctggtttgagttctgtcagaccaatgaactaaatgctaatgctatagtgttattgaagaagttgatgcgaaattgagatttgttttgcaaaagctcgagttcaattgttgaatgagcatataaataactcctgagaaggcagcatcgatcagtccacctattggattgatcgtttcacctattggctttaacattccaactattggatatatcatccagcaagagcatcatcaatcgatcccttgtagaattgattgatcatttttcctaagggtcgattaattgatatgattgttgtgtttataagtattcgtaaatttcaattcagatttatcaacaacatgaaatgagatgacaagaaaagtaaaataataatcaacgattttactcctttaattcacctattatacaaaaagtgatttttagataacatgcttttattttatgtgactttctaatttatcaaatgaaagtaacaagtggtgtcacttgtgtcacataattttcacgaaatgtatggttttcctctctaccatatttatttacgtgaagtcgtgaacatctaatttgtcaaaatagattaaaattttcgtcatatgaactgattacatgttattaattagtacgtactctaaacattagtacatctcttcagaaaaaataccatattttatgtttttaagtacattaaataaaatagaatataccgtcacatttcatttaaagggtaaagtaaaaattagtgtcagacattattaacaatatggcaaatagaccaaaaacgtgccaaaaaaacaggtaagtgggtcattgtcaatttgtcatggcaataagtaacgaatgaaagatctcagccgttaatagccagttagcgaatccgacggctatggatccgtacattcctaaagctcatgaggcctaatcgcatgctctgtttcttcaccggaaaaattgcaacttaaagaaaaaaagaaaagggatttaaaaaatg

SEQ ID NO: 30170 - DNA, 3003 bp, Unknown; identical to SEQ ID NO: 26019
  misc_feature (1)..( 3003): 2750-1469P.txt file - cDNA_ID_3026881; gDNA_ID_2214578; Annot_ID_186393

SEQ ID NO: 30171 - DNA, 3000 bp, Unknown; identical to SEQ ID NO: 12884
  misc_feature (1)..( 3000): 2750-1469P.txt file - cDNA_ID_3026885; gDNA_ID_2214578; Annot_ID_186392

SEQ ID NO: 30172 - DNA, 3000 bp, Unknown; identical to SEQ ID NO: 12880
  misc_feature (1)..( 3000): 2750-1469P.txt file - cDNA_ID_3026889; gDNA_ID_2214578; Annot_ID_186389

SEQ ID NO: 30173 - DNA, 3000 bp, Unknown; identical to SEQ ID NO: 12874
  misc_feature (1)..( 3000): 2750-1469P.txt file - cDNA_ID_3026897; gDNA_ID_2214578; Annot_ID_186386

SEQ ID NO: 30174 - DNA, 3003 bp, Unknown; identical to SEQ ID NO: 26357
  misc_feature (1)..( 3003): 2750-1469P.txt file - cDNA_ID_3026922; gDNA_ID_2214579; Annot_ID_186415

SEQ ID NO: 30175 - DNA, 1440 bp, Unknown; identical to SEQ ID NO: 12912
  misc_feature (1)..( 1440): 2750-1469P.txt file - cDNA_ID_3026995; gDNA_ID_2214580; Annot_ID_186471

SEQ ID NO: 30176 - DNA, 3003 bp, Unknown; identical to SEQ ID NO: 26358
  misc_feature (1)..( 3003): 2750-1469P.txt file - cDNA_ID_3026999; gDNA_ID_2214580; Annot_ID_186469

SEQ ID NO: 30177 - DNA, 3000 bp, Unknown; identical to SEQ ID NO: 12911
  misc_feature (1)..( 3000): 2750-1469P.txt file - cDNA_ID_3027008; gDNA_ID_2214580; Annot_ID_186463

SEQ ID NO: 30178 - DNA, 3003 bp, Unknown
  misc_feature (1)..( 3003): 2750-1469P.txt file - cDNA_ID_3027012; gDNA_ID_2214580; Annot_ID_186461
aactagtttgaaacttacagaaaacatttttttttgtaaatttcttagatatttcaaataactctctcgagacataaatcataaagacgataactagttaagatcattgtgaatagtttataatggatttaacaaaaaaaagaatagtttataatggagtcttgagagagttatttgaattattttgggaatttacaaaattgttggataaaaaaagtagttacaagaaaaaggaaaatatttacaagtgtgtttctaattttttcctactagaaagacaactagataagatcatttcaatagtcttctattcactaattatggacaagtaaaaattaaaagatttgttacaccatctctatcttacatttctctatttatagattcacatacccaatgtaaaaacaaatctcttgcctatataactctagacataattcattatattacaacaaacaaagattcaataatcaaaagaaaaatttagaatgacaagtaaatatttctccgtactagtgttcatcatcttggcttccaatgaagttgttgccaagagacactcttcaacacctaaattaagaaaaactgatttcccagaagatttcattttcggagctgcaacctctgcgtaccaagttgaaggagctgctcaggaagatggtagaggacctagtatatgggatacgttttctgaaaaatacccagaaaagataaaagatggtagcaacggatctattgcagatgactcttaccatctttacaaggaggatgtgggtttattgcatcaaattgggttcaatgcctatagattctccatctcgtggtcgcgtattttgcctcgtgggaatcttaaaggaggaatcaaccaagctggtattgactattacaacaacttgatcaatgagcttttgtctaaaggaattaagcctttcgcaaccattttccattgggacacaccacaagaccttgaagatgcttacggaggattccgtggggcagaaattgttaatgattttcgcgactatgccgatatttgtttcaagagctttggagatcgagtgaaacattggattacattgaacgagccattaacagtggtgcaacaaggatatgttgcaggtgttatggctccaggaaggtgttcaaaatttacaaaccctaactgcaccgccgggaatggagccaccgagccttatatcgttggtcacaaccttatcctagctcacggagaagcaatcaaagtctatagaaaaaagtataaggcttctcaaaaaggtcaagtcggtatagctttgaatgcaggttggaacttaccttatacagaatcagctgaggataggttagccgcggcacgagccatggctttcacattcgactatttcatggagccgctcgtgaccggtaaatacccggttgacatggttaacaacgtaaaaggcggtcgcttgcctacatttacttcaaaacaatctaacatgcttaagggatcatatgatttcattggcatcaattattactcgtcttcttatgcaaaagatgttccttgctcaagcgaaaacgttacaatgttctctgatccttgtgctagcgtcacaggcgaaagagatggagttcccattggtccaaaagctgcatcagattgacttttgatatatccaaagggaattcgtgatcttatcctctatgcaaaatacaagttcaaagaccctgtcatgtacataacagaaaatgggagagatgaagctagcactggtaaaatcttacttaaagatggcgatagaatcgattactacgctcgacatctcaagatggttcaagacgctatcttgattggagcaaacgttaagggcttttttgcatggtcgttgctagataactttgaatgggcatcggggtacacggtcaggtttggacttgtttacgtggatttcaacgatagacgtaagagatatcttaagaaatcggctcactggttcagacatttattgaatggaaaaaaggagaattgatgagatatgcaacattccaatatattaactaactagattaatacatgcacaatggtttgtttggaaaacaactattgttaatatacaaataaggtttgattttactgtattatatcaaacttaaatctcaaaaatagtggtttcaatgtaaaacttgtgcacactaaattaaatggaatagtatgcatttaaataaaaaaatcaagaattttcattcttatttcggccttctaaaattaattaattagttaaattagtttgtgattttattttgttgtggttgtcactagtggtaaattattaataatttaaaaatctaatattttcaataaaaattaatgatctatttttaatattaaataaaaatagttaaaattatagaaatttagttcatattgatatctctctaattcatttggaaaaatatttttagcacagacaacagtttatgcctgcatcattacaacaattttttttactattttctcataattttttaatactatttgagttataattgaaaagctaattacggttaaggagcagctatagataacgaattaatagattagagaggttaattatagagtcgtcacatctctctcacatgcctctctaagttccctttagggttttcttcttcactatagagactcatgctcttctcttcccaatcgccgcctctgatctctcttcctcgcttctcagattaggtattagacattcactctttcttacattgttataacattgatgaagtagaagcttagattcatatcattgccattggtcacgattaatcatctctttcactaaatcatcaattgtttcaatgagaaccaataacagctgaatcaatgtcgatacatttgttgttacgaaatcttttgaatcttcactgaatccgctttgtcatttttcttttgcagcctttgttttgttagattgatttgttatgtccaacaatctattgcctcagccttgtatgcaaatg

SEQ ID NO: 30179 - DNA, 3003 bp, Unknown
  misc_feature (1)..( 3003): 2750-1469P.txt file - cDNA_ID_3027016; gDNA_ID_2214580; Annot_ID_186460
ttgcttttttttttcctttttgtttttgaagtgagagattttttttcttattaaaaaagggatatatttacagtttatatgagaagtaaacatagtattttgaaaaatagcaagaaaggaaatctgaaattttagactaatagcaaaaagattttgagttaagttgacaaaattgaattttagtaacttgggaccttttttacatcttttttatataaaaaaagtcgacacatgagatattacttataaaattaaaaatacattattttcatgaatatttaatagagtttatgaatttctcacatatgttaattattaagtgctgaaaaatgtttaattgtttttctgtataaatgttaagtactgaaaaatgcttggaatgtttttctatatttatatctctgctatttatatgtgtgatttagtgttatttagggcattaaatataagatattaaaatattaaatttttctataatttaaaaataagtaaataaacatgttgtagaccgtaattgccagattatttgtgctgtttcctaaatacttttacattctttgatggtcaccaaattaactataagaaaaattaggactcagtctcattaatttttcggaagagaaaaagaatcagtctcatggtagttgttaggaaatatttgaatattgtttcgccattagaaactttttatgtggatttttttcctgaaaacgatggttactattaattaaacggaccgacaagaaccttgttgacgtggtaacaagtgatgacacatgctaattggccatcattgtcaaataatttgttcgcaaggcgtgatacgtgtacgttgttattcagacgtagcaaacagattcacgacttttgttcaatttgtctttgtatggagtatggacctaacatctccaacggaccaatgctattgggtcaagtccatcttttctaggttaagttcattctttgggctttagttaagtatagagaaagaacatattggaagaaaaatttagatgtggtttgtattgcatgcgcatatgaaatgtaataatttgaggatacatatatagtaagaaaaaatgagtgacccaagtaagaatgggttagtagttatatatatgttggaggtgaaaggaataaaataaaatttgttctaggtggattcttaagaaaaagaaggaaacgaaaacagaggaataacaatggcagggagaataagctgctgtctaaatcttcctcccctagattcaaattctgcacaatcattagcttcactgctcaagacaacgtcaaagatctcttggtatctcttctattcatgaaaagttattatttacctgataatttttcatatcaatgatctttgttcttttattgtttagtaggagaacagaaaatgagacagagccacggaaaaacaagtgttcttttgtcttgggggtggcggcaactgtcgtaatcggcgggattcagatcaatgatgttgcatcagtggaagctgcggttgtgaaatcgccggtagaagagatggctgcgggtgtggtgccgccgcggaggtggagtgacaagaggacgtgtccgccttggcttgagaactcgctagagaccatcgtaccggagaatcttcctcgtccgtctgctcatcgacgtttggagttagccggattagctaagggtgatgcaccgccggtcggtgtggtgatgacacgtgtcaacaggggtggttgtttctccgtgtaaattggaagttcattacgtgtaagggagattgttaggcaggtgtaaaaaaagtcaattagaaacaaataatacacacaaaaactattgtagatatattaaattttaagtatttgtttgtgtagttactgatgacaaaacattgaaccaaactggtctttaattcatgcaaaattttctttgaggatgccatttttgatttttggtttaaatcgaaccgtataaaaataattaactcattaaattcattgagatctttatgtgcacgattagttttggtccgtcctttttttctttgttttgtaatcttgtatcctaccaaattttgggagttttcagctttgtgtgttaaagtagtactctattggatgtgaaatgaaagaaaagtagtacatgcgtgtagtacaaaagaaaaacactccaagtacttcctactgaaatgagttggcctattatcgatccaaagtgaagcccaactctatgtcactccaacgattagtttgatttcggcctcgtatttcaaagtttaactacaactctacaaatttcacttccatgtcggaccttcaataatttaatttcttgatgctcatgttctttgcttttacaagaatggtgagagaataaagggagattagccttagcgagagagaaaagactcgtagcatgaagagaagaagaagaaaaaattggttttgcaataagagacctacgttaacaagaaaatggacacagcttgatcatcttatgcaaatccacactcacgattttctaaaactagtttgaaacttacagaaaacatttttttttgtaaatttcttagatatttcaaataactctctcgagacataaatcataaagacgataactagttaagatcattgtgaatagtttataatggatttaacaaaaaaaagaatagtttataatggagtcttgagagagttatttgaattattttgggaatttacaaaattgttggataaaaaaagtagttacaagaaaaaggaaaatatttacaagtgtgtttctaattttttcctactagaaagacaactagataagatcatttcaatagtcttctattcactaattatggacaagtaaaaattaaaagatttgttacaccatctctatcttacatttctctatttatagattcacatacccaatgtaaaaacaaatctcttgcctatataactctagacataattcattatattacaacaaacaaagattcaataatcaaaagaaaaatttagaatg

SEQ ID NO: 30180 - DNA, 3003 bp, Unknown
  misc_feature (1)..( 3003): 2750-1469P.txt file - cDNA_ID_3027019; gDNA_ID_2214580; Annot_ID_186459
cacattaagttgtccatttagatagccatcgaatacatgtccacccgatgcttcaatgcgtctcctttccttactgctcatgggtttgtggtctcttgacatttcaatggcttttccctgacgggataagactgctctgcaatctccagcgtttgctaccaccaacgacctgttaccacaaaactatatgttaacacggtaccaaacggtttcataccagaatactaatagagtatgaaatgagcaagtatatacgtgactcaaagaccatatgagacaataactacattatagcagcagcacatatgggcagagaatacatctacaggcgaattagttgtacatgattgtgttaaaggtcaagattatgcacactacgcagttgaggataagcatctattcccaaacacgtttttctttaacataaccaagatgtaagagtttaggttagacaaaactaaaagataataagagttgaatcaacaaaccttccaaaaagaatagctgccaaagcagtagttcctgaagcaaggctcccatccaatgaacacgcctctaagaaggcagtgtctgtttgaagaaatgctgaagataacaccttattgatttcactaggaaactcttgatcttcaacaatgtacctcggtatatggtgacatgcaaactcagcggcatgcttcccaccatgtccatcaaatacctaataacaaacaaaattcaataagagatccccatattttcactacattcacagttgtttgcttatgctacaaatctacaaaaaatcaggaaaactgaagaaagaacataccccatagaaggcacttggaccagcctcagaattcagaaggccaaagctatccatgaaattatcaacgcatagataagcatcttccatgcttgacctggagccaatatcagaccaagctccagaacgcgtagcaggaacaaactcagacttgttcttctctatagtaaactcattctcaacagatatatctgacaccattgtcttcacctaccaaaatgaaaatcaatcagaaaacctcaaacatctcataatgacacattaaaaacagaaactttctaccttaattatacacattaggaaaccaataatgatcaaatccaaaagcagagcaataattacaaaacctcaacttaaattgatcattcaatacacaaaataaacctaactgatccacaaatcaagttgaagagaaacgaatcttacgagagatgagtgtcgaaccagtgacctcttattacacggcgccaacgatcgctcgccgtcgaaggtttgcctgtaaacggcagcagcggcggaggaagaagagaaggagagtggattcggcggtttaccgccgtaactcgaactcccattctctggatcagaaattcctctagtttcttccatattgaaacatcatcgtataaaaattcaataagcaattatggaaacagctgacgagtcaactcacgagtgagcgagtcgattaaaaacgatttaacgaagaatgtagctttagatgagagattcgtaaacaatggattcagaatcgaaaacaaaattgaagagattgttgaaaggttacacgaatttcagggtttaagagaaaattagggttttgtggaagaaattggaacacgcagaaagagagagataataaaactgttcgccggcggaggcgagaaatatgagtccgacggttatttaaaaggcaaaaagaaaaaggaaaaaggaaaaaggaagcttaacataaacacgaaacgtcggcgtattatttactttttctctttgcttttttttttcctttttgtttttgaagtgagagattttttttcttattaaaaaagggatatatttacagtttatatgagaagtaaacatagtattttgaaaaatagcaagaaaggaaatctgaaattttagactaatagcaaaaagattttgagttaagttgacaaaattgaattttagtaacttgggaccttttttacatcttttttatataaaaaaagtcgacacatgagatattacttataaaattaaaaatacattattttcatgaatatttaatagagtttatgaatttctcacatatgttaattattaagtgctgaaaaatgtttaattgtttttctgtataaatgttaagtactgaaaaatgcttggaatgtttttctatatttatatctctgctatttatatgtgtgatttagtgttatttagggcattaaatataagatattaaaatattaaatttttctataatttaaaaataagtaaataaacatgttgtagaccgtaattgccagattatttgtgctgtttcctaaatacttttacattctttgatggtcaccaaattaactataagaaaaattaggactcagtctcattaatttttcggaagagaaaaagaatcagtctcatggtagttgttaggaaatatttgaatattgtttcgccattagaaactttttatgtggatttttttcctgaaaacgatggttactattaattaaacggaccgacaagaaccttgttgacgtggtaacaagtgatgacacatgctaattggccatcattgtcaaataatttgttcgcaaggcgtgatacgtgtacgttgttattcagacgtagcaaacagattcacgacttttgttcaatttgtctttgtatggagtatggacctaacatctccaacggaccaatgctattgggtcaagtccatcttttctaggttaagttcattctttgggctttagttaagtatagagaaagaacatattggaagaaaaatttagatgtggtttgtattgcatgcgcatatgaaatgtaataatttgaggatacatatatagtaagaaaaaatgagtgacccaagtaagaatgggttagtagttatatatatgttggaggtgaaaggaataaaataaaatttgttctaggtggattcttaagaaaaagaaggaaacgaaaacagaggaataacaatg

SEQ ID NO: 30181 - DNA, 3003 bp, Unknown
  misc_feature (1)..( 3003): 2750-1469P.txt file - cDNA_ID_3027021; gDNA_ID_2214580; Annot_ID_186456
ttgttgcaattggagaaccaaaacatatttgataatgtttttgtgtatgtgtttctttacaggtagttagtgaagcacagagaggacatgtttttggtgaagttggggtactatgttacagaccgcagctgtttactgttcgtaccaagcgattgagtcagttgcttcgtctgaaccgtacagtactcttaaatcttgttcaggcaaatgtaggagatggagcaataatcatgaataatcttcttcaggtttgtaataactctgaatagtacagtttgtttcaacctgttgacacacaggaccagttccataacagatatgttgtggttcatgcagcatttaaaagactcagaagatccagtgatgaaaggcgttttggctgatacagaacacatgttggctcaagggaaaatggatttacctctcagcttgtgctttgctgcagccagaggagatgatttattgctgcatcagttactaagacgaggctcaagccctaatgaaatggataaggacgggcgaactgcgctggtaagcccggatttcctttgtatataccatcatcctccttttaatgcctaaaccaaatttgctcactctctatgtttcttctttgaatatctcagcatatagcagcatcaaagggaagccattattgcgtcgttttacttctcgaacatggagcagatcctaacattagaggtaagtagtaaaaaataatgtttcactaggtcaattagcttaggatgataggatcatgtagtactaaattatcggtggctcgtacattgtttacagattccgaaggcaatgtacccttgtgggaagcaatcataggaagacatagagaaattgctaaactccttgcagagaatggagcaaagctaagcttagactcagtgagctatttctctggcttagccgtggagaaaaactgcttagacgcactcaaagacatcatcaaatatggcggcgacgtcacactccctgatggaaacggaaccacagctttacacagagcagtgtcagaaggacacttggagattgtgaagttcttactagaccaaggtgctgacttggactggccggattcttacggatggactcctcgtggtcttgccgatcatcaagggaatgaagaaatcaaaaccttgtttcataatcacaggcctgtggagaaaaaaccgaaacctatccctggaatacctcagagtcctgtgacagggaagccattaatgaagtatagcagtgagcctacaatgcattcaggagaactcgtcttagacgggggtcaggttgttgtttctcagaaacggaaactcaataacttcagaaactcgctcttcggaatcatttcagctgcaaatagcggtaaaaccacctcacctctccatctgctctctagatactcgttgctttcttgtcacgtaaccataattttcagaacttttcacatcacaatagtcattcttatatacaattcacaacgttcattacattgttctgttccttacaaatttacaaatttggttttcatttctggtttttttccagctgatgatggaggagaagttccaagaagtccagcggttcctggaggaggaggtagtatgatttatccggagagagtgacgataagttcgccggaaaacggtgaaactggtggaaaagttgttttgttaccaaattctatggaagagctattgaaaattggtgaaaataagatgggattcgtcccaactaaagtacttacgagagaaggagctgaaattgacgacatcactcttatcagagatggcgattttctccttctatcaagggatccttgattcacacgcaactctctttcgattttgagtaatgaaaactatttgtcttaacgcaaactcgcaaaccaccacagtcaagctttatggtggtgatatgatgctaatattaggggaaaccgtaagccccaatcaactccgggattgaaatatcttttaggttttttttttttgcttttgtgtatatattcactgcttactatttttcacatgtatatatatatatatcctgttgactattttctgttaaaagaactctctaacaacctcatgatattaacatcgaaatctacaagaagtatggaaacaatcttgtttttttcagaaagcatacaaggataaaggtcctttcttaaacgtctagacaatcttcttctctaagtctctaagaagaagcaagtgttaaaatttataacttttgtgcgaggtcgagatttgagagtaactcctcactcatcttttccaatcaagcttaaatcctctctaggtgacttatcctatttctgagatgaattatcatctcatctttcatttttgtttagatccatgatggtaaagtgatattgatgggacttgggagccaaagcattaccgaaaatgagcacaatgattgagatagagttagagacaacacacactataatattattattatttcatgcttcaaatgcaagaaggtaatatttgaatcagactctagagagcttaatctgctcccatctctctgaccaatacgaaacatccgcaatctgctcaatcaacctaaagaggtgaagttgtattttatgtctagttgaattaaaacccttgtcaaattagacaatggtttaaggttgatgagaatttgatgttggaaaaaaaaagtgatataaaagataaaagcggttcaaaacggttttgcgattgatgttaaaagagtgcgaccggttgtgggagaaccggtcaactcctagtcctagaggctagagagtgttgtgttgtgtgatttgtggtgcagataatatcttaaccggcttcaaattttaaaatctagctcggttagcattttaaaactgttttctggtttgattccgtgtctatctctcggctccgttgtatcggaaggtagatattaaaactgaaagaccactgccgtcgagagcaactcaaaagatcatcagaaccgattcgaacgatg

SEQ ID NO: 30182 - DNA, 3003 bp, Unknown; identical to SEQ ID NO: 26031
  misc_feature (1)..( 3003): 2750-1469P.txt file - cDNA_ID_3027045; gDNA_ID_2214581; Annot_ID_186507

SEQ ID NO: 30183 - DNA, 3000 bp, Unknown; identical to SEQ ID NO: 26359
  misc_feature (1)..( 3000): 2750-1469P.txt file - cDNA_ID_3027059; gDNA_ID_2214581; Annot_ID_186497

SEQ ID NO: 30184 - DNA, 3003 bp, Unknown
  misc_feature (1)..( 3003): 2750-1469P.txt file - cDNA_ID_3027113; gDNA_ID_2214582; Annot_ID_186520
ataatagtttttgctgaccaccacttaattatttttgttttctgttaggttgccaaaacatttgatgttagcttgatgggagcttcatcgaggtcgtgtaaatatgttttgaacacacttatgcaggtaacttcgtgtgaattagtgatgctgctcttcttcattagctggctagcccacttagatttgtttgtgaagttcactactcataagtatgtatttttgcagacattccaaaataaaaagcttgcccatgcagtcaaagaagggactcttgaaagccttataacagagctcttgctttggcttctggatgaaagagttccacgcatggaagatgggagtcaacttcttaaagctctgaatgttttgatgcttaagatcctggtcagatattcgttccatgctaaaggttttcatcatatgtggctatgaagttctctgacttcattatttttatttcttgttttatttaattcaggataatgcagatcggacatcttcgtttgtggtgcttattagcttgctacgtcctctagatccatctagatggccttcacctgctacggctgaagtttatgctgtccggaatcagaaattctctgatttggtagttaaatgccttattaaacttacaaaggtattttaggacaatcattgttcacataactcaagtagttgttacgtacagccctactgtctattatgcaacacttgcctttcctacttgctacaatcacagtgtcaaattgtttagtattgtatatctgataattgcttgtccttgttaagctcctccaaagcaccatatatgaagttgatcttgatagacttcttcagagtatccatgtatatctgcaagatctgggaatggaagagatacgtaggaggtacatctctttaaatgcactcttagaaattttgcaaatctatgtctgtttattatgtggagatttttcgtacttggcaatactaatgcattctcggttggtattttttccaatgaaaagagctggggcagatgataaacctctgaggatggtgaaaactgttctacatgaacttgttaagctccgcggagccgcaattaagggccacttgtctcttgtccctattgacatgaggccacaacccatcattctcgcttacatcgatctaaaccttgaggtgagacctccttagtcgtctaacttcatgtccagaaattttgacaaatttgctgaagctgagggtttggtcaaagagcgcatccaaactatttgctgttttactatgttttgagaaatttagacgccattggtagtaactatttaaatacctgcagactttagctgcagcaagaatgttaactgcaacaggtcctgtgggccaaacccattggacagattcaacagccaacaatccttcacctcctgcaaattctgccgatgttcagttgaagcaagagcttggggctatttttaagaaaataggtgacaaacaaacttccacaattggtctttacgacctctaccacatcacaaagtcatatccaaaggtaatagatatgactatgtatttcaagtctcaatgtttcctgttcttcatgaacaaacgagccaaattgtatgtacttacaacctcatcttaatgcttgtaggttgatatattttcccaacttcaaaatgctagtgaagcgtttcgtacttacatcagagatggtctggcacaggtctgtaactagtctcctagctttttactatgatttcgataaaactcaagttttttgtcttgaagttttgcaatcggttctgtaggttgagaagaatgcagctgcgggaagaacaccttcaagcctaccgttgtcaactcctcccccttcgtccttagctcttccatctcctgatattccttccttgtcctctttagatgtgaagcctttgatgaaccctagatctgatttatacacagacgacatccgagccagtaacatgaatcctggaggtagtttcctagatccttatccttctttgtccttccttgcggtgtttatatatatctgttaaaaacaaacatctttggcagtgatgacagggacgctagatgcaatcagagaaaggatgaagaacatgcaactggcttcatcagagccagtaagcaaaccgctgatgccaacaaacgataacttatcaatgaaccaacagagcgttcccccgagccaaatgggacaagagacagtccacacacacccagtggttctcccaatggatgagaaagcattgtccggtcttcaagcccgaatggagaggctcaaaggtggatcactggaacatatgtagaactagagaccccaagctttggagtctgaagttacataagcaaattcgccatttttgttacttctctccaattaatgtagtagtaaaatacttttcttttaatatacaaacatataagagagagcaatattttatggtgaagcggctagatttcaatggagttagtgtgtatagtggtgggagagtctgggagctgatggtgagtgtgccagattctttttaatatgagacaaaatattattctttctatgcttgtttacatctttttttcaaccactagtagaaacctgaatattctctcgactctgtttagatatgattctgatgtagttggcatatcttgtgtaatccctccactctcaaatttctaacaattcttaatttttgggttgaaacggaagtaatattttgttcttccatctaaccaaaggtcgtatatttgcaaaccaattgaagtagaaattaacttaaaccgggaactggtttaagagatattaatatatgaccgaagacattgggtttaaaaagtcagaataataaaaagttggcgtagtctaaacgccgacccagaggccctctcatacctttaccagtgcctatatatatatatatatataaacagactaattactattccccatcgcacagacccccctaagaatccgagagagaagaagagataatg

SEQ ID NO: 30185 - DNA, 3000 bp, Unknown; identical to SEQ ID NO: 26033
  misc_feature (1)..( 3000): 2750-1469P.txt file - cDNA_ID_3027151; gDNA_ID_2214582; Annot_ID_186526

SEQ ID NO: 30186 - DNA, 3003 bp, Unknown
  misc_feature (1)..( 3003): 2750-1469P.txt file - cDNA_ID_3027161; gDNA_ID_2214582; Annot_ID_186523
atccagttgactccaaatagactagaaagagaaagaaagagagagagagagagagagagaaccagagattatcgaacacgaagcagaagacgattcgtggaagagacttggagagaatatttctcaatgtctcctctcccaatcttccatcgtcttcctcacgccacgttctcttcctttctcctctcactggttcgttccctccattgacgaatgttgcattttgcttgttacctacgactgcttttgattctctttctccatttgggtttcttccgattactttaatacttcttcaatttggacttgtcgtcaacattttcttgctaaagtatggattttttgttgttgggttactgttcagtttgactttgatttcagagaacccattctttgttgttcttgcgtgctacattgcttttagatctgattcactaaatccgttaaaataccaaatctttatcgtgtttgtctttttgtcctctaagagcattaaaacttggtgtttttcttgtcctctagttctgggttctctaatcgttttctcttttacttgtcattgtagtctcaagctggaagttctaaaacatcagtggcattcctcaatgccttcaaatcagaagatatcattgctcgaattggactatggtggcagcttataagggctgttgtagttgtacctgtcttcaagttcctggtgcttctatgtttggtcatgtctgtcatgttcttcgttgaggttatgtacatgggaatcgttgttttgtatgtcaagctgttcaagagaaagccagagaaattttacaaatgggaagccatggaggatgatgttgagtgtggcagtgcaagctaccctatggttcttgtgcagatacctatgtacaatgaaaaagaggtagttactgaaccagcaactatttttccagtgattggtttgtagttgaacttatttggtgggatgttaatgtttgtggtaggtttgtgagcaatctattgcagctgcttgcaaaatctcatggccatcgaatcgtataataattcaagtgcttgatgattccacggatccagccagtaaggtccttgtttaacctctatagacacttgtccctttctcgtctaaatccctctgttttagactcatgattgtgttgtgttaaagtgagttccttaacatttgattatgtggcaatgatggaaggaaacaggagttggtgaaaaaggagtgtgacagatggtctaaagaaggtgtcaacataacgtttgagataagggacaacaggaacggatacaaagctggtgcgttgagagaaggaatgaggcatagctatgtgaagcagtgtgattatgttgctatctttgatgctgatttccagcctgatcctgacttcctccaccgcactgttccattcttaattcacaatcccaagttagcacttgtacaaggccggtgggagtttggtaacattccttagttacctttcttttctttttccatcataagtttatagattgtacatgctttgagatttttctttgcaaacaatctcagtgaacgcgggtcaatgcatgatgacgagattacaggagatgtctctaagttaccactttacaatagagcagcaagttggatcttcaacatttgccttctttgggttcaacggtatagcattctcaattttcttttcttttctctccataaagctttttcttattctctgaaactattgcaggaactgctggcgtctggagaatctcagcattgaatgagtccgggggatggaatgaccagacaacagtagaagacatggatttagctgtacgagctacactgagaggctggaagtttctatatatcgatgatctcaaggtatgtatagaagattcctctcttttcttggaatcttggattttgcatttgaatcattaatgcgttatctgtaggtaaaaagtgagttaccttgttccttcaaagctctgcgtagccagcagcatcgatggacttgcggccctgccaatcttttaaggaaaatggctggacaaataataagaagcgagaatgtatctctatggaagaagtggtatatgttgtacagcttcttcttcatgcgcaagatcgtggctcacatcctcacattctgcttctactgtgttatcttgccagcaactgtattgttcccagaagtcacagttccgaaatgggctgcattttatctcccttctttgatcactctcttaatcgcaattggtagactaagatcaatccaccttttggctttctgggttctatttgagaatgcaatgtccctgctaagagcaaaggctctggtcatgggcttgttcgaaacaggaagagtacaagaatgggttgtgacggagaagttaggtgatactctcaagacgaagctgattccacaagttcctaacgtcagattcagagagaggtaagttagacatttcgtattaggcctcctttacttaaccgagtttgagcttaaaccattgtgttgcaatcagggtgcatttgctggagctattggttggagcgtacctgttattctgcggaatctacgacatcgtctatgggaagaacacactctatgtgtaccttctgtttcagtcagtggccttcttcgttgttggttttggatttgtaggaaaatatgttcctgcttcctcttacttagcataggatagatcatagagtctcaatatgtttcagaaggttttttgtttgatgtcatattgagaacaatgcctatatactactctccatttgtattaacacttgagtatctgtaaccaacgaagctcagatgtgatcgatattatttttttaacagtataaaaccacttaacacttatttagtttgttgacctcgtggcttcatattgactacagaatgaaataggtaaactataaagtctacactatttatggctgaaatttatttgaatacatatccaccacttgtcttgttcttgaaacacacggtcgtggccatg

SEQ ID NO: 30187 - DNA, 3003 bp, Unknown; identical to SEQ ID NO: 26360
  misc_feature (1)..( 3003): 2750-1469P.txt file - cDNA_ID_3027169; gDNA_ID_2214582; Annot_ID_186519

SEQ ID NO: 30188 - DNA, 3000 bp, Unknown
  misc_feature (1)..( 3000): 2750-1469P.txt file - cDNA_ID_3027177; gDNA_ID_2214582; Annot_ID_186517
ataccagtatcagcaatctagcaagtaactctatggctagatggtgaacctatacatcagagtgcaagggttaaccgtatgtgtctagataaccctagcagtgttgcaaaaacatagaatgaatgacataccagaaaaacatcgacggcctctaattctacccaaagcaagaaagcagcctgcgccttgtccacagtattcttccgacccgtaaggcatttgagcgcaatagcatcgcaaacttcctttgcataccttcaaaagcagaaacaaactaattattcacatgcaaacgaacactccactctgcccatttctaaagcaataaaaataaacaacaccataccttccagcatctgaatcggctgctcgcaaaaacgcaatcaatgcatcaagcgctttctcttgcaccggcgcattagaatctgccaccgtcttcctaaacaagtgacctgcgaataaaaaataataatcagaaattcaatcaaaagtaaagcaaaatggaaccctagaccaatcacattcccactcaacaatccaaattcaaaacagatccacaccgatataaaccaccctaatcagatctgagcttcaaaaacaaaaaccctaacataataataataaaaaaacgaggtagagaaactcaccaaaatcgcgaagacgagggtccttaggatcagtaatcgaatcaaaaacagaagctaaatcgacgttagcttcgttcctaactttccaattcttatgcccaagccgatcctcccaaggaagttttttcgcctccttcaataacttctcatcctccgtcgacattactccacgaaattatctctccgacggtatcgatcttatcgatctataccaagttttttttttcttcgtacggtctcttggaaactttctctctcttttcaaaaaaatttcttcgtgttgttagtgccggcaagagagagagagagaaggacaaaaaagaagagtagggtggagcgtaatgagagagagagagtgggggaattttggtttctacgtttaaatcggtggtgtaatttttttgttaaaaacccttcacgcgcgttttgattggaaatgtttacacgcgcgattatttcaaatcttaaaacgagcgtttttcttttgctttctccacgtggagagatcggcattttcaaactattttaggaaatgattaacagtactgaattttcctattgttggttctgtaaatattttcaaaatatatttacattaacaatctattaatttctaagaaaataaagtaatattttgaaatgaataactcatttttagttataaaaatatttattttaaaaaatcaacaaaatcatgagttattattacttacttattggattatcttttcttctataaaatacaaataaatagtcattttctataaaactagacacgtaaaccaaaatggatttattagtttgattatggaagttcaaaaacattgtgtattttatgatttaaaaactagttaaaatttattattttaatatcctaaatatttatgctaggatctgatttcgctttggattttaatatatttgaaatatctaattcaaattcagaatacaaatactcaaatttcaaacaaactttgattgataattagtacaagaatatttaagccacaccacaccttacaccttttccatctccatcctcatgtcttaggtgatgtaactctctatctccagatatcttttcttgtctactgctaacacatgaaacaacaactcaaatttaagccatatttttacaatggtaccaaatttataagaatcatagatgaaattaccaaaacaagaagttacgtggaaagattgaatccaatattaatattttgatttctattataaaagcaaatgaaataatgattatcagtccattgtttgttccatttttaagtacacttgtttgtttgatttaggtgaataagatccgctaaagctgaaaatacaagaattgtccctaaagatagtaaagtacagtacgcttccaaataaataacaatgggctttagtaggcccacgcaataacgatgttttaactgacccaacaagcccttgtccagttctggcattatacaatgcgtcggtcgacacgtgtaataagtcatgatcggcacgtgtggtctccacttctcctctctcattggtcgtaaactcgtaactagccgattccttctccaaagtatctcacatttccactgcacactctactttctctctcttcactctctcataaatcacaacaacaacaaaaaaaaaaaagttgttagttaagacattgctttacagctcaattgcgtcttcttcctctgtcttattcttcatcttcatcttcctcctcgcggatccattttgaggttcgtgtaaattcccattctctttcgccatttttttgggggaagtgagattttggtctgagttatcggcgaatcgatttcgtttttttagattattgaatggttttgttgactcttcagttcttcttgtgctgtgattgcaatgatgtcctccgaatttcgtgatttaagttcgattttagctatccgagctcctctttaaataatgagttggggttttattctgaaggttcgatttctgattttgcaaatttgggaggtggatttgatccgattagataatctcactgttctgggtgctgtaattgttaatgagaccatgcaaatgttgtgcatcgatgttgtggaacgcttgatttgtaattgaggatttggttgtctgattattggaagatcgaggcttgatagagtttcaaatgagggtcagctgttattgttgtacggtctaatgacattattttatttaacttcaggagtctctttttgtttcttgaagatagactgggcgtcacggagcagctgagtatatgctacgagtgttgcattccggaggctgttctttcagatgattggcagtagctatattatgcttgaacggtgccataatg

SEQ ID NO: 30189 - DNA, 3000 bp, Unknown; identical to SEQ ID NO: 12945
  misc_feature (1)..( 3000): 2750-1469P.txt file - cDNA_ID_3027186; gDNA_ID_2214582; Annot_ID_186514

SEQ ID NO: 30190 - DNA, 3003 bp, Unknown
  misc_feature (1)..( 3003): 2750-1469P.txt file - cDNA_ID_3027190; gDNA_ID_2214583; Annot_ID_135300
attccaaatgaagttccataatattcttcggggtgtagaatagaggtgttttcttacaatttaggacgtctatactagtagctatgattgaaaccaagacaaatccaacaattgtggtccaaaacaatattgtacattgcttaaggaaagcgttgaagataataaatcagaattaaccaaaaagaaagaaaaataataaatcattgttatggtcgtcttatggatcctagttatatacgaattgagttttcattcatagttgagaacgaattcgtttgctcgcgtgtgagtttagatcgtggttgtttttgtttgatcgtctactagtgttaattaagatcattatttcttaaacccttgaatggttcttctaaaacctatgcaatgaccgtgaaaacgttgatgatattagttttaaccaaagaaatgttatgctaataatgatattgtgatgttaaattaataaagaaaaggttatgcttagcatgatcccaagcgataattcgtgtgtcctatcattaggtttggaaaaactctaccaatcatagacgattagaccagtatagttgattatagttttcagaattcagatttcagaccaaagatagagttgtggacgtaggtttcttgatttttgttttgtttctgtttatgtttttttgtcgttatacatggataaaaaaaattccaaccaatcgttaccttgagatgtgtagttggacttttattgcctcatcaatacacttatacaaaaggttcaattttctgtctaattatggacatgtttatttcaaatgtatggtaatcttccaacacttataataccataatgaaaaatacttctgtttatatatatattgaactgagattcaattagtgccacccatgtgacctgatggactctccgtagacaaatgtgggggcaattttgttggatcaaccaaacccaacatttattttatatctgatttgaagattacattagtaaataaacaatggttagagtcaagtttatacaaatatatgggacccaactaataagaaaaaaaaattattgacgtcagatatatactaataaagtatataacaaaggaccctcagtgcatgtaattaatatatattttccaataaatatcaaactatagattttctaatgtatttaatgttattatttctaactagtaattaattgataatttgacaaataaatttttgtttcacattattcttatataaaactgtaaatgatttgtagcaaaaatacaaaactgtgtatataatatactttataaatagtttctatgtattggatccaagtaggatttcgaagactttgaagggcacatctttttcaaagtttacttatacatatttaatgtaagataaagtcattgtttatatgtttttttctagaacacttaaatttccacaatatgataatttaaattaattgaattttgttttactttggttggtttgtggataaaatccaaatattacagtcactatctttcgacgtgtctcacttgcaacctaatccttttctggaatgtagctttttttttgtttgtcaattttatttctttctctcttaatccataaaaattttaggcatttttgtattactgtcaaagaactgattagctatgtcttctatatatctaaaataaaccataagaatcatagttcatactcattatggtattcttaattttctgaaactatcgataaaatgttaaaacgttatatacaaaaaaggactatcaacgtagcaataaaatgaatttagacttatatgaaagctaatggtgacgaagaagttgacggtgatgccggtcatttgggtcggtggtggttccgtcacggagactttgacggtgcattattgacgtcaacatgaagtagctctcacaaaacacaaaaaggaccgtttagtttgctagttattaaaaatataatgggcttcaagcccataataacatgtctttttacaaaacagaagccacgtattatataaacccattttttaatatataaataattgggctgtacttgggcttggacggtttcactcttttatttttatttttttaaagttttttctatattagtaatgatatatttacagtggaagcctttttggcggaaagttctattaatacttatacacaaagaaattgaggttcaagtcccaaatactgtgatttattagcagataatggagataagtgtgcaagagatctcgaacgatgtacaattataactgtttgccaggatttgaagatctttcaaggtgtccatcaaaagcatgaagacggagaagaaagtgtcgtctttcgtggatctaataaagatcgaaacaaattacccataatagaatcggctatataacggttctcataaatcataatttgcaataaataataaatctaaaacggtaaaagaaaaatatatttacatgaaaataacatgtcattttaaatatttccagaattaaaatataattccaactgtcaacggtccatatacgttatctatagactatatagtacataaattattttaaaaagacaaataatttgtttcgagaaataatgttgctgtctcgtcaaaattggaaaaaaaatacattttaaaatacagagaaacgaattattgagaggagaaatttagagaccattcaggttttgattgaagaaaaaaaagattcccattttatcatctttttagtttttagtgtcaactctccaacaaaagcaaaaaccttaaagaattttgttctttttttaaagcaaaagaaccaaacatggtttcacatgaatcccaatttcattgcaaagcataactaaaaataaagaagaagactttttggagatcgaatctgttcatgttgatgggttttggctgagctttctagagatagagctagagagtactgggtctgtgtaaagttgataactttttttggtttagagagagaaaggacagagctttacagagatg

SEQ ID NO: 30191 - DNA, 3003 bp, Unknown; identical to SEQ ID NO: 30190
  misc_feature (1)..( 3003): 2750-1469P.txt file - cDNA_ID_3027190; gDNA_ID_2214583; Annot_ID_186559

SEQ ID NO: 30192 - DNA, 3003 bp, Unknown
  misc_feature (1)..( 3003): 2750-1469P.txt file - cDNA_ID_3027225; gDNA_ID_2214583; Annot_ID_186565
agtttctgtattttttaaagcttattttgtattgatcataaggtccttggagcagtgatggtttatgcaaagatgggagatgcagcgattgtgtacactggagattacaatatgacgacagatagacatctaggagctgctaaaattgacagactccagttggatcttctcatttcagagtatggaaaacaaatacaaacttgttcgctggtatttttcaacaaacttagaaagaacaagtttacctgatataggtttaactatgccgttttaggtccacatatgcaactaccattcgcggctcaaaatatccccgggagagagagtttcttcaagctgtatgtctacttgtaactattaacacatggtttctaaatttgttcttaaatggtttttgattataattacccgcatcacctttggcttgtttctgatcaatataccccttcaggaaatgcttaagctttcgtttggtaattgtctgatatctcagaaaactcttccaggttcataaatgtgttgctggcggagggaaggcgctgattccttcatttgctcttggaagggctcaggtctgtcttcttacagagctttgaagtcagttacttaaacttgtctttgcttctcttatgtctcattgacaattgcgtttcctttttcaggaactctgcatgctgcttgatgattactgggaacgcatgaatataaaggttccaatttacttctcatcaggtctgttaaatcaccaccaatcctcatatgaaatcaattctgcagattagtcagctcaacaaagtcgtgactctatttcatgaatagtgatctctatcttctgaaaattgctgtccctgaagataaatttgtacttttgcaggtttgaccatccaagcaaatatgtattacaaaatgctcatcagctggacaagccagaacgttaaagaaaagcacaatacgcataacccatttgattttaagaatggtatgtgtactaccatttgcaaataactttagaacgttgaagatgaaatttatatcatatggaaccgaaactctgatgtgcttgaaaaataagaaccaaactagtggttctaatacatcctttgcgtccattttttgttcttatccactaccttagctgtacaactctgcttgctttctaactactaccttcacattctgcagttaaagatttcgatcgatctcttatacatgctcctgggccatgtgttctctttgccacacctggtatgctttgtgctggcttttcacttgaagtgttcaagcactgggctccttctcccttgaatcttgttgcattacccgggtactatacctattgtgtttcccctttattagcaattcagttttttcctagcatagcatctaacacgaaattgtatctcttttcatccatttatggatccgttttttacagatactctgtggctgggaccgttgggcacaaactgatggctggtaaacccacgacggttgatctctacaatggcaccaaggtcgatgtccgttgcaaggtttgtttactctttcttctggttctcacaaaatttatgtaaccttaacacgaaaacagcaatgcgtccaattcacacgttgaacctaaactaaaatgtcttgttgattctgttgttatcaggtacatcaagtggctttcagtcctcacacagatgcaaaaggaataatggatctcacaaagttcctttccccaaagaacgttgtactcgtgcacggcgaaaaacccagcatgatgattcttaaggaaaagataacctcagagcttgacatcccctgtttcgtccctgccaatggcgaaacagtttcattcgcttcaaccacttatataaaagcaaacgcttctgatatgttcctaaaaagctgctccaacccgaatttcaaattctcaaactctactcagctccgtgttacagaccatagaaccgcagacggggttttggtaatagagaagagcaaaaaggcaaagatagttcaccaagatgaaatctctgaggtgttacatgagaaaaaccatgtggtctctttagctcattgttgtccagtgaaagttaaaggagaatcagaagatgatgatgttgatctaatcaaacaattgtctgcaaagatcttgaagacagtgtctggtgctcagatccatgaatctgaaaactgtttgcaggttgcatctttcaagggctctttgtgtctaaaagacaagtgtatgcatcgaagcagtagtagtagtagtgaagctgtgttcttgtgttgcaactggtctatcgcagatttagagcttggctgggaaatcatcaatgctatcaaactaaatcactgattcttgtaacactgagaagtgttttcagtttttgtcgtttttctgtcggcatatgtaaaagttttgatcctagtaaattaaattaacccagtagtaactaaacttaccaactttagcgccaatttctatctaacaaagtaacacccgtattaaaaaccggaaccaattacccgaaactgaatctgaatccgaaaatttacttgtgtcctaaattcttctaccctaaaaaccaaatctgaagtcgaacccaaaaatacatgaatattttaatcaaaaatttaaattttattcgaaatccgaaaaatttgcatatttacccgcaaaatcaagtatggttctaaaaaaggcctaaaatctatacacgaaccgatattttagatttaccctatagaatcctaaacttctctacccgaaaaaccgtattcgatcgaattttacccgaatccgacccgtttatccgaatggccactcctaaccggatcctttaaggttaaagacgtacgacttattgtgataatgataattaacttataagactgtgtctaatcttcaattaatgttaattaactaaaaccattttttaaaactgtccgccatggcttagcgttttctagagcagagagaaagaagaatctcaattctcttcgttactaatg

SEQ ID NO: 30193 - DNA, 3000 bp, Unknown; identical to SEQ ID NO: 12950
  misc_feature (1)..( 3000): 2750-1469P.txt file - cDNA_ID_3027233; gDNA_ID_2214583; Annot_ID_186563

SEQ ID NO: 30194 - DNA, 3000 bp, Unknown; identical to SEQ ID NO: 12949
  misc_feature (1)..( 3000): 2750-1469P.txt file - cDNA_ID_3027237; gDNA_ID_2214583; Annot_ID_186560

SEQ ID NO: 30195 - DNA, 3000 bp, Unknown
  misc_feature (1)..( 3000): 2750-1469P.txt file - cDNA_ID_3027247; gDNA_ID_2214583; Annot_ID_186555
gtttatggattctactgtcgcctccattccaaaatacatttcggctatcacaaaaagattttgtacgtagtgagaaatatacaattaattataatattcatatgctaccttcaaattaaagttgaaaaagaagagatgaacccattgtatagattggggatactttaaatctttgaaagaaaaaaatataaattgtgttttgaataataacataagcattaataataagaaaatgtgaattaggttcttatgaggtaagatcgtattaccaggggaaatacggctaggaacagtatatgaaatgtcatctttcatcgccatattaaggttctggttcatcatttccgccgattgcaaccttataccttcaacagaagtttcaaaatgcattgaaaacaccaaaaatatggtacaaatggtgaaaacagttgaacaattcatagtgctagttttaaggtcaaagattaaaattgttgagttgtattgatgaaaaaattagtatagatcaaattgggttactactatgttatataatggattaaaaatactttcttctaattggagttaaattttgatttatctatttttggacaataattttaggtattaaattttttattttattttatttatttgccaaagattgcaagtagtagaattaattgatttgattaagtaaatatgacagctagatacactctttgcatgtaattaaaaattaaaaaattgaaattttaatttattacaagattttgatatcaaccacttttagagaaagagagtaaccaggcaatattaggaaaatataaaattaatcaagaaaaatagacatgaaaaacaaactactccaatctttttgtttagccaataaagagattaattaagctaatatcttactaaaaaagagtttatatattattaattttataacttagaaaatttctaatctattatgcaaaaagttatttctaattaataagattgattctactaattttgataatagatatttgattcaaatataatgaaaaataaaaatgacctctagcaatttttaaatttttggtaacaaaatactaacaattttcttttctggcatagtttaaattaactttagatagtttgaaataatcttaaggatcaaaagataatagttacaatctatgaaaaaattgttcttgcaatgtaacaaagatcacctaaatcaaaaatgccctcgagttgtccatagatgtgtgtaaaattaacttaacaaaactaatcagtgcatgattatattttttttagtcggccaatttatccattagataatgaaagtgtgtacagaaatacatttaacagacccaagagactataactccaattggtaacattacataatagcataataatataaattgccaaataaaaatttgtaaaatgaaaaattgtagaataaaattatttttaaaatatgttgattgcataaattttgtagaataatactgcttttgttgagcctctcttgctaatgtatttgccattacatttggttctctacgactatatatattatagtaacggttcttggccaaagctaagatattatttaggcagtcctgaatttcccaatttcccggtgtaggatgatgacatgatgtgcgcatataccaactacttttaacaaaaataaaattacactaggtgaatactcacactacgtataggttgttattttaaaaattatttaaaaataattatgtttaactattttgattgctaatttatgttttttccgtatatgttattatgtagttaataaagttatatttattttatgtaattatatttgtagagttagattcacttttgattcacatatcaattatattttttatgtataaatctttttatctctatacccaaaattctaatctttttttaactatcatgaattacttacatcaacaatatatgatacaatggtatgcaattatgttacttatttagtttgaaagttgtctaatttgattctaagcaaacaatttattgtttcatgtattctctcttaatctaatatcccaatcacatcatgataaactcatggctaagtattagattgacataaaataaataacatatgtataactaactactcatttgcattaaaagttttcacgtgaaagaaaaaaaagaaagcaaaaattaaacagtcttttaagttaatacttttaggtttctctctttacatttgcatttagctatattggagagaatgtcgtatattaaattttttggtatatctaacgtctcaaaagaccattactttaaaaaacatgcatgttattattaatgttactaatttatcataaagtacaaaaagaccatgataatatcatgtagaccaaaaaatgtaataataagaaaaattaagttaaaattactaaattaaaaaaggttaagtaccaggtaagttgcaatacccaaaagtttctaaccattatcaaatactgactattaaaaaaaatagcaaaataagaaaagtaaaatgaaaatagtatttgatatattaacataattttttatatttttttcttttaagtgaagatattttgttaaaaataagattaatgaatgattcaatgcaatgttaaacttttaaattttatcaccaagttttattatttttctaataatattaatttaggataacatgtgacactcattagtgtgatgatgtgtcactcatatgaagaaagttagccaactttcatatatatgattaccaaataaataattttgacatatagtatatcgattaccaaaccatataactgataaacagatgataaaaatacaatataatcaaagtgtttcataatcatatagtaacgcaccaatcattaaaaaaaaaaaaaagttaaacaccaagcataaaaaaaagtcgcgacgttctcattctttctcgaatcataccacagagagagagagaacaaaaagaagcaatcgtcgaaagtcatg

SEQ ID NO: 30196 - DNA, 3000 bp, Unknown; identical to SEQ ID NO: 12972
  misc_feature (1)..( 3000): 2750-1469P.txt file - cDNA_ID_3027260; gDNA_ID_2214584; Annot_ID_135327

SEQ ID NO: 30197 - DNA, 3000 bp, Unknown; identical to SEQ ID NO: 12968
  misc_feature (1)..( 3000): 2750-1469P.txt file - cDNA_ID_3027260; gDNA_ID_2214584; Annot_ID_186604

SEQ ID NO: 30198 - DNA, 3000 bp, Unknown; identical to SEQ ID NO: 12970
  misc_feature (1)..( 3000): 2750-1469P.txt file - cDNA_ID_3027268; gDNA_ID_2214584; Annot_ID_186599

SEQ ID NO: 30199 - DNA, 3000 bp, Unknown; identical to SEQ ID NO: 12966
  misc_feature (1)..( 3000): 2750-1469P.txt file - cDNA_ID_3027284; gDNA_ID_2214584; Annot_ID_186588

SEQ ID NO: 30200 - DNA, 3000 bp, Unknown; identical to SEQ ID NO: 12975
  misc_feature (1)..( 3000): 2750-1469P.txt file - cDNA_ID_3027292; gDNA_ID_2214585; Annot_ID_186627

SEQ ID NO: 30201 - DNA, 3003 bp, Unknown
  misc_feature (1)..( 3003): 2750-1469P.txt file - cDNA_ID_3027355; gDNA_ID_2214586; Annot_ID_186650
cttgtgcctgaagcggtgaaacactaggtccctaaaaagggggatcacaagtaggacgagagaggtctcttgcggcccaataattggattttacagtatatttactagatttagtataataccagctgtcggcatcactcttgtaagtacgactcggcctaatccctaaaatgaaagtgatatcagaagaatcaaccaaggcttgaaggcgtgaattaggtcattaacataaaggtgtgaattccttatgttaagaatactttttgctggccttgcagggacagaaggaatccaaggatcttgccatacacgggttcgccttctagagcctattgttcgtcgtagacccgagagaagaagtggtttagctgccataatacttctccatccaaaagaggggcagttagtctttcctatatgtataggatcactatacctaaagtatcttcccttcaacacccgactaaggagacgattttgaaacctaattagacgccataattgctttgctaataaggcaagattaaattcttccgatgttctgaactctaggccaccatcagaaaagagtgtgcaaagcttatcccaagctatccaatgaatattgttgctttcttcccttgtcttccaccaaaaaattgcaattgcactactaagttttgagcgaatacctttgggaagaagaaagcatgacataacatatgtcggaagggcttgtgccacggaattaataagaacctctttgcctcctttagacaagaattttgatgtccacccatttattcttttttgaaatctatcccccacaaaggaaaaaacttggtttttcgaaccatgaatttgttccgggagtcctaaataggatcccatacccccattcttaaatattcgaaaagatagtttaatggtattccgaatagagctattcacctcatggacaataaaaaattaaagacttgttagtattcagttgttgtcctgaagcctcaccatatgttcggagaatatcgataatctcttttccttgtactgggcctgctttacagaataaaagactatcatcggcaaaaaggagatgagaagtggagggactagctcgtgagatctgaattccttggattaggccatgccactcagcatctttcaactttgctacaagagcttccatacacagcatacacaataacggggaaataggatcgccttggtgaatccctctcgaaggtttaataaaacctttagggatccatttaacagaattttgtaagataccgacgatatacagaagattatccaatctacccatttctgagcgaagcccatcttcaacattaaagcttgtaggaatgaccattccacgcggtcataggctttactcatatcagttttaatggccatgtacttcttcctacaagctgtattcgtgcaaaaagcatgaaaattctcttgagcgacaaggatgttgtcagtgatcaaacgctcagccacaaaggcggattgagtctctgatataaggtccgaaagaagacgttttagtcgggagcttaagaccttcgaaattactttgtaacttagattacaaagactgataggtcaaaattctgacatttttctaggtctttctatttttgggatcaagcaaatattggtctcattcagccgtttatcaaaaaagccggtggaatggaagttttgaacaagtctgataaggccaggccctgtcaggtcccaatattgctgataatagaaggttgtcatctcgtctggaccgggagctttatcaaggtttagtgaaaaagaggacgtttaacttcttctataaagttcgctttgtgagtgttttgttcatgtctttggtcactaacacgggaacttaccagagaactgagtaaaaaactcgaggatttgacgtagaaaaaagagtcttgaagtaatcctctgctaagtgttcgatccgcaactcattatccacccataggccatcttggttaagtaagcctagaattttatttctagcccttctttgtttcgtagaagcatgaaaatattttgtgtttttgtccccaagtaggagccatatctccctacttttaagcttccaaaaaacctcctcgtctatgtaagcctggcagagctttcattttagggcaagtaagtcttcagtagaaaaattctcatcttcgtatggtagatcaagctgagaatgtagttcaagaatgagcttctcggaatttgttcaattggatttttccaaatagaaatagtttgtctacaattcctaatcttttggaatattggaaagccctctccacgagaggagaaagcccatccttctttaacaaaatctttgaatcctggtttatctatccaatgtttatcaaagataaagtgtttataaggacgctgagatttattctaaatggatgctagaaggggtctataatcggaacccctcaattgtaggtactctggtgtacgtttacaagaaaacaggtaaaagacgactacaatcagcgacaaccaacgtagtcgtatatttaaacgacattttggcgacggatttacgactacagtgcgacaactcgaatatttgtagttacatagttgtttacttacgactaacatagatagtcggaacatagtcgacaagtaacgactatttgacgattatattatttaagggagaaggttgtcgttacgtagtcgctatttgacgactatcataccgtctatctaatttagtcgctaattggacgactaatggacgactactttacttagtcatcctgtagtcgtagaaacgtcgcataggagtcatataaagtaggtgaaaacgtgtttcgcattggtaagtaggtacacctaattatttagtggtagtcgtaaattagtcacaaaaattggcctatataataaactttcacgaaactcttctttcaccaacaaatcaaaacaacaacaacatcaaagaaaaaaaaaatttagttagtttattgtataatg

SEQ ID NO: 30202 - DNA, 3000 bp, Unknown; identical to SEQ ID NO: 12989
  misc_feature (1)..( 3000): 2750-1469P.txt file - cDNA_ID_3027442; gDNA_ID_2214587; Annot_ID_186670

SEQ ID NO: 30203 - DNA, 3003 bp, Unknown
  misc_feature (1)..( 3003): 2750-1469P.txt file - cDNA_ID_3027463; gDNA_ID_2214587; Annot_ID_186664
agttctatcagcatttttggtcgaaaataaaaggctccattattcaagaggtaaacaacgtttttagagaaaacaagctatacgagaatcgtaaccacactaatctctgtctcatccccaaagtggaagccttgtcaccaatgggtgatttcagaccaatagctttgtgtaatgtaagctataagataatctctaagattctgggtaatcaactaaagaaacatcttagaggagtgataatagataatcaagcggcttttgttctggggcgaatgataaccgataacatcattatggctcatgaagtttattatgctctgaaagcaagaaagggtcgagcgtcctcaaacatggcaataaagaccgatattactaaagcctatgatcggttggattgggattttttggaggaaactatgaggcgaatgggatttgatgacaaatggatatcttggatcatgacctgcgtgacattagtgagacactcggttttgattaatggagcctcacaagggcactataaaccggaacgaggtatacgttaaggagacatactctcaccatacctttcattctgtgtgcaaaagtcttatcgcatctgaagaaacaagcagaagctacgaagcaactacaagggataaaaatctgcaacagaagtccttctttatctcaccttttatttgtagatgattcgttattcttcactcttgcaaattatcgatctggcatggcaatacagaatatcctaagtaatatgaggaggtttcaagacaggctgttaatttaagaaaatcagctataacctttggtcgacttgtgaagtcaaatacaaagagacaaatccgtcatttactaggaatcaacaatgaaggaggtggatgtaaatatttggggcttcctgaacagtttgatgaaaagaaatcagaactttttcaatacatcgtggaaaaggtgaaggaaaagactcaggaatggagcaaaatgtttttatcccatggaggaaaggaagttcttctcaacgcagttgctcttgcgattcccgtctactcaatgaatgtttttaagttaacaaaggagatttgtgaaaagataaatggcatataagcgaagttttactggagctcaggcaatgacaaaaaaggtatgcattggttctcctggaatcgtctaagcttgccgaagagagaaggaggtttgggattcaaggatctaaagaattttaacttggccttgttaggaaaacaagcatggaggatcttagaacagcctcattgcctgatgtcaagaatgctaaaaggaagatacttcccagacactaatatcatggatgctaatcaaggtcagaaggattcttttatttggaaatcaattttgcagggcatggacctactaaagaagggatttcgctattgtgttggtaatgggactctagttaatgcgtggttggatccatgctgcccattcacccgccgagaccgccacaaaaaaactagggatgccctagatcagcatatggttagtgagctcttaaactcaacacgcacatattgggatttcatcaaactcgctacttagataatacttgatgatgtggagaatgtcaaaaatattaaagtttgtgcattatacaaagactgacattatacaaagactggcatttagactatgaaatctgcatatgttatacaaacatatgttttgaaggagataatcatgagttggaatcaattatcaacagaagaagtccacacttttgagtttcaattttggatatgagagattcgagcttagaaacaaatatttctaggaagcaaatttttatgaataggaagaaaacacaacaaaccagcggatattctcgtaaagcagcaatgacctcaaggaacaaaatttatctttcataatcatattctttatgtaattcataatgctatgtgtttgtatcatacgttatttcaatattaataagaagctacaattcaaaaaaaaattaaaaccaaaatctacaccaaactttttttttttttttttttttttgtcgtcctacaccaaactttttaaaaccgaaaatacgaacttaaaaaaccaattatagtatactttttttttgttccgttttaatttttgttttatttcgataaatatctctggcgtagattagcgagagaggtttagctgtcgttttacattctctcaaagctctctcttttatagctttccaataacaaatcccaaatctgattctttcagctaaaaatcttacatcaatcaatcgaattgtcaaaaaaagatatcacaacccttcttctgaattctcatttcttaagcttatacacttgaaatctccaaaaaggtaccatttttatgactttgttatctccgttttgtgttcgttgtttgcgattctcaattgggttaaaagggtttagtcgttaaacatttccatcttcgtttttggacttgatgtgaatttaaagttgggaccttttatgttttgatccaaagaaaagaatctgcttaattgttgttttagtgtcagatttgtttcttctttgatgcaggggaaaaagaaaatgagttaggtgaagtttcagaaccatagagacgacgatttgatcgttgcgtaaaccaaatgatataaagcaaaagatgcaatcgagaatcgtcggattagctccggcgttttctctcttccctaacctaaacacacctcacaaaaccttcactttccatcaaatcttagttctcatcatcacattcacagcctacgcttcctttcacgcttctcgtaaaccaccaagtatcgtcaaaagcgtccttggtccaccttctcttaattcatcttcaattgataatggctgggctccgtttaacggaacccaaggaaccaagagacttggtgagcttgatttggcttttctttcttcttatgctttgggtatgtattttgctggacatttaggagataggattgatttgagatactttcttgtgtttggaatg

SEQ ID NO: 30204 - DNA, 3003 bp, Unknown
  misc_feature (1)..( 3003): 2750-1469P.txt file - cDNA_ID_3027516; gDNA_ID_2214588; Annot_ID_186699
ggttgggccatagcccatagctaaatctctttcctaggttctttgctcttttcagctaccaattctcttctcgcttgttaggcctggccaaataaaccaaactgaatatatcaaacccaaaccaaagtaaaataatcgaactgaaaaatttaaaataactgaatgaatactaaattctataattgaaagaactaaagtcgaatcggtactataccgaaatatttggataaccgaaaatatccgaaatatattagttatttctatattaaataattaaaaatatgtgaaatatatatataatagtaaaaataatcgaaaataaccgaaaaatatctgaaatatctaaaaataactgaaatgtacgaaaattttgaaagcaaaataaccgaatggatacgaaattttaaaaccgaaagaacaggatccgaaccgaaacctaaccaaaatttcaaaataatcgaatggatactaaactttataaccaaaatatctgataaccgaatggatacaaaccgaaaccgaatagataaaaatctgaaccgaattgataatcgaatggatacgaattgataaccgaatggatataaaccggaactatcatttggtatgttttttgtttttgttctctcaattgttaaatcacactacctagcattaaatatatacttttgagacacgtttgatcatttttgactagttagtcacacattgatataattggtttcttaattcatcatagaaagtaatctgtacgtatatgattggttcattcgcaatccattttatttggttatcggatgggtcatcaatggagattaacaaggttttgaaatttaattaactagacttggaaattgaattatttatttcccccggataagacacaaatttgacaaatatggataaagcacgttttgataatgtgtattcgagctgtttaatttgaaccacgatgtacatatgattcatcagtcaatacataatatttatactactaatacacaaattgtgtgcaatatcgtattaataacaataaaaatggaatatatatatacttaggttattgaccaatattgacgacaaaaatttcaaatgaatgtatatatattcgtcattagtggacgaggaaggcaacttcgcaggaaatgatattgcgagcttacatacaaaaaatataaaggccacatggttttcacgtagctatcacacttaaacgtgattacgtgacgtaccttgtttaactaacgtaaccttcatggtcttgcttttttttgttcataattattatcttcatggtcttaccacgttctttgaacgtttcttaactcttgacttctaatcagtagacaaattattacacattagacacatcatatatagacaataggcacattattattgtatgtagtgatcaaaagttcatggtaaatcttttgaattagtcaataactgtagcctaaacattaaaaacaaagattcaaagctacatatttccgactgacttttaacattgtacggatcggaccgtcaagttgatttaaactatgattagtgatgatttatggaaaccctctctaacgtacatgtggagatattgtgtcagctgttatgtcattgtttatagctttccaagttgcaaaggagaccatcattttggacttttttctttctttcttgtaacatctgttaagtatcactagctagacacttgctattaggtccacaacctcgttagtggacggaccagaccataattaagaaattagacacgagtgaccgtagtataaaagattaaaagtgagtttagaaatgtacctgactagtacaatttccagatttcatcgtgacataaaaggtgcatctaaattataaatgatggataataattgtcttaagcatgcaccgttaattttccgtgatcaacgtaaaaaagtagcaatcgagtaataatatagtaatgcaaaagacaaaatgattatcgcaaataattaaccaacccattaagcttataatgcatgcgtattatatcaatcaaatcaaagcattaatatggtccacaagagtagaagacttgtaccgcgcatccgcatgatgttgttaagttgaaaattgcttacaaaagtcctgtttttttcaacctagaatccatttcccacaaaagttagcacttttatcactgttattttccttttaaatactagcgaccctcgatataatctaaagaacgttaggtatttgtaaaatacaattttggagtttatggcatatttttctttcttacctccgctttattattttgtcttgttcatattttagcgagtctaagattttgaatggatgcagcggacaaaacggtttaatttgtctgctattcagtctacttcatttttgggcggacaataaatcgatgcggatcaaatttatttatatgtaaaaacggtccgtagatggtccgttgcggttttcttctattattttttatccagaccactgcgtactataattaatgaatggtaaataaaaaaaggtttgatccattgacgattttgtccgccttaaccatcataaccatccaaaccctaattctaaaatttcaacgtggcagaaaagaaggtaattgaataacaaggtgatatactcttgaaataaacatgaatctacaagctatacttaatagttgcatgtgatgcgcacgagtaccatcttgttgaaatagtggtagtacaatttaagagaaatccaaatactaattaaaaaagccatcatgattaaaataattaggcttgaaatcgtacgtagtcaaaaggtttgtccattaattaagaaattaataaaaatggaccatcatttccacgtatctacaaatctctcttacccccatatgcacatgtctgcgaaccccatcatttaaagccccaacgtagcaacctcaccgccttcaatcatcaaacatccaaactctatcctttcgttttcttgtcagacaaaaactaatactagatg

SEQ ID NO: 30205 - DNA, 2408 bp, Unknown; identical to SEQ ID NO: 13001
  misc_feature (1)..( 2408): 2750-1469P.txt file - cDNA_ID_3027530; gDNA_ID_2214588; Annot_ID_186703

SEQ ID NO: 30206 - DNA, 3000 bp, Unknown
  misc_feature (1)..( 3000): 2750-1469P.txt file - cDNA_ID_3027532; gDNA_ID_2214588; Annot_ID_186700
aggaatatggtagcacaacagaggaagtatgtacgtgtaagttattttagaactggttggcgaatcaagcaaggcaagtggattcacctaaaagttgttctagtcagtgttgtttgaataccatattttgcttgtcgcctacacgtttgtaagatggaaaacgctctttgtaaatacatagccaccagtcatagaacccaaggacccattttctctgctgttaccttaatgaaaaaggtgagattcatatatatggaaaaatctcttctgtaaaatggtacttagtgtcctgaaactgaatatgcataaagcaaccggttgggttgggtcttcactgacatgattgttgtaggttccatcagagttagaaactcacaaagataatgtcacagcctccattcaaactagttcgtgaaggagtgttgagttgtagccaaacagaagaaaaaattgatattgggacaaatgatcgatcattagtgacattagatacaaaacttgacagcccttctttttggaagttgtagccacaattacttaaccctaatgcttttttttttttttgtcaaacacttaaccctaatgctaagcggctatataaatagaagatctttattctgatattatctctacaacttttttatcttgaaaaaaaaaatgaaaggaataacaaaaaaacttttggtctcccgctctctcaaacgtctgacggccaagaaaaaccggaggaagattcatcgagagacgaacaagcgtctcaaaccggaggaagatccatcgatggtgaagaggcgtcaagactctgattcagattcgctggagaaggaggtttcagttgttgtaaccaagacgagtgatgatgagatggtgtcaacagataccaaaaagaattattttcaaagaatatggagtgatgatgatgagattgttttgctgcaaggcatggttgattttgagaatgataaagggaagagtccttatgatgatatgactggttttattgatacggtgaagaacttcattagctttcaagcgaatcaacatcaattcacaaccaaaatccgtcgcttgaaggacaagttcctcaagaaatggaacaatggtgtagatgagaactctcttgtaaatgctcacgaccggaaatgttttcaactttccaaagtaatttgggaacctacaactaaggtggaggaggtaggagattggtttgtaaattcttatcttgtaggatcaattgcgaggttaggggtgagtgaagacgtaatgaaacagagttggagcatggttccgatagagacgaagaaggaggtcgaagagaagttcaagctgttgaaagatgaagaatctgaaaacctacggctaaagacaagttttttgcaaaaggtcaactctatgatcattgaagcaacaaattagacaagtatcgaattagaggtttaatgcatctttttcatttccatcccatatgagtctgttttttctatttggtttgttattggtttttgatacttggattgtgttgttaaaaacactatggaagaacggcagattaaattttaatgcatccaattgtggtcaaggtttatggtctaaattttggtcagaatactcttgttagatacctctcactttgcttagggtcaacaagcatcaatgtttctgagatcacagattttgtaatcaaacagaagcaacagattttgtctatcttgcaagcaaacagaagatcacatgcatattttgtcttcaacatgaacaatttcccggaaacgtgtagaagcaacaagactcttctgctccttcctcaatgacgatgtttctctctggaaatcactggttttctcaagaccagacaatagaacatcgtatgtcccaagcgaaggcattatctctcgctctctcatctctcctaatatcttcattgctttctctggactccctgctgagatataaacatccatcagcgcagtgtaagcagatagacccttttgatcatccggaagtaagtctaaagcctctgcagctaagctaggtcttctcccaaacccgagcatgtggatcagcattgctccatggtacacaccaagcgagtgttgggatttcaccatctccttgaccacatcaatcactttagagagctcgtttgatctcagaaagttaccagctaacgcaagatacgctgacttctcaagatgaattcccatttccaagctccaatcaagagccaacgaagccaagtaaataaccaagatactgtgccaactattagtagtcattaagagacaaaatcagtactagatactgtgccaactattgtcaaacccaaaagtgtttggacggtttcctattatatctctatgcttttactaagacaacctagcaaatattctgaaagtgtaactgcacgactgatagttgcatcaatagtgtgacaagaagccataaatgtttgatcagaggtgtaccatacgggtacctgcatagttggagtaaacaattgaaagatgaatttagccaagcaggaataacaaacagtttaaaattttgtaatcgatccagggagtgtatttactcaaagaacagatcaaggactcttctaatagctcctgagctagctagttcttttcctattgcttcacttcgagttttcagtaagacatgaatgaactccacaatctaagacaagccatcagcaacacaaacgaaatcagaaatatattacacaacagaaaacacacacaagacacaagagtatatgttttgagttagaactccgtacttgttacatgtttgagtgttatgttttatgttgaatttaactaaaatgcagacgttagtatggaatgggcttcacaaataaaagcccaatagtatgtttttttggtagggagcccaatagtatgttggttcacccaaatatcatttctttctctgagagctgtttattatattcacacaaagaagaccaacaagaaacagagttgaatcagttctacaatg

SEQ ID NO: 30207 - DNA, 3000 bp, Unknown; identical to SEQ ID NO: 12999
  misc_feature (1)..( 3000): 2750-1469P.txt file - cDNA_ID_3027536; gDNA_ID_2214588; Annot_ID_186697

SEQ ID NO: 30208 - DNA, 3003 bp, Unknown
  misc_feature (1)..( 3003): 2750-1469P.txt file - cDNA_ID_3027548; gDNA_ID_2214588; Annot_ID_186691
ttgaaggttagaaacaacaaaggccatttctgagcattagtttttaaatttgaagttacctggtatgatataagagcataaaagatgataataatatatatcatcatcttagtatatagtatctacaccatgctttcggttctagtagagaaatgaacgcacaaaccttatcagcaaaaggttcacggatgtatggaaggtctctttcaagatactcaaacatcaaacgaccttgagagcctaaaggttcgccatcatcactggaagagtcttcctgatgttgatccctcaatgagatacagtctactctagcagaaacccgctcggaatcactatcgctgctaacatcgctacttgaatcccgaaaatcactgtcgctactatcaccaggacgcctgccataggaaccgtacatgacataatgaaaaacagcttgttatactataatgctgctatgatgagttcacaaagaattaagaaccttgatttaagagatgaatccaaggcatgagaatgagcatagatttgaatggctgacaaagaagggacatagtattggataacacgatccttgttgttattcaaaacaagaggcacaccggtgccgtaagcactccactctgcaaatgagtcccatatatcaccaagcacaaaataaggcacaagtttattataatcatcatctgctcttctttctcgtagcaatgtctacacagagattatcaccatcaccatcagagaacaacacagacttagattaaaaaaaaaaaaacataaaatagagattgtaataaaccttggataaaaactgagccggtacggatggtgtgaccgactctaaaaaccgatctagattactggaagataaatcggacggctcgagttgttgtttatgcggagaaggagctgatgatggaacgttagagacgtcgctctgagctctacggagctgatcgatgcgctgattggccctgcgagtttttgcggaagtgtagaaaggatcgtcgccgtgtctgcctctcgtcaactgaaatccagcacccaacatctccgagtagtcgtagttgagtttttacctatatatctatatatctatctaagcttaatttagttgatttagcgtgaatatgtgtttgtctccgatgagacggcgaagaagcttggtcgaatcggagattccaaagaaaggggtaaaaatggatcgaatgaaggagaattgatagaacaaaaaccttctgatgatatctaagctccgattaaacaggcaaaagattagtggaagaggaaaatctgaagaagagattcgctgaaatggagagagatttggtaatttcaaaaaaaggggtcaatgaagagagaaagacgattggttagtaattggagggggagagacaaaaaccattgaataacacatgaatccctcataagttagtgtttttacattttggtccttttcattttgatgattgattacagttttacccgaaacttctttgtaattcagttatacgcttacttataaacaagttaatcatacggtaatgcaaggtattttagactgctcagatgcataatgtagatggtgcataggaatgatttggggttatgaatgtaacattttaaaatctgatgagaaatatgtgactatgggaaatataaaggggttaaacattggcaaaagccaaaggccatatgtatattaggaggctctttaatttaatggttgatactcgatgcttgcttgctagatgctgacaagattataaagaaataaaaaagaaaggctgtaaaacatttggtctttctttttttgttcatagataagcttcacaatgttcaagagtaatcaaaaactatactaccattgaagattcgactaatgcatgtacaccaactacattcatcattcattgacaatgacataaacgtatcagaacatatatattcatgtatttagtaacacttatatgagattataaggagttttttgataagtgaaatgaatgaattttcacatattattgagcacctgactctgcattctgcaataggcggctagtttttatcagccacataagtagtcttttattatttgaagatatgcacatgaccaacacattatagtgttctttttgcctggcttcgataggtccacaaataatgggtttgatagaaaacaattcttgcataatgtgggggattcgcctagctagacatgaagcatttttttggagtatataaatggggattttagcaatactatgattagtatttggattatgtaatctgtgatacttaaacacattgcctgcatataaatccatatattatttaaaatatatcatttttgatttttgacagaaatcatagagattacggaaacagataaaagcacactccagaaaattagagacaaatattactattcaaaaagattcagatcgctactaagtgagggtcgccaaatcgcgagtcgaaacaccgattttgagtccgcgaaattcggaaatttgcgtggttgccacaataccgaagtactggaatcctcatcgtgaatggaatctctatatgtaatgtttcagtgtagtaaaattcaggtcttagcatttgctttctagatttgtatgtctaaaataagtgttaagcttgaatgtttgataacagtatcgaccataaatctcccatctaagccgataatgtgttttgatcatcattgtgaattttaaatcagtgaaccataagatagcccaattgggcccaaataatgttgtctgaataaagcccattatcaacagtaacggagttcaaagagtgggtaagagatgtgcgacgtcgttcaggagcttctatatcacaaatcttccttcattttctcagtggaagaggagggaagctttcttctgtagatcttcgcttcctctctctatctatctctgttgagaagaagaatcgaaactttgaaatctgtgagaggaggggttcatagttcgattggatttgatg

SEQ ID NO: 30209 - DNA, 3000 bp, Unknown; identical to SEQ ID NO: 26368
  misc_feature (1)..( 3000): 2750-1469P.txt file - cDNA_ID_3027552; gDNA_ID_2214588; Annot_ID_186690

SEQ ID NO: 30210 - DNA, 3003 bp, Unknown; identical to SEQ ID NO: 26052
  misc_feature (1)..( 3003): 2750-1469P.txt file - cDNA_ID_3027558; gDNA_ID_2214588; Annot_ID_186687

SEQ ID NO: 30211 - DNA, 3003 bp, Unknown
  misc_feature (1)..( 3003): 2750-1469P.txt file - cDNA_ID_3027564; gDNA_ID_2214588; Annot_ID_186683
aatgcttgcatgagcgccgtctggagctttgacgcgagtcttacccacgaccctttctttgactctccaacagaggtcgaatccaatgcaaaccactagcttcttcatgtctgtggcaatttctttggttgaaaccattaatgtcatcttatgttattcaatttgtaaatattatgatttatgaaggtgttaggcagagggtgaatattaagaacaccttcaatggggatttctaaacaaataataaaaaaattatatgatttaaatcttacatgaatctcttaaatttgatgaaacctaagccaattgtttcttaactaaaagataattagtcttggtttcaccaaatttaagagacccataattaaaaatattatttatctatatttacattttaattttgtttaagaagggtttttaggtaattcttattgcatatgaaagtagaataggaagatagagaataaaaaaaaactcttatctaaaatttatataagagtctaatgagacacatgtctcttttatattggtttatttttttttctaaaaattaaaatttaattatttagtaaattatattaaaataataatatataggtatttagaagaaaaaattaagagtcctccattgaggatgcatccctaatggtagtttctaaacaaaactcttaatatataataaaaaatgtatattatttaaatattagatgggtttcttaaatttgaaaaaacttaattcaattgttttttagttaaaaaacaattgggctaagtttctttaaatttaaaaaatccttcattaaaaattattatttatctatacttatactttaatttattttaaaaaacctatgttaagaaactcccattagaaatattagaaatggtcttaactcttaagcttagaaaactccattgaaaatgttctaaggacttaatttaaaagccatgaaaggtataattccttttgtaactaataaatatagttaaataataccagtagtagtagtacgtgaagagccgtcggatgcaatctgaatcgcaaaataaggaggaatctacggacaggatcacagtggaaagatgatacagagtagagagatttcttcttcttctttggcagattccagcgaggaaccaattagtaggcctgctgtcaaataatgtgacccacaacttctttgattccttaattacaacttttgattagtaacgcttataatgtctcaccttttactaatcaaagtaattacgaatcagctttccataatcatatcatcgtccaattttattcattactttgctttaggaaactctattcatcttattcctttctaaattgttgattaaagtgatttgaaaaggtaataatctcgtgcatttgttgctaatgtgccaaaatatatttgttttggggttattcaccattttcatgtgaccttgttgtatgttataacttataaccgttgggttttttttataactctttttggtaatattatatatttatatatattaatatacagtagtagtagaaaactaaattatcatcagtttgttgcttttctttaacaaaataaccaattaactaattaaattatattaacattgtttgactgtttgtagtgggtatactagtttactaaataaaatatttttgtcaccagccgtactacaatagcctaatgatacgttaaatttaatcatatttgcgatcattatattgtgagtttttacattctaactaataacaaaaaaatactacctttgtattaaaaggtaggatgttttagctaaaatgcatacacttgaaaaaaataaattgtttttgaaaagaagtattaaataatttaattcaaaaaaattcagccaatgatataaaggctgcataatacaaatggtcataaaatatcaaaatatttaaaatttgcataaaaattggtaaaaagtatatattattttaaaatttttctaaaacatcttataatttgatataagggaagtagtgtttatggaaaatcccgacatatatgtaaccacatttatggaatctccgtctctcaatttccagttagctcacatacacaaattgtatttactcgttgacaaacggtttatatagttgataatgcattagatgtatccataagaaagtcgacaaaataacattgaggcgatcattatagtgtgagtttttatttcctaactaataacaaaaattttaagatagtgataaatcttactctctttgtattaaaatatttttttaaaaaataattatttaatatttaattcaagaaaatttgtcaatgatataaaagattgcataataaaaatgatcataaaatatcaaatgtatttaaaaatttgtaaaacatgatatatattttaaaaaaaaatcctaaaacatcgtatattttgatataaaggaagtaatgtctatgaaaaatcccgacacgtatgtaacaacatttttgagaactcggtctctcgattcgcagttaactcgcatacacaatttatacttactgcttgacggatggtttatatagttgatcatacatacatccatttgaaagagcatgttggtcttaattgcatcaaacattcttatcaacacaaaatgatatacatggcatcagataaaccatcacgaacaaatacaattttgaaaggtaatacacacaaattcactaacactattaaggtaatacacacaaacattcttatcaatttcatgattttctattaaaatgtcattataaaaaaaaaaaaactgaaagaaattggactgaaagagaaataaatttaaccataattgtttggtaaaaatagtaaaatatgccaaaaatgagatttaagaggaaaataaaaagaagaaaaaaaaaacagctgtagtctacatttacatacaagtcgtggactaacagctatactactactaagtactaactctttctctctctaaatatcaaattcaatttaatttttcttctgcaaatg

SEQ ID NO: 30212 - DNA, 3000 bp, Unknown
  misc_feature (1)..( 3000): 2750-1469P.txt file - cDNA_ID_3027568; gDNA_ID_2214588; Annot_ID_186680
ttattcttctatcaaaccgtcaagttgggaaacaaaacaaaactcgcaagtttaacaacgcgtcttctacctcctcctcatcggactatttatctatagtcttcgttagatcaattcctctgttttactcctaagtttcgagatccacatttctctttaacctcatctcatctcttagtcgagatcttcactttctgatgacaatagggtcgtttttctcttctctcttattctggcgcaattctcaggtaacctcaatcgactattctctgttctactcccttttttctttatcattttaaaaatcctaacattgaaaataaagtagttaaatagagtcaacgaaaacattgttaatgaaacagtggtgtgcttagcataacgaatcagacagacaaaaagtgtctggatccgtagagcaaagtgttgtcgtgtctttgacaaagttctttgtttgcctaaaccaatttgttcatccgatagaatgaattgcattccgttgttactatcatccaaaccggagatgtcaagccctaaccctcaagtagtatttcttagagagccattctttgtttgtttagatccaattagaagaaggtttagttgactgtgatgattgtttgtgtttttggtggcaggaccaggaggcgcagagagggaggatgcaggagatagatcttagtgttcacactataaagtcccatggaggaagagtcgcttctaaacacaagcacgattggatcatactcgtcatcttgattgccatcgagataggcttgaacctcatctctcctttctaccgctacgtgggaaaagacatgatgactgacctcaagtaccctttcaaggacaacaccgtacctatctggtctgtccctgtgtacgctgtgcttcttcccatcatagtgttcgtctgcttctacctgaagaggacatgtgtgtacgatctgcaccacagcatcctcgggctgctcttcgccgtcttgataactggtgtcatcactgactccatcaaggtagccaccggacgccctcgtcctaacttctactggcgctgcttccccgacggcaaagagctgtatgatgcgttgggaggtgtggtatgccacggcaaggcagctgaggtcaaggaaggccacaagagcttcccgagcggacacacttcctggtcctttgcggggcttacattcctttccctttacctctctggcaaaatcaaggccttcaacaatgaaggacatgtggcgaaactctgcctcgtgatcttccctctgcttgccgcttgtcttgtggggatatctcgtgtggatgactactggcaccactggcaagatgtcttcgcaggagctctcattggcacccttgtagccgccttctgctaccgtcagttctaccccaacccttaccacgaagaaggatggggtccctacgcctatttcaaggcagctcaagaacgaggagtccctgtgacctcctcccaaaacggagatgccttgagggctatgtctctgcagatggattcaacatctctcgaaaacatggaatctggcacttccaccgctcccagatgatcctcctctcttattatttgattcattatttggtttttcattttgatttggccgtcgtcgtgagattgtgaatggtgtagctacatactgtatgtgtattcaaaactctacttgtaccattacatttttgtaaatccactcttcatgaaattgacgtttttctggtgtccgagaggcttgggtcgctcgaataatctcgtccaatagactaatacggctctagtgaacacggtatttacatgtttgtgatctaaactgaaatcagttatttcttaattcgtaatcattcttgggttaacattttctcttataatctgatggttgaagatggcaaagccattgttagcatagccatagctggttcaatcatccacaacactaaattactcgagctctccacatgcgtaatctctctttctctctatttctcccttcgtttctctcattcttcttcttcttttaatttctgggtagctattattttagtgtagaacaaagtttgacacttgtgcttacgcacatgcgctgccaactatgctgcaggtattaaatcagttctgaaaatattgaagcacaactggaaaccgtttcttttgtgcactcaagatattaaaatggttctctgtttctgaaaatattggaacagaactgaaaactgtgtttttgtcatgctagcgtattgttatattgtgttttattgagcaaatgatgatactagcaattcaaatttcatctcttctctttgttattatgaatttcatgcttgtattggaagacattattttgcaaaaatttgatttttgtttactcaaggacccattgtttcttaaccattggagtagaaatttgttaaagactcttattagtttcttaacttacaaaaagcaaaattttaataaaaaaaaaaaagttaaggatcatggttaaggacctaaccaatggggatggtcttagcttctgatctcactggtctttgttcgattgaatcaatccaagtttcgtaagtggtgatggtaggtaatcggagcagcagcgcatgtaaccatcggcagttgtcgaaagcttgtatagtcacatacctccctcatcgtctcttctcagtgtcgccaggtaaatcttctcaatcgtttcttttgtatattactcatagagtcgtgcgctgtctctccctgagaaggttcaatcgatttcttccgattgatgattgatgtatcataatcagaacaaaggttatatttctgaattggatgtgtctctgaaattatagcggatgttgtatgtatgggaacacaagagaccaatgatgatgctaatgtttgattgtcatcattgattaagtgaactaatcaagcagaaccatgatttgttttactttgttggtgctagtggtttggggctatctctgtttctaattcgtatatatgttatg

SEQ ID NO: 30213 - DNA, 3000 bp, Unknown; identical to SEQ ID NO: 12994
  misc_feature (1)..( 3000): 2750-1469P.txt file - cDNA_ID_3027572; gDNA_ID_2214588; Annot_ID_186678

SEQ ID NO: 30214 - DNA, 3003 bp, Unknown; identical to SEQ ID NO: 26060
  misc_feature (1)..( 3003): 2750-1469P.txt file - cDNA_ID_3027597; gDNA_ID_2214589; Annot_ID_186738

SEQ ID NO: 30215 - DNA, 3003 bp, Unknown; identical to SEQ ID NO: 26059
  misc_feature (1)..( 3003): 2750-1469P.txt file - cDNA_ID_3027601; gDNA_ID_2214589; Annot_ID_186737

SEQ ID NO: 30216 - DNA, 3000 bp, Unknown; identical to SEQ ID NO: 13019
  misc_feature (1)..( 3000): 2750-1469P.txt file - cDNA_ID_3027620; gDNA_ID_2214589; Annot_ID_186723

SEQ ID NO: 30217 - DNA, 3000 bp, Unknown; identical to SEQ ID NO: 13007
  misc_feature (1)..( 3000): 2750-1469P.txt file - cDNA_ID_3027627; gDNA_ID_2214589; Annot_ID_186717

SEQ ID NO: 30218 - DNA, 3003 bp, Unknown; identical to SEQ ID NO: 26064
  misc_feature (1)..( 3003): 2750-1469P.txt file - cDNA_ID_3027641; gDNA_ID_2214590; Annot_ID_186762

SEQ ID NO: 30219 - DNA, 3003 bp, Unknown
  misc_feature (1)..( 3003): 2750-1469P.txt file - cDNA_ID_3027645; gDNA_ID_2214590; Annot_ID_186761
tcttcaaccttcagagaacaaagatgcaatggaaactcttgtcattacgagattatctacgcggacaaaacctattccaagggaatcttggcaaccgagacggtcacgataccttccacttcaggagagccctttgtgatggctgaaacaaaaattggttgtggcctcgacaacacaaacctccagtactcagggtttgcatcgagttcttccggcattgttggtctaaatatgggacctttgtcgcttatatctcagatggacttaccctacccaggtcttatctcttactgcttttctggtcaaggaactagtaagatcaattttggaacaaatgccattgtggcaggagatggaacggtagcagccgatatgtttatcaagaaagataatcctttctattatctaaacctagacgcggtcagcgttgaggacaacctgattgcgacattggggacaccgtttcatgccgaagacgggaacatttttatagactcaggaaccactctcacgtactttccaatgagctactgcaacctagtgagggaggcagtggaacaggttgtgacagcagttaaagtacctgacatgggcagtgacaacttgctttgctactactcggacaccatagatatctttcccgtgatcacaatgcatttttctggcggtgcggatcttgtcttggataagtataatatgtatctcgaaacgattaccggaggaatcttttgtttggctattgggtgtaatgatccgtcaatgcctgctgtctttgggaacagagcgcagaacaattttttggtgggttatgatccttcttcaaatgtgatttctttcagtcccactaattgttctgctttgtggagttgaagaaacaaaccaagagattctcttttctacattttcatggttttaacttcagttttgtttcgatttatttgtactgtcactaaaagcatatgacatagacatgtttaaatgaaaaaatatgcgaatgagttacacaattaatcgaaattcaaatcacaatctgctataatctcaagttttttctggagtttgcaacttgttctatcaaagtcttttataagttcattttttctcaatgcttcttatagataaacatgaccaaagaaagaaatcactaatattgcaaagcacataattttacctagaaatactaagttatgttttggtttagcctctcacagcttgaacggtagcaatcatgtgagccatcacgagagcgtaacgaacagctgtgtgttgtggagtgtagatgtctccaagtccaaactccccaaagttgagatctatgttcacaaacttacccggcaacgaccttttagccagagcttcattccatatctccaagaactcctccatcaccttttgtgccttttccattgatgatataggaagatactccacctgcaagtaacaacacacaaactcaaaattgagattacaagaaacaagacaatcaccaaaagggaacagctccatataccctttaggtgattagattagcattgagactatagggatttaagaaaacaaggattttttcatcatcattgtgattacacgaaacaagactaaagaaacttgtagatgcatagtcaacaatcaacaatgttcaattttcatcatctgtcttaacatcataaacagcatcaaggatcatcactaaaagatattacaagaaactcttttaacaagaaaaatctgtagaaaaacaagattttcatctttaaaattaatcaccactgttcagtgttcatcatatctgtcttaaacaagaaaaagctggaaactttgtttacctccatgacaatgcctctaacattctcagaatgagtaggaacaactttaccaactctcaacctaaaatcaccaagctgatactgaaacccatcaaagtaaagagccactttagatttataagactgaagcttctccataatcaactgaatcgaagaatcagcttccaagacaatcctctgcgtcctgataatgaaatagtacttattcggctgatccgcaagtgaaatccctagaaaatcacgaggaaactccaattgattcgcttggtcttttaacatgggtttgtaatagttgagtgttgctttccatcttccttctttcacaccattgatgctctctacacattgtgttgcttcgtttaggatttggctgcttactgttgatccttggtttggttgccaatgtaaaaccctagaaaaaaacaaaacccaaatacaagaatcggaagagtaatcagaacagaaacgaaaaaaatcgagattttggaaaacgaaattggatcaaagcttaccacttgacgggcattgttgttgagggagaatgacaaaacaaacactgttcgaaactgacacaacaaaaaataaaaaaaacatatgtatatgttatatcaacaaacccaatcgaaattgaggtatgggccgaaggcccaaaacagcttaataaatgtggcccaacacagcttaattaaatactccatgtctcttgattctattaactgttcttaacctggacttcacgtagacgaggaagaagaaccttgaatccgacatttgtttcttcattttaaggtagggttaagtctattttcggttctgggttttcttctctttcaattctcaaacaataactcgcaattttattttcacggatcttttttatttcaaaatcgaattgaaaaaaatggttcttcacaatctagcatatatgaaatttgggaataaagttacgatttttatatataatatggttttaatttcgttgattctatgttttgctactatgattgttaaagtgtcactctcattttcaacttctcggtgattagtgtgtttgtgttcttcaaagattgtaaatttgaatagcttggttttgttttctctaatagactgagatatgttatgatgtgtagctaaacctcttcactggtgaaagcaatttgatgttatggttccaatg

SEQ ID NO: 30220 - DNA, 479 bp, Unknown; identical to SEQ ID NO: 13022
  misc_feature (1)..( 479): 2750-1469P.txt file - cDNA_ID_3027674; gDNA_ID_2214590; Annot_ID_186751

SEQ ID NO: 30221 - DNA, 3000 bp, Unknown; identical to SEQ ID NO: 13034
  misc_feature (1)..( 3000): 2750-1469P.txt file - cDNA_ID_3027702; gDNA_ID_2214591; Annot_ID_186784

SEQ ID NO: 30222 - DNA, 3000 bp, Unknown; identical to SEQ ID NO: 13041
  misc_feature (1)..( 3000): 2750-1469P.txt file - cDNA_ID_3027777; gDNA_ID_2214592; Annot_ID_186801

SEQ ID NO: 30223 - DNA, 3000 bp, Unknown; identical to SEQ ID NO: 13042
  misc_feature (1)..( 3000): 2750-1469P.txt file - cDNA_ID_3027781; gDNA_ID_2214592; Annot_ID_186800

SEQ ID NO: 30224 - DNA, 3003 bp, Unknown
  misc_feature (1)..( 3003): 2750-1469P.txt file - cDNA_ID_3027788; gDNA_ID_2214592; Annot_ID_186797
tacgaaaaatagagagacaaaatctcaagggtaattttgtctattttctcagcaaaaacaagataaagtgcctaaactttgaaaagtgtctaaaacggaaaaacatttcttaaaagtgcctcatagtgtcacattcccttttaattaactattaattttaagattttacgacattaattttataattttgtaatttttaaaattaatgtcatataatctaaaaattaatagttaattgagatggtaaggataaaattgtaattttatttttgttgtgagatcgtgagtatgaaaataataacatttaattgtttgcgtataaaattgcacagttttattacttcatgtctttttcttctaagcaaaaacaattgggtattaaatgtccaaataaaaattaattgaggttttttttggtttttttcgttcttctttagttgatgttttataaaaatgcacacctattaagaaataatataattatataattaattttgcattgaaaattaaaaatatcatgtatttaaaaacaaaaataaaagcttaaaacatcatttataagagaacggaaggagtattaagtgtaatcttttgcattttgttttaaaataagtgtcattttgtcatttcaatgtatatgtttgataataagattttcagttttattcatattatattaatgtataaaccaatagaaaatatataatatattaataaaaagtaacatagataattgaatttttttaaatatatgtgtaacaatcttaaaacacatttctaatgaaacaacatttgcagataaattgttttttatcaaccacatgttgttcaaatcgagtaagataaaagtaaagttacatcaatcttcattatcttggttgactttaaaatattttccaaaaaagatataaacttgtctggcgtatttttacttttggattattttatttctctcagttgtttcatatatggacggagtatataggatttcgcacgtcggtttgtaacttttcacaatgataattattcgcatttagttatcatcatactccatgaaaatgccttgttactccatttacgtatttaaattttattgttccttgtcttgtccaactcctaaataatttctgtcaagaagaatttttttatatatttttgtcataaaaaagagaagagttgtctaatattatatagtaacaagtttagagttttcgtgttcgttgaggacttttcgtttccacattgtcaaatactataataagttagaattgttcttttttatttcttcttctttttattgattttcttgacaaatgggtggatgacaataaggagtgttgagtttttctatttggtagtcgtaagccaataaaaactatataacagtctatatcacttgaattctgactgattaaattcttttaaaacgaattattctctttggaaatatttctccaaaacttattttaatattataccttgactatttgattattcttcccttttattattgacttttctcctgagaagaacaaaaccttgtctgattcggtttgtcaaggtgtaatatatatttttttttttttatcaattctcatatatataatgatgttgagatgtattagtcaagaattttctatactttttaagcaaaatcatgaaggtttctatgaggcttctgagtcatttcttgagcatgttcatatgtgacgtccctgtagccctcatagattaagaccacaaaacttggtctacacaagttttaacaaaagaaatagcatcaaaaactttgtctggtaaacttagatactttgaattctgtcataactatggtctatggtataagttatgagtggtgaataaggttcctcataacttggttaaagaacatttcttaattaggacttgtcgaaaaagttgtaatacttcatacttgtagtaatatacgtactagtgatgacatgctataaaagtcatattggtttaagaatgataacataaccatttgtatcattagttgtctaattttacaagagccatttgtcacataaatatataaggttacgtgtggaatcaaaaactaggtagctaacaagtctttaatacctatatgtatcgttaattcaactgctgtgtgtaggtttgattctgatcatgcgctcgtgtgcatgaaagtaccacacatgcatggaagtcaacgtacaagttgataatatccactaggtccgatctaaaaattatgtcacttcaactctgtggcacggcattgaagtcatcagccaccatgcatcatctattacgaaaccgatttctttggaatctgaatctgaatgttagtcctagtcccactaaaggttgcttcgtcgtaaaagttaaagttttttttttcaagttttttctttctttctattctataatttccaaaagatcagattacatcaaattcagaaatagaaggatagtttaagttcatttcaatgaaagttgttgtagcgtcactatttttttaaaatatccgtttttaacaaatttagctaaatgacatttactataatgtttgttttgtctattatacataattaagaatcttttaaatggaacgcaaggagtattaaatattgggtttctgaccaaaagaaaggatggcattgattactagagatttcaaattctttcaaatgatatctaagtacgtacaaataatatctaagtacgtacaaataataatgtatttttaaaaataatatgctcatatattggtccaacatttaatggacaataagaagacatggtgtgaatatatctgactcactagccgtgcatggattggctgcttcagaaatttctgcactctatccacttgaaggtgacatatatatacacattttaatagtggttattggtacttacttggagtataaatatacgcacatatcagatcagattgtatcattattgtctacatatctttttgaagccgtcataacttgcaagtaaagaatg

SEQ ID NO: 30225 - DNA, 3000 bp, Unknown; identical to SEQ ID NO: 13046
  misc_feature (1)..( 3000): 2750-1469P.txt file - cDNA_ID_3027817; gDNA_ID_2214593; Annot_ID_186818

SEQ ID NO: 30226 - DNA, 3000 bp, Unknown
  misc_feature (1)..( 3000): 2750-1469P.txt file - cDNA_ID_3027844; gDNA_ID_2214594; Annot_ID_186835
atagagagcatgcaatttaaaattacaataaaatagtgatgagaaagtatatcactactgaagtgaatcgatctggttgccgactatatctcgaagtttcactttcacggccaaggaaggttgctttttttctttgacacagtcaatatttgtaaagattatctagaaggttgtaccactaaaatcgaaataatgaataattaggtgggataacaaaattttggattaaactaagtaaaaacaaaaatgttgtgacttatatagttttaaatgataagttgtaaatgttatgggaagagcaatcttttcctaggtaacatattaatgctctttacattacgttaatttttatataatggatgttagaatttagaatttatacgttcacataaccgttaatgtgttttgaaatagaataactatgttatatgaaaaatcaggcaaaaattaaatggaacaaaatatggaacgaacacttttttgatgtgaatgatttaaaagaaatatgacacatcgatatcaaaaacctaaattctttttaaatgatcaacatttggcaattctctacacgaaaaaagttatgaggtttctaggcaattctaaaatattagtctctaagatatatcgctaggagttgtttcttacgtatcgatcacactattaatatataagatccacatacatccctcaatcaattcactatatagaacttcaatctggatattcaattcatgtaaaatttgcccaaatgatgctaaagaattgtgatttttgcgatatgggttgcactgtctatttaacagaaggtaaacggtgcacacacctacacaaaaaacaaaaaaaaaaacaaaaacacacacacacacacaaacacaaacacaaaggtaaacctggtaaaacattcagacaattaaggatgagaaactgttgatttactcgttagctctgtagagattacatagtttatagctctgtaaacaaaatttcctagtctctcttaaactaataaaaggaaacctaattaattcaaaaaaactaaataatgttaacttcttcctccttctacgagacttggcttcacatgtgcaaatcatgttaattatgcacatgatagttacatgatatcttcttctaaccttaaacttaaatatatatactttcaatctttcatataccaagattcgtggctcctctcactcgaataagctctgcctctgcgattatgtgtttcgcttattgaatcacagcatttggtgagaatgcaacaacattattggtgaccgcgcgcgacacttcgtgtctcactacttgttcagacacaaaacaaattactttttcttcaagaaacatagtgcatttaacgaaacggcaaagatagatcacacatttcttcaagatactttttaacctaataatgaaacataaacgtttcattgttcttttcttttgctgagaagttttgggttattttcttttgctgagaagttttgggttatacacatgggcggaggtatattgtccacatggagtcaattaacctgtttgaatttttagatttttttttatttacttgtagttttagaagcaaactttataaaaatagtttaaaatgtgtttattgcccccataaaatttgtttaaaaatagatctctcatcctttgtaagagttgtaacgccaccgtttctacaagtactatatcctcttttagggcccgttggcctattttttttcgataatcggttttctatgtctgagaggctttaaagacttgtttaccgatcctataaatcactatatgatatttcttcatgatttgtgctcactcgcatggttccaacaatcaattttgggaaggtcatatatcatgaaattactccagcccaaacacgctcactgtggagttctctcatataattgaccaatataagtgcaattttattacataaatggccacatcaattattttaaacctttctgcatacactactatattctttaaactgaagtagtacaagagtaatggctagatcccctactgcatatgcctatacattctcttatgccagagacaagaacatttaatatgatttcttcacaaatgccgctcaaaccagcattttctagaatttatgtaagaagttttatcaaatgagtaattgacacttggtaacttattgtttcttcatttctaagaagggtttaaattgcgcacagtagccgttgacccacttttaatttcagattttgacactgtgggctgggcctttcattaagccaaaaactgaccaaaatgcccctgacgaaactgaacccggtttgtacgtacggaccgcgtcgttggaatccaaaagaaccgggttcgtacgtacactgttcatcgacgagaaatgcattaaatgatttctgggtttcggcgaatttgacacttgagattggaattaaaaaaatttaaaattggttgggctcagaagtttttaatgctaaaaagttttgacaagactaaaagtcatgattacctattataatagagattatattgtaagatatttagataatttagattagaattctgggaaaaaaacaaaaatcgaaaaattgtgttacggtgaagaaacgaaaatcgaaattgtgttacggtgaagaatctgaagttttcagttgctgttttacaaagtttgaaggattgaaggggagacaatctgtgttctgggtaagaaattcgtgttaatcctattaattacacttgagaacgtgatgtgaaagtaatgatacgtttttaaaaaattttgggttcataaattgttttgttggagattctttttgtatttgtagatataaatgaaagttctatgttctgttttgttaaatttataagtacataaattgttttgttagagattctttttgtcttcgttgacataaatgaaagccttcaaaaagatctgatttttttgtatttaatgttggtctgacctgaggaatttatgttgcaggtatg

SEQ ID NO: 30227 - DNA, 3000 bp, Unknown; identical to SEQ ID NO: 13050
  misc_feature (1)..( 3000): 2750-1469P.txt file - cDNA_ID_3027879; gDNA_ID_2214594; Annot_ID_186855

SEQ ID NO: 30228 - DNA, 3003 bp, Unknown; identical to SEQ ID NO: 26069
  misc_feature (1)..( 3003): 2750-1469P.txt file - cDNA_ID_3027905; gDNA_ID_2214594; Annot_ID_186847

SEQ ID NO: 30229 - DNA, 1289 bp, Unknown; identical to SEQ ID NO: 13063
  misc_feature (1)..( 1289): 2750-1469P.txt file - cDNA_ID_3027952; gDNA_ID_2214595; Annot_ID_186905

SEQ ID NO: 30230 - DNA, 3003 bp, Unknown
  misc_feature (1)..( 3003): 2750-1469P.txt file - cDNA_ID_3027964; gDNA_ID_2214595; Annot_ID_186898
tcatgctatttatttgatttgtaattcgtaatttgaaccatgtcctgtaattatttggcaggcttttgagccccctatagacttgagtaaacacatgcgcgagccaataacaggagcactgtctatggaggtcagatcaagacttggaaatttatccttttcattttgaaatctttaatttatatgtataaatgcaggagctccaaagggaggaacatcatcatgatcattccctcaagaatgcagagataagactcaataacaagacatgtgaatttgatggaggccacttaaatcatgaccatggcagtgtaatcatgccaactcatatacttttatacctcatatagtgtaattctaattctaatgttgctctcttttctttcttaggtaccattttcatctcatgattggttggattcttcgttacaggcgcatgttcctctggttgatgtaaataaggtatgctttttcacttttactatggttgattatattagttttttttcatcctagcaactcataattgttgtagagctattttagtgtgaacaaagataaaaagaatatatcctcaattctcaaaatgtacatgaaacatgttagaggtgagaggtgacacgcacaccagtacaattgtatatatatatatatatatatatgttggatgttgtgtgtattgctcaccaatctattacttagaaatgtgcatgcatggtttttgttgtattctaacacaggttcgttgggtaataaggaatatagttcgagactggggagcagaggtaatcatatttttgtttgtcatgatggcaaggatgagatcctttctctaatatcatgatcacaactttagtggtatatacaatcttttgacttacagggtcagagagaacgagatgaatgctacaagcctatccttgaagagcttgattccttgtttcctgatcgtcacaaggagaggtacactttctgacttttgagtttctgacctcccatcaatgcattctgagtatttttgttttaccattcaatatctaaatttggtggctttgctgtctaatccataaactctgcttacaaagttaacgtatatgatttgcagcactcgtccagcctgtttagtccctggtgctggacttgggcggctggcccttgaaatttcttgtctaggcatgcagtggagaagcaaactttttttttttgttttttttttgtagctttgatgatagcgaggaattaatataacaactcttgtacattggaacaggtttcagaagccaaggcaatgaagtttcatactacatgatgttatgctcaagttttattcttaattagtaagagtttcttacttttctcttatacatttttaacatcagccagcaacaaacttataagtgtgtttctaagttgcttttggagagtctctaaatttgattgagttaatttcttgattctgttccagttttgagttttgctctactttttttcttttttctttttcataagtacacaattgcctggtgagtggacaatatacccctggatacacactaactgcaattcactctcggatgatgatcaactacgccctatttctattcctgatattcatcctgcaaggtatgccttatcagagagagtactttgcctatggtttggaaatttttgatagctttaaggataaagggactaagcaacttgtattggggatttcatggagctactacaatcatttatttcaatttactaaaaagtttaatgtaaacactctctgagagcagtgcaggagtaacagaaagtttctcaatgtgtcgtggtgattttgttgaagtattcaatgaatcaagtcaagcaggtaagaaatggtgactacttgcttttgtttaagccaatatgtgtatgttttataccaaatacaccactcatcactgagtttcaggaatgtgggatgcagttgtgacttgctttttcattgacacggctcataacatcatcgagtacatcgaaaccatatccaagattttaaaggatggaggagtacgtaatttcctatacgtaccctcctttccaacgtctttgatatttcatcactcgcctatctaaattaatgaatttatccatcaggttttgataaatctaggacctctgttgtatcactttgcagacgagcagggccttgaaaatgtaagcattggaattgtcacacaatctctcgctagataaataaatttgatataacaataatatatcttacttgtttctccttaggaaatgtcgattgagctaagtttggaggatgtaaagagagttgcttcacattatgggtttgagatggaggtaaatctacacaatataatgacaatgacatttgcctgtcagaaataaaacatctcatgatgcatgttcttcctcacttatatgagtggttgtcctaacaatatttgcagaaagaaaaaacaatagaaacaacgtactctacaaacccccggtctatgatgaaggtcagatttttttccatgtctttggatttgtggttgacttttggatccagagatgggtttaatttgtgcatgatgttgtgtgtgtctgttgcagaaccgatactatcctgtcttctggacaatgaggaagaagtgtgctataacaacaacttaaccaaatattcctcaaaactatatatgttttattctgttgcatttgtttttaaggaattaacgggtccaatctaaaacacatactatttcttttgttgttgcaaaataatgaaactgtgtttttcggttgatgtttgaaaaccaagtaaccaacactcaaagctaaacaaaacctttggcctgtgggcacaaagctaaaattttattattttctcggcactactacgcaaataggctaactaaggcccattaaataatatgaggcccaacttgaaaaagactcgtttcttgttactaataacctttccgatgaaatcaactccaaaaccgaagagccaccaccatg

SEQ ID NO: 30231 - DNA, 3003 bp, Unknown
  misc_feature (1)..( 3003): 2750-1469P.txt file - cDNA_ID_3027968; gDNA_ID_2214595; Annot_ID_186897
ggaatagcgccagctgtcaagaagaatattgacggtaactaaacaaaaacaatcttaattagtgcttaattacttatatttttcttaagacatttgggtgaatgatattattatctgggcagattttctagtggagaaatttggattctcagaaagtaaagcttcaagcttaagagttgaactcttcaagacttatggaagtactctcgctggtcttagggtaatttcacttctccattttctaaagaattactagttcattatatatcattgctttctaatttatttatttctttcttataaattgtaggcgttaggtcatgatgttcatcctgatgaatatcacaggtaataatcaatcatcttcaacaactatataaatattttgatctcaggaaagcgatttttgttcttaagcttttttttcttgcaaaatctgttttgtagtttcgtgcacggaaggttaccgtatgggtcgatcgaaccaaacaacaagctacgtaaccttctcaacaaaatcaaacagagaaaaattgtaagtttaatcttttatttattgtggcatgaatttttcttgggtccatacagccaacactaataaatgatcatttgttttttcttgggtccagatatttacgaattcggacaagaatcatgcggtgaaggtcctcaagaaacttggtttagaagattgtttcgaagagatgatttgttttgagacaatgaacccaaatttattcgggtcaacaacccgacccgatgaatacccggttgttctcaagccttcgttgaccgcaatggatatttgcattcgtgtagccaacgttgatcctcgccgaacagtaatattcttatttatttaattatttcttatgataaaactattgtatcatcattacaataagcaaactgtttttgtaaataggtatttttggatgataatatccacaatattaccgcgggtaaatctgtcgggcttcgcacaatcctggtaaatttttgttacatttcacatttattaattccctattttgcgacatttgtatgtgttagtttcaagttttaaaaatttggttacaaaaaggtgggaagagcagaaaagacgaaagatgcggattatgcggtggagacggttactgagatagctacggcggtgccagagatttgggctacggcgacggcgacaggcggatttgacgttggtggtgagaggatcagacggagcaagagtgagctggagggtatggcttcaatagcagccgtcggtgcgtgacgtgatcgagtgggcggatcgtggccgttggataattttaacgtctagtggttgggattgtacaggtggcgttaaaatgttgataatgcatatgtgaatataaataatagtggtggtggacaatattcatcccatgtggacaccaaatgtgaatacgcaatcagataatattatgtatgatgattatgatttcaatatgtgtacatttttattcaactgatttttttaaagtttgattgggattttataattagtctgttcgtttcgtcgccgcgggtacctgcggctgcggtagacgcaactagttgtgtttgtttggttgccgcaactacttgcggcaaaacgcagcgtcaaacgcagttttctgcggttaaaaattttagacgccatttaaatttagcgtcaaagatgaaagagttgcgttatatatcctaaatgacaaaaatatccttattatttttgaaaattcacaaacaaaccaagcgattctcttcttcaacaaacaaaccctaaatcccaattctcttcttcgtttcttctgtcaagatcaccaaacatgcggcagcgtcggtggcaacgatggcggcatcgaaacgaacacaaaacctgcggttgcgacagcggctgcggcaacgttggcggcgacgaaacgaacaacaacctgcggcagtgttaccgttgccgctgccgcaaccgcagccgctgccgcctgcggccactaaacgaacagactaaatatagttttttattagagatatgctgtttataattttatctccaaccaccatgatacatattacagttaaatctctataaattaataaattctttcactcccgaattgggaccattataaaaaataatataaatcgataaattaataagataataactttttgaaaagtcctatgtaaatatatggtctcatcaatatcataaattaataattttataaatatatcaattatatatacattatatgtaagaaattgttttgaaatataattctaatatttttttgcttaaaacttgtatttattcttatttaaaatttagttatagtattttactttatcaaaaacttttgatgttgttttctaaacatgatattattatttacttgtaattgatttttgaaagatattttctataatgaaaaaaatcttatagaaatttttgaaaagttactaaattaagaaaatctctgtataaattaataaatattaatttatcgataaattaaaacatctataaattaataaaattttgcagtctcaacattattaatttataaaggttttactgtatttgataaacgaatcccttgcgatttatatcttgctgtatttctaaatcctaccgaagttttttttctactgtaggaagtaattcacagttttatatctatggtatttataaattctgaatgtctggcattacaacatttaaaacgttcctaacttactccattttcattgtaggagaaataatataacatttatatctatgttagtaatataacattttcaaattgctattgttatattttcaaatttggacctcatgttccttagtaggccaaactttaccccattttcatagtaggagaaataataaaacgtacctttcagaaataatcttacgtcaaaatatatccttaaataacagaaaagtctttttagtcttcgtgtatacgaggaaccataatgatttcatcgtcagagatgatg

SEQ ID NO: 30232 - DNA, 3003 bp, Unknown; identical to SEQ ID NO: 26379
  misc_feature (1)..( 3003): 2750-1469P.txt file - cDNA_ID_3027976; gDNA_ID_2214595; Annot_ID_186895

SEQ ID NO: 30233 - DNA, 3000 bp, Unknown; identical to SEQ ID NO: 13067
  misc_feature (1)..( 3000): 2750-1469P.txt file - cDNA_ID_3027979; gDNA_ID_2214595; Annot_ID_186894

SEQ ID NO: 30234 - DNA, 3000 bp, Unknown; identical to SEQ ID NO: 13076
  misc_feature (1)..( 3000): 2750-1469P.txt file - cDNA_ID_3027983; gDNA_ID_2214595; Annot_ID_186893

SEQ ID NO: 30235 - DNA, 3003 bp, Unknown
  misc_feature (1)..( 3003): 2750-1469P.txt file - cDNA_ID_3027987; gDNA_ID_2214595; Annot_ID_186891
ttcccactggtctacacacgattcctgggaactctgtgtccatcgctacgaatgggaaatcgtctacgacttctcgaatcagagccatctctgattcgagattgtcgttccatacttcacggatttgaatcgaatcgtcttttagaaacagtgacatggtgatgataacgatgatgatgaattcgagtaaataagttaaggagcatctggatctagagcaagatccgatctggtttcatcagatctgcaatagatttaacacaaaacaaatgaatcacttacaaaaaccaaaaccttctgattttacataaatcaatgaaaacagagaaactcgacagatacatagacaaatactaagagagacagctggattcgaaccttgtaatgaagcgaagtaagaaagatgtttctcgagaagacggcgagttgttcaggctagggtttcagaggatgtggtggtttattagagaggaggttataaatcaccgacagattattttttatttttttctctctctcggactgtgcccaaagttgctcctttttttagggtttttgttttttatttacaaacgctgtttttttatcttctcccttgttttatacgcaacgttgatttctttttcttttttttttattattgaggcattttcgattaacctaaaaatcgaaatttttgtctaaccaaagcatgcttaggacagtatatacaattcgcaactgctcttagaacctctggtagtagaactaaatcattttcagacaaaaccaaaaagaattcgtaactcatgtatagaacttacacttcatcttttattccaacaggcattagcccaaacatataaaccccaatattcttttacaattgaaatgcatcaagccgtcaacagatatacacccaatgacccaaactgaacaaaaacaaaaaaagttaaaacagaacagaagcaaatgagggagggagggagagagagagagagagagagagatacacatggtggatgattttcagcttattcccagttgcagactccaaagtttgttttatctactattaaggcaaatgatgatcctgctgaattatttttagaagatgtgaaggggcgagagatattacgtgaaactattgcacaccgcgatcaggcagtcgacttgaagttgccagattcaaatggttagaggattgaaaatttccatcctctaagagaatcaatacttatctctgaggaggatcaactgtcctgacatttgcacctgtcataccttcaattttatctttggtgatctccacaaagtgaccaattacttcgtgaaactgcttaagacccgataacggtagaatgatggaagacctgtcagaacctgccacctatattgagaaatgctttaatgttaaaaccatggtaaatacaagctctcaagagataagccagcaaaagattgttcttccaagattacctcagatatccttaagaaatggcccctgttattgttcccaagatcaaagaagaaccgtttctggtcagctctgattactttagaaacaccagtcattccggtttcttcctggcctggcgagtcaattgttcgatccacattatgttctgaagaagatggctgctgactaccatgtccaggtataaaaccagctccaacatcatcaaccaagtgttcctgtccatcagaaggtttctgtttccaaaacgaagatacaatgagaccagagaacttagttaaaggcttttcaatcaaaggagacgataataccacctgatttggcatcacaaaaagtcctgatgcttcatgtatctcagccaatatattcctgaaagctgcccatccttcatcaggagagcttccagctggaacaataatggtacttcgatttctactaaccgatgcttctgacacctaacaccacaccaaaacccatcagaacattcctacaacttctgatacctcaggataattagtcacataaccaaaatgaaaagaacattcctaaccataagtctagtactccctaaatcttcaattcacatataccaaagaaaaaaaacttcagattcattaagtaaaacagaaaaatttctaccttcaagaagcgtcctcttctgttctcaccgatatcgaagtaaaacacctgaataaagcaacaacagcagaaattaaagagagtggaaaagtcaacgatcgccagaagagagtgatgataaagttgaaaccttggaatcaagctgcaattctttgctaaaaagctcgtgttcctcagaattgacatagtagttgaagagatcaaggaaccaagagatgccggaggaaggaacaatgatggttgacctcgtcgccgacgtcttctccgatatctttagataccttccacgaggattctccttaagatcaaaatagaatagcttatgctccacttgcaacgtcttgctcaccaattccacatcgctccctcctcctcctcctcctcctccggttaccgctcttccgccttcagctcctcctcctccgcctgaattagcttccatttcaatcttcaattgatcgatcggagtagaaaattcggtgaaagaaatctcttcactgaagagttgaaattgacgtctgatctggtaaaggaagtgcgattggaagaatgaggaattggtggaggtgagagattacggagcaataagggtttaataccggaccggatgttttaaaccggatacattgtttggtcggggtccgaacatttctgattggtcggatattcagattaagcaacagattaatttttcttggagtaactgcaattacgtataataattcttttttttaaagttggttttagtttcactgatagtcaaaccgatcggttcaaccttatggtttgattaaagatgtgttataaggagccgatgccacgtacttttactaatctcttttttgtcgaccatttttgtttctgagttgttcttcttgattagctttgtccgcttggaaccaaacatg

SEQ ID NO: 30236 - DNA, 3000 bp, Unknown; identical to SEQ ID NO: 26075
  misc_feature (1)..( 3000): 2750-1469P.txt file - cDNA_ID_3027990; gDNA_ID_2214595; Annot_ID_186890

SEQ ID NO: 30237 - DNA, 3000 bp, Unknown; identical to SEQ ID NO: 13070
  misc_feature (1)..( 3000): 2750-1469P.txt file - cDNA_ID_3028000; gDNA_ID_2214595; Annot_ID_186882

SEQ ID NO: 30238 - DNA, 3003 bp, Unknown
  misc_feature (1)..( 3003): 2750-1469P.txt file - cDNA_ID_3028012; gDNA_ID_2214595; Annot_ID_186877
aaaatataatcaaaagtgagagaaggaggaagaaaagagatgacctttggtaaacggagagagtctttgttcaaaataaacgactacgttgagaaaatggagacggcactctcaagtagagagagagagagagactagagagagtttggctaaaagcctaaacaaaaaaaaaaaaaacatgaaactctttcgtcttttctgatgatatctgtcggtctcgccggttaccggttataggcaatcaaaccgacctcaattggtaaatttactggtccgagtgaaattcagattgcatctggatcggatatgtcattagaataataatttattaactgtgcttacatcattgtttaatgtaataaactattaaattttacaatctgcgaattatgtaacaaccaaactccaaacatttgtactaaattttttatttctctgtatattgatattatgttaaaactttatagataaccaaatttatgattgattgattaaaacgatggtttcctatctaagcaagttagtgataatgtaatctaaagttaattttaggctgtgtgactggctttgatcaattttgtacgtaactttgttttattggataaagatataaactcaaaagtcaaaacacaccaaaatctaaactacaaatatatcattataaaggaattttttttggaagaacttatggaggaatggttttttgcatatctgtctagcttcacattagtctaaattcatctatgatattactaccactttgtaattttcttaacactctatagtctatacgttcattgtatcagtcccctcggcccactttaactatgttgattcaatctcttctcttatggtagattgtctattcatagtggttaaagaaagaaaaaatcattagcatatatctttaaccagtacagtacagtactagagatatatataaacaacaaaatattctcgtatgtgtatttgcagatatttttcgtcaagatcagattcttttccacatattcctattgttcttcattatcgtatgcatacgttgatataccaaaaaagctttgtgcacatgtttactataaatgcgacattctcacgctaattttcaatatcaacaattctccccacgtattcatatcgcttaactagttagtaggaaataaaatgaagagctctactacctctatgcagttaattccaacacttttcttcttaaccattcttcttgcttcaccaggtatgcaaatctagtttctcacaaactcacaatattaaaaagttactaaaacatataatatacgcttatattttaatatttaatgcatggggttttacgcatctacttgaataatttaatatttgatgatattgaagaataagtcaattattgattgtttatatgattataattatattattattcaattatttattgaataatgataatgtattatattatagatatagagatggttgaaggacaacaaatgtgtgaagcaaagagcttggactggaagggtatgtgtctgaaatggaggaattgtcgccaagtatgcattagcgaaggtttcactgacggtcgttgcaaaggattcacccgcaaatgcatttgtagcaaaccttgttttgtccttcctaattaagttcttgtttctcattattttgatattaaaattttaaaataataacacaattcattattgattgattaaaaagattatggttttttaatttatatgtaagctgatataaaaaaaaaactcagttttaagcaatgattttctctaagtttgttctaaaatatcatttttcaatacatgaaatactaaaaaagaaagtttggattcatttcctacacaaatttatggttttataaatgtacaaagaatattgaactaatatttcatgttccgattatatataagttcccattttcaatcgatgagattaataaagaaactttctggagtatatatttaacattttcgattttatattatgaagctaaagtatgtacagtatgttggtgaaaaaacatggatcgttaaataaaaaaacatattaaggaggagaacgaccgagcatcttctaaagaagattaaagcataagaacattggaataaggaaggtgaagtattgtcgtggacattcctgagtgggaagactcaccattacatacataattaattagtaacaaagacattggcgcctgtcttgttcccgttgcttttccccatctttatctccaattctctctctctctgtctctcttgttctactactttggggaagatgatagcttcttcttcttctccctccatcacttgttcttgattctacttgtggtcctccgcttctcttttcaggtgattggtcattgatctctggtttttttattttgcaaacttatgggttttgcttttcgtttttttctctgtcttactaatccgaatctgattcaaagtttacaactttaactaggggtttttctcactgaactcttatgagtgagacatagattcgtcttctaggtctgtttccggagggaattaattaataatagtatcaattttcgattatttttctttggttgattctctatcgaagattgtcgatgcttccaaagttgaagcctttgttacttctgaactcaggattgtcttgtgcctcgctgtagattatcgaagatagttgtggttctgggtaattagcttttggtgataaaggtttgtgctttacacatcttctgctactttttgggtatggcctaactaaaaaaagtaacttttagtatctctttccgatgatatcgattttataggagtgaatctctcatcttgcttcggagtgaaacaaatcatgtttttgttttgtcggaatgcttatctgattgcagtgcatatagttgtcaaagtttgttcttgatggtgatgtagaagctcttttatttgacatatttggttctttgtttagtttatttttagtaggatctagaagatcatg

SEQ ID NO: 30239 - DNA, 475 bp, Unknown; identical to SEQ ID NO: 13068
  misc_feature (1)..( 475): 2750-1469P.txt file - cDNA_ID_3028020; gDNA_ID_2214595; Annot_ID_186874

SEQ ID NO: 30240 - DNA, 3000 bp, Unknown; identical to SEQ ID NO: 13088
  misc_feature (1)..( 3000): 2750-1469P.txt file - cDNA_ID_3028027; gDNA_ID_2214596; Annot_ID_186925

SEQ ID NO: 30241 - DNA, 3003 bp, Unknown; identical to SEQ ID NO: 26082
  misc_feature (1)..( 3003): 2750-1469P.txt file - cDNA_ID_3028035; gDNA_ID_2214596; Annot_ID_186922

SEQ ID NO: 30242 - DNA, 3003 bp, Unknown
  misc_feature (1)..( 3003): 2750-1469P.txt file - cDNA_ID_3028040; gDNA_ID_2214597; Annot_ID_186944
cttaaccttcaattattccagaaaaagtagtcaaagaaacataggtcgaataattaaatgaaaagatattttgaaaattcttataacaaatataatgctggaaacaaagttgatagagttatttaaggataagttttaagggctgcaagctcttcatccatatttttctggttattatcgatgagttaaatttttatttgtgggagtattgaaaacgtatattcgaagggaaaaaatgattttgtgagctaaatttgttgccgtctacagcatcccagcgtactgtgtgagccgacatgtagaatttacaatttaaaactgttattttaataagtagttctcttacgttcaatatatttttaaatataaaaataaaataaatcatctaagagccaatttcacgaaagaaaaacaacaaaaagtttatcttaaaagagaattaatttcattctctattttagatgagtgttagagtatatatgtatatagcgtcatacatctagactaagttaaatattggtgttatttggtagggcttaagatatagtgtttaacatttagatgaagttaattatataggtttgggtttataaagtaggaactagggtttagtgttataaattcagatgaatttgaataactaatttgggtttataaggtagggttagggtttaaggaataactgatggaagcacatacaataatgtaaacttatatctttagttcatatctaactaaaaatatttgaacaatttgaaacctcattcgattatatttaaaattatttatgacttaaagttcattgtaattgtgtttatttggtatagtgtttaacatttagataaagttaaatataggttcggatttataaggtattaggtaggatttagtattattcatgtagacgaattgaaataactaatctgggtttataaggtacaggttagggtttaaggtttagaagtctcatgaatattaaaaaggggtgctaagtaatttgcaaggattaggcacttatggggcttggagttattcctcttctcctccgttgggaataagtttttttagtgaaagttgtccagaaaacgagagggaagaactcaactatttctcaatttgaagaagcttccggtggatcctttttttgttcttgagacctttgaagttaatcagtaggggtcctaggcgctagaatgtctagattgaaaaagtagcatatataagcttttttatttcaagagagtaaagtttaccctgttttagtgtaccaaaagataagagactgtgtttttgtgtgtaagaaatctcaagagacaagctaaagtagtcgaaactttgtgtaaaaccaattaagagagttacaagttctttataagattttttgatgaatttataagctcattgttgctgaattttttaaatttttttagttacttattattttgaagttagattttgatattgtcaaaagtatttatgggtccggcgcataggcagacacaaagaagattaaaggaggtcagctggtctttttagaattctacatttgcattgtaaccctttaaaattcatgatattatttatatatatttttttatttttactcttttaaaattacaaattcatatgtaaaccttctaagttttattgtatttttcttctactttgtggtttgacactatttctaacatgttttttactttttttgtttgattcacccataaacattgaaccatattttatctattttttaaatgaagttttttgagttttaaattttttggttacttattatttcgaagttatattttgatactttataaattatttatgggtccgccgcataggcagacccaaaaaagattaaagcaggtcaactggtctctctagaattttatattcgcattgtaacccattaaaatttatgatattatttatatttctattgtttttacctttaaaatcactaattcttatgtaaacatttaaagatttatcgtgtttttcttctactttgtgttttgatactatttctttgttttcaacttttttgtttgattcacccataaatattgaaccaaattttggtgtttttaaaagaaatgaagatttttttagttttttaattacttattattcaagttataatttgatcctataaaaagtattttggatccttgacttgaaatgtaaaattaacgggtacaatgtgatagttaatatcctaaacattatatgacacatgcctttgatacgggtaaatagatataaatataggtgttgttatatccatataatatatattttttaatttcgtaaatgtctctaacttatcactctaaattatgattgattcaagaagatactcattttaaatttttttggtcgaatttcaaaaattttggtatgcttgatctttaaaatttaaatttaattttaaaaaaacaaattttggtcgcgcaaggcgcgggtggctcacttagtctcatattattccttcacgaatctggacttattacattttcgtttataaaaggaacgttaatacccggttcattccagtttacagactcaatcatagttattctaaaccatactctaataaaaaccaaattagtcaaactgacccaaatcagaaacaaaacgaaccataaataaatcgaaatgcacatcactagcaacttttctataaaagtgaaagtgggtggacagacacttgggtagaaaacccaagagatgagtggcttccacgtcatcctttacagtgatcctcgcacgcatgtataacacttatatcagtcaaagtcattattttaatcaatggaccatttccaacttaactttaactttaatgatgccagctttgtgtcacaccacttactaataaacgtagaaatatatccaaaaatgaactaaaacactactctggaaatattaaatatagaaaaccaaagaattggaacagttcatcgggaagggttttgggaccctagagaatccatg

SEQ ID NO: 30243 - DNA, 3000 bp, Unknown; identical to SEQ ID NO: 13094
  misc_feature (1)..( 3000): 2750-1469P.txt file - cDNA_ID_3028047; gDNA_ID_2214597; Annot_ID_186941

SEQ ID NO: 30244 - DNA, 3003 bp, Unknown
  misc_feature (1)..( 3003): 2750-1469P.txt file - cDNA_ID_3028084; gDNA_ID_2214598; Annot_ID_186954
ccagcgaaagaaaggaatccattattaatctgctaattatgtatgtattttcataattatttctctgcaggtaattttagcctctctggaagatggagtcagagaagggagggcattgctgcatgattggctagtaattctaacagcacaatacaacgatgcctttaaccttgtccaatacaaaaacggaaataagtcaatgagttctcagattgatatcacgttttcacaatgtcctcaacttgagcctttgcctcgtttagtctttgccttactccgtaatccccttctccggtttcatgaagaaggtgttcatcctgattacagaatctacttgcaatgccttttcaggtaaccatcccaatgaactactaataaccaacctagagtcagcgtgaacaatattgtatatttagtgtattttttcgatcgtggatttatttggaaaaaataccttggtatctcatgtaaacagaccacaagcaaggctttagtctctaaatttcgtgtttgtgttcttctgttttgttttccttaaaactgcagtgtgttggacccgagctctcttcattgcggcatttacccagcactaatgtcatattcaacaccggatacactggcatatccgcgtcattcgttgagccgtgcagcattgataacaagtggtagtccgatatttttcctagatgcatataccactttgatagtcttctactcatcaacagcagacccgtcaatacctttccctccacctcaagactgtaagttttctcaccaaatgaaatccagttcaaccacctttagatctttgagactatgttgattcgaaaacttatatcttacaggtttattgaggcagaccataaataaagtgaagcaagaaaggagcatcacaccaaaactagtgtttatccgaggaggacgagacgatgctactgtctttgagaactatcttatagaagaacaagatgtggacggtaatggttttgctagcgccatgggtttcgtgtctttcctcgatgatatttcgcagcgtgtcactgaatacatgaagtgaaagccaaatgaccctctagtttattatacatccaaactcaaaattttcaactgtgtcagagttttactcttcttgttgtaacatttgctttagactagcatcccaacttttttgctctcttaatcaaaatgaataattaagctaaaattttgttgcaaaacttcattttctaaactttgacttacatatttggtaacactagagccaaagagcaaaaagatatgttagtctattacatgctcatggccacaaccactgcttcaagcttacaagctaatctccaacataaacctgaaaacatgttcttagcaaaaatataaccttgagttcattcatcttcttcatcactctctacctcttcaccacttccacttacgctcccgtcctcgttctcattatcttcaccaaccccgctcccattttcttccatgctatggtcctcattcccgctctcttcgctctcattcccattctcttccatgctgttttcctcatcctccttctcgttctcctcatcattcccattctcttccgtattttcatcgtcgttctcctcatcattcccattctcttctgtattttcatcgtcattctcatcttcctcatcgtttccattctcatcctcctcatcgtttccattctcttcttccgtgttgtcattctcagtctcctcgtcattcctcttagtttcctcatctattttgcttttccttgcacccttttgcgtagatggttcttcctgtttcctcttcttcgtctctttgggcttcgaagcagttccacttgaagatttcaaagcagctccaccagcaggatacgaagcagctgcagcacccgcctttttccccgcattcttcttcttaaaatctgaaaaccagtcatgtggattacactaggattgacatcataagctcaaagtgcacacacctaggccagtgtccataacaagacaaatcacaacctaagccatttctactaacactccatgaaagtaacaacagatagtgacaataggatcttcatccgaacaaaacacttaccttcaagagaagatttaagcggctccaaaaattctgaaaaatccatttcttctaatgccttaaacacatcatcagccttcatagtttgtcttcttgcatctttacaaaaatcatttgccctatatcattcacccccaaattaaactaaatccatcaattcgatcgatcacaattcacaaacactaacattcatcaattgaatcacattaacataaacccaaacttggaacattccaaatcattcactatcatagtgcagaaattcgaaaaaaagttagggtttgtgaagtgtacatacgtggcggagaggtagtggatgaagatcctcgcactctctgagaatgcgagcaaagcttccttgtgaatactgacgtcataatccggcgaacactccgacagcttcttcttcaccacccggcgcacaatagctagcggcagctcgtccaccaccactttctccgactccattcttctctcctctctctcagtcgccgtctttcccgcctttatgttaataatacaacaaaacacatcggcccagtaagctgatcagcctattaaaatatttaaaagcccatattcaagtttataagcactaaagagttatgaccacgccgctcaatattacccgttggattgattgacaaaatcctagccgtcaaatcgtactagcaaatcggcccattattcaaattgataagcactaaagagttatgagcacgttgtcaatctcaccgttggataacctttattaaatcttcaccgtccaatcgtaatactaataaattcgatcaaaacacgaataagaatcggagtcgtcttcaacctctggaatttgagacatcttcgaataaccagattctccgaattcgagccatttctaagaatttcatactctgattaatg

SEQ ID NO: 30245 - DNA, 3000 bp, Unknown
  misc_feature (1)..( 3000): 2750-1469P.txt file - cDNA_ID_3028087; gDNA_ID_2214598; Annot_ID_186951
ccaagaatcagaactaacatgtcttggggaagagttgaatcatcagtgcttgaatacaaaaacagtgaaccgccactttcaatgctaaggaacttcagggatgctaaatctgtgtactcatttgtaactgcaaataaatctacacatacacctgattggacagcaatggtggcctataaaagagccgttagatctaagctcaaagaatatatccattccggagacagaaaatcttgaaataagacttactaggtctttgtagaatggtgtttgttcaggaagtagagcacgatcagcatctacccttttacttgcatattgttcaccatatctacttgtatccaattgtccacgtccataatcaggaggaccagataggaaagcaaacaccctagctgcacttatatcaagtcaataaaacaataccaactggccactacgactatgttgaaacatatagagtatgggcatgctaaataatttcacatacctaatgcaaatgtattcccaaattcagatcctagatagttgaatagagcttccatagctgtaccaaagcccctaccacccatcaacacactatccatcccttgacctgctccagctgatctctcccaagaagtaattggtctgagtgtctcaagtgcagcagcaatacgatccttgcaagtttctacctgcaggaagtacagaaagagaacttagtctgtcaacaggtattccaagccatgtgatccgacaatcaatttgaatgaccaaggaagtaggaaacaggaaacaagatgttaaaaaatgaccataccggagccaaaaattgtaacaagggcatgacatcctcaagttctagcgataagctgctctccccatcagggggaatgaatacattctttacaactggtataggtccttgaacatcatacagtcctattttgtgactgaacgtaacaagaccaaaaagagcccctggacttagagctgcatatacgaaaaaacgagagaattgttttcctcaggacacagtcacacagaagaaaaagtaaatccttgctttaaatttggtatgaaacgaccttccagagcggctagcaatgcactttttgtaagctccaaaaattcctcagaagctgcagataacaaaaataatcatgagcaaaaagtgcaacatttgaacaaaattcgaaacaaatttactgctaccacaccctatctccaaagtcatgacaaaatcacaacataagcaagccaaaaatcgataagaacaacaaaaaagcatacaaacccaagctagaatcataatccatagcaaaatgacacacacattgctttcaaaattcacaatccaaagttcactaacacacaattcaagtacaatctacactgatcacaatgagcttcgaacacaatatagaagaaataagccttacaagagatatcaatcgccgcaacatacacaggtcgtgcttgcgtcatctcttcctccgatccatccactagaaaaacaaacaattaatcagaaattagaaccaattccaacaaaaaaaacaaaagaatcagtatagagatgacgtaagacatacgaggcatctcaagatcaatgaaggaggaagtcatttcaggtatagagtgaggattagagtaacgagcaatagcatcagaaggaagtccattgagagttccacaaagcgagcaattccaagcccattgatcaagctcacaataggtattgaagtaagcgtagcagttttcgcaacgaggaagaagatgaccgttagatccgcacgctggtccgattccgttctcgtctttggccgcgaatggtgttactgtcagtccccaaggaagtcctgacgcctcttgagcgtctgaatcgatcggaaaacgcgacaccgttgctctcactgccattgtttcagatcagatccttccaaatgtgaaaattttgattctggttttaaggttttcggagatttggtgaaattggatgagcacggtggaaattaggcgcacgttagcttttccagtaaaattcgtctccagcgcacgttagcttttgtgaacgtcttttttttttggaagtttttttttccaacatcaaagaggccaatgatttaaaggtggaagtagtgatggtactacatatgtataaacatggagtgatgcaacaactcaagtataagaccatcatcgcgaagattaaagacctgaggaaattcactatattttgttcttctagagagctcgaacttaaaagatatattatactctatgtttactcgggggataacgtcaatatggtgtcaatgtagacatcaaagagtttgaagatcaagtacaagactcctcaattaagtatcttgttggatcactgaatattgttataccttctagttttctaggtaagagattgtttagtcgaatacagattttattgatgaagaaaagaaagtgattatgtattgtgggagatgcgaggatttcacggagaacatgatgtacattattggaaggcatggttgcagaaaattcgattattgtacaaaccaattgaaatattgtccctggtttctcttcagttattatgtctctggtttctcttcagttattatgttctaagtgattatgttccaagtttagttattttaaatccaccaatgtaacttttacccaccaacacttattttgtatcaacttgtttatgtcttgtgcatatagtagataagtgtagaagaatctaaaataagaccatacaaggattaggatccctcattcataaaacatctaaaatgttccaactcaatttggggttttacgtctgcgtttgcgtttgcgtttgcgtttgtgaacgcctttattcgattttggaaaagaaaaaatgttctgttctattttgttctctctgctagtcacagtcaaatgagtcagctaccttatattcgattttgagcgtccttaaattccttcactgtgagaaaaaacacagagaaagagagagaaacaatg

SEQ ID NO: 30246 - DNA, 380 bp, Unknown; identical to SEQ ID NO: 13116
  misc_feature (1)..( 380): 2750-1469P.txt file - cDNA_ID_3028109; gDNA_ID_2214599; Annot_ID_186997

SEQ ID NO: 30247 - DNA, 3000 bp, Unknown; identical to SEQ ID NO: 26101
  misc_feature (1)..( 3000): 2750-1469P.txt file - cDNA_ID_3028148; gDNA_ID_2214599; Annot_ID_186994

SEQ ID NO: 30248 - DNA, 3000 bp, Unknown; identical to SEQ ID NO: 13120
  misc_feature (1)..( 3000): 2750-1469P.txt file - cDNA_ID_3028155; gDNA_ID_2214599; Annot_ID_186987

SEQ ID NO: 30249 - DNA, 3000 bp, Unknown; identical to SEQ ID NO: 26386
  misc_feature (1)..( 3000): 2750-1469P.txt file - cDNA_ID_3028159; gDNA_ID_2214599; Annot_ID_186986

SEQ ID NO: 30250 - DNA, 3000 bp, Unknown; identical to SEQ ID NO: 13108
  misc_feature (1)..( 3000): 2750-1469P.txt file - cDNA_ID_3028162; gDNA_ID_2214599; Annot_ID_186985

SEQ ID NO: 30251 - DNA, 3003 bp, Unknown
  misc_feature (1)..( 3003): 2750-1469P.txt file - cDNA_ID_3028180; gDNA_ID_2214599; Annot_ID_186979
gctgctgtgtccaatggagacccaatctcctggcagttcagctgctgtctgttcccctcccagtggagcaaacgatccaaaatgtctgtacctgaatggctggaaccgatgtcgaccctctcctctgaacctcaatggtccctctggcttcttctcacatttctccattttgttgaagcactttgcaaggtacttcccttgttgtgatgcaacctgtataagaatcaaaacatcaaaatctgtgtggtggattgatttcatcttgttttgatctataacaagcttacctgtgcagttgctggaaggttcttcatctgtgaatcaacctcagagagagcttgcttaaacttttcgatattcacttgtgtgtcctcaccatttgcactcttgagcaagtttgcaatgttcttcagcttattcttcttcaagtagagctccacctgagggtacctctggcaaatgtctttaaccacactattgaaatctttcttcttcaaagttcctgtgtttcccttgtctgctttgttgaaaatcgcagctatatcttcctgtttgttcaacaacatcaagacaaaacagaaggttaaagattcattcatcaactgagatgtgacacaaaggaacaatgtcaagagagatgataccatgactctgcgttggttgatcgttgcagtgtcacctaaagcatagacaccgtcacatccctctactctaagccattcgtcggtagccaagacacgtctctgtccctgtaaccatactcaatctagttaggtgggacactagcaaatgatttggttagtcaaatgatttcttcatgtgatcaagtgtaatctaacctgaccaatctgctgcataaagtctttgatgacaggacgtgaaccaattcctgttgaccacacaaccataccataaggttcggagacaatcttgccagtttctctttcctttgtggatatctcatcagcagtcactcccacaaccattgaacctgtcttcagatcaataccatctcgctggaacttttcctcagcaaaagcagtgattctcttgtcaaacctgaagtagaattgaaccaacattggaaaagcagtagatttagccaaagttaatgaagcttgatgggtggaacttacatgttgagaatgtggtcgcctgcttcaagaagagtgatttttgtgaactcttggacctttgggtaaatcttagccacatcctggactaggaaatcatgaagctctgcagagaactcgactccagttggtcctccaccaaccacaacgaaatgcagaatctttttcctctcttcttcagttagattcggaagagaggctctctcgaaacagtcgatgactgaatgacgaatgtttagagcatcctctgcttctttgaggaaataggcatgttcctcaactccaggggtgttgaatgtgttaggcttagcaccaacagctaagatgagaatgtcataatccatgtcaaactctgttgtgcccttaagacttgacccttccttggaccggcagtggattttcttgttcgatgcatcaatcttgacacactctgcttctttgtactcaaatcctttcttgcgcataagaccacgaatgggttcaacaatgctacgggcttcgacagtaccattggtgacacttggcaagagaggagtgaagaggaaaaagttacgaggagagacaacttgaacatcatagttagggttgttcaagtaactcaagaagctgtagccgctccatccactgccaagaacgaccaccttcttcttccttattgggttgccatctgagtcaagagtagcgtctgcgtgtaatatacgtttcaatggattcgagtctgaatacaccagtacaccaccaccaccactggacaacaatacataaaaagacacaaaccaaaataattgttagacccacgttacttaaaaaaaacatagatctgagtcgaaaaaggtatgaagcttatagagatggtatgcattatatcatgcatcacagctagggaagaggccaaaagaggacaagcgaaaaattcggacacgtgcataggagtggtcaaaaacatcacaagactaaaaatactaagaaaacagtcaaagcatctataaagagaattggaaacaaaagagttatatagattctacagctaaaagaagaataagaagaagaagaagaagaagaagaagtgtagaatggtgaaggagatctaaaggagaataaggagagacctgaaagtgctgagaagaagaatcttggaagtagaagggtaagccttgaataagctagaagctctctggtaaaagctatggaaactcatgttgatgatttctcaaacctcagatccaaaagaaaacaaagctgagagctttggaagagaggctgcgaatgtgaaagaatatgcaatatggaaactatcaaagctactttagggtacgtgagagagaggtcggcgacacacaaaacaaaatttaaagaaaaaagaaaaaaagaaaagacagtgaggtatttaggaaattggagtaacgcccaagtaaatttaggtatattcttttttttttttttttaaagtaaataaacagcagatttgtttagggtttgactttctctcaaaactcgagactttaagcgacattatgttccgcgttccctggagattttttattattatatatatttggaattcgaacaactgttggattcgattttgattttcatttctgattttatttggaatactgtatatgataaagctaataagaagaatggaataaatacctcattcacttctatacatgcatgttacaattcataaaattcataactaaactttttatgttatatatgcatgaagactatgagattgtgcctttacaaactcttatcgattacaaaaacgatattgaggtaagtgcttttgaagatattaatagtttttaacaagaaaactattagtttgatgtctttaattaaggttcaatttatgaaaatg

SEQ ID NO: 30252 - DNA, 3000 bp, Unknown; identical to SEQ ID NO: 13106
  misc_feature (1)..( 3000): 2750-1469P.txt file - cDNA_ID_3028184; gDNA_ID_2214599; Annot_ID_135520

SEQ ID NO: 30253 - DNA, 3000 bp, Unknown; identical to SEQ ID NO: 13112
  misc_feature (1)..( 3000): 2750-1469P.txt file - cDNA_ID_3028184; gDNA_ID_2214599; Annot_ID_186977

SEQ ID NO: 30254 - DNA, 3000 bp, Unknown; identical to SEQ ID NO: 13114
  misc_feature (1)..( 3000): 2750-1469P.txt file - cDNA_ID_3028196; gDNA_ID_2214599; Annot_ID_186971

SEQ ID NO: 30255 - DNA, 3003 bp, Unknown; identical to SEQ ID NO: 26092
  misc_feature (1)..( 3003): 2750-1469P.txt file - cDNA_ID_3028206; gDNA_ID_2214599; Annot_ID_186964

SEQ ID NO: 30256 - DNA, 3003 bp, Unknown; identical to SEQ ID NO: 26387
  misc_feature (1)..( 3003): 2750-1469P.txt file - cDNA_ID_3028243; gDNA_ID_2214600; Annot_ID_187045

SEQ ID NO: 30257 - DNA, 3000 bp, Unknown; identical to SEQ ID NO: 13138
  misc_feature (1)..( 3000): 2750-1469P.txt file - cDNA_ID_3028259; gDNA_ID_2214600; Annot_ID_187041

SEQ ID NO: 30258 - DNA, 3003 bp, Unknown; identical to SEQ ID NO: 26388
  misc_feature (1)..( 3003): 2750-1469P.txt file - cDNA_ID_3028267; gDNA_ID_2214600; Annot_ID_187036

SEQ ID NO: 30259 - DNA, 3003 bp, Unknown; identical to SEQ ID NO: 26391
  misc_feature (1)..( 3003): 2750-1469P.txt file - cDNA_ID_3028275; gDNA_ID_2214600; Annot_ID_187029

SEQ ID NO: 30260 - DNA, 3003 bp, Unknown
  misc_feature (1)..( 3003): 2750-1469P.txt file - cDNA_ID_3028290; gDNA_ID_2214600; Annot_ID_187022
tgttctgttttcttttgattttcttcttcatcctgtaaaacctagaattttgtttcttcaaccaaaaatgaacagagaagtctctgagagaattcatattttgttcttccccttcatggctcaaggccacatgattccaattttggacatggccaagcttttctcgaggagaggagccaagtcaacccttctcacaaccccaatcaacgctaagatcttcgagaaacctattgaagcattcaaaaatcaaaaccctgatctcgaaatcggaatcaagatcttcaatttcccttgtgtagagcttggattgcctgaaggatgcgagaacgctgactttatcaactcataccaaaaatctgactcaggtgacttgttcttgaagtttcttttctctaccaagtatatgaaacaacagttggagagtttcattgaaacaaccaaaccaagtgctcttgttgccgatatgttcttcccttgggcgacagaatctgctgagaagctcggtgtaccaagacttgtgttccacggtacatctttcttttctttgtgttgttcgtataacatgaggattcataagccacacaagaaagtcgctacgagttctactccttttgtaatccctggtctcccaggagacatagttattacagaagaccaagccaatgttgccaaagaagaaacgccaatgggaaagtttatgaaagaggttagggaatcagagaccaatagctttggtgtattggttaatagcttctacgagctggaatcagcttatgctgatttttatcgtagttttgtggcgaaaagagcttggcatatcggtccgctttcgctatctaacagagagttaggagagaaagccagaagagggaaaaaggctaacattgatgagcaagaatgcctaaaatggctggactctaagacacctggttcagtagtttacttgtcctttgggagcggaactaatttcaccaacgaccagctgttagagatcgcttttggtcttgaaggttctggacaaagtttcatctgggtggttaggaaaaatgaaaaccaaggtaaattgtttctccccagccattattaaccaacatagtaatgttaatatttgtgtatatattcgtattgccaaatatgctctgataccatggcaagtaatagattggctcatgtattttatttgtgatcatgtagaattttcttaacagttatgacttggtgttggtatggttgggacaggtgacaatgaagagtggttgcctgaagggtttaaagagaggacaacagggaaagggctaataatacctggatgggcgccgcaagtgctgatacttgaccataaagcaattggaggatttgtgactcattgcggatggaactcggctatagagggcattgccgcggggctgcctatggtaacatggccaatgggggcagaacagttctacaatgagaagctattgacaaaagtgttgagaataggagtgaacgttggagctaccgagttggtgaaaaaaggaaagttgattagtagagcacaagtggagaaggcagtaagggaagtgattggtggtgagaaggcagaggaaaggcggctatgggctaagaagctgggcgagatggctaaagccgctgtggaagaaggagggtcctcttataatgatgtgaacaagtttatggaagagctgaatggtagaaagtagaggaagagaatatgtttaatgttctgagatagattattgactttgtgttcctctttggagttgttctttatgtcatcttagcttttgctactgtttagtaagagaaagtccattgtgtgtttctatataataaagaatagacctgaagataggcattttcaagtttctgctttaagataccaaatcttcgttgtgcatactttttacttcttgtgatcttactatgtgatttatatggcatggattatataggtcggattttctttgaattttaagtatataaatttgaagtaacaaagtatgtgtagtaatgatgcgatgaaaaattggtaatgaatctagggcctaaactagtatagtttcaggtttattccaccaaactcttagcgtatgtcacttggatccaccaaacttgatccaagcgttttacaaaattgtataccgagctaaaaataaaacattctttgttgtttccacaaaccttattttctaacatagcctacatgtctttctccttaagcactcattcttttggcctctcgactctttgaaaatctctcacattaagacttaatgttacccaaacctaattaaactactcgagaaccccatgttcgtgtccatgagaattctcactcaagtcttccctttagccacttacaaaactacttgtagaactatggctatgaatgatgacataactcgcacccaaaaccgcatcgtaacagtgttgtaatagtatcaaaatctttacatatacatatatatctatgtatttttgttactatttaaaccgcaccgcacttctcccacaccacaaaacgcagtcactattcggacaatatgttttaaaaacgctattttgccattccccataggctcatggctttaaatgcaaagccttcgaaatttatggctcatagcttgcacaatactcatcgctaagtgagaagtcaaagtttgcttctacgagaaacagaacacatgtgctgactcgattcccggtttgtagccaaccaaagatgacgaaccagaatacggcaacacaaaagtaaaatatgacgtatgcaaacacgtaagtgatcttcgttaattaattttttatctgatcttcctccactgtcttcttttaagtgcacacgtgcgtgtatatatctcgatatggccgaaactggaagaaacaattcagacaaagtcccaagctaagaaaagagactctctttgttttgtctggcagaatattttccattcttgttctgttttcttttcatttttcttcttaatcctaaaaccaaacatg

SEQ ID NO: 30261 - DNA, 3000 bp, Unknown
  misc_feature (1)..( 3000): 2750-1469P.txt file - cDNA_ID_3028372; gDNA_ID_2214602; Annot_ID_135579
ttagctaatgtcatcaacttattgactccaaggcaaatcatgatcgtatttgttttagttgtgagatgccaaacgagttgggtactttcccatgtgtctccattgactcttttcacaatcatttccattattataagagcttttgataattggtttctatttaaccatcgacgaataatttggtcagtctcgtctagtgtccaattgatagacatatcttagcatttatgattacaacgagatagatcttgacctctatattaaaattcatcattcatgtatattacgactaaattgatcttaagaagttcacatacatagttatgtttggcttttgaacaacagctgagatgctattgaattcctagggatagctttcaactgctccataatcgtctatttatcttctaagttagatctaagagagattgtcttcgtcttattagttaccaaatctagattacctgcaatagtgcggatgatcacctaacaaagaaaaaaaaaaaaaaaaaaactaatttgatgggctagacttttaagtaaaaggccttaggagagttgggccaatctttgactaagccccaagagtcataagacatccaaaaaagttcctaatgcatttgttaattgggaaaaatgtcattaaaatcccgaactttgttaaaacgttgatttaaatcccgaactttatttgaaacgaaaaaaatatcaaacttttgttgacttttctaataaatcttaaacttgtgttgaccgcgccattttagtcttgccgttatctgggttaacagacttaattgacagggttaattagacgttaacagagacataatttgcaaacgacacagtttcgtttttagtaaacgacgtcgttttatcaaaacgacttgctatgttttcccccaattcgatcagaaatcgaagaaatcacaagccctaaaaaaacaaaatttctcagttctcttcttctacgacagaattgaaatcgatttcgaaaattggatcttcctacgcaatgagttcaagttcagcgtcatcgggtgttgtccaaaaccgtggttttccggtgaagtgttggtgtggagatgatgtgacaatcttcacatcgaagagtgttgataatccgggcagacctttttttcgttgtgaaacgaaaagagatccaaagacgtggacaaacaaaaaagatgtaagtttgagtttgagtttgagtttgagtttgagtttgagtttgagtttgtgtttatgttatgtaacttagcagctaatcatatcggatttggtttgattgtgtaacagagtcatttgtttaaatgggttgaggatgctgtatacgaagaggttgaagatgttttaccaaaatttgtgatcattgcaaatgagcttaacaaagccaaatccgaggcaaatgagctaattgtgatgatacatgaactaaaagaagaagcaatgttgagtaaacaagaaatctgcaagtggaaagtgtgtttgaaaatatgtttttttggctttgtttgatcagcattttcattctttacatgatgcttggtaaggcaaaaaaaaatgaatttgttgttgcttaatagtgtaggtctatctatcttgttgtcttcggcaagcttgtaatgacaatgtagtatttgtgacttttatgactttgtaatgttggctttgttgctgtcttaataaaacttgtgagtgtttggtctttatttttcttgggtgaatgtgagtgtttggtcttgatataaggtgtgagtgtttggtcggtgtgagtgtttggtcttgatatgagaatcggagtaaagagatggaataatttcactcaaacaaaaacttgtcttaaaactatgagtgattaaaagtagttaaccaacatgtcttaaaacttgccgaaccaaaaatcaaacaacaaaagagacaacaaaagagacatctcaagttatgaaacaatccaaataccaacaaccaaagaccaatcgatgttctcatgtcaagtttgaacactcaaaccatgatctccatccttctactccttttcgattttttccttctattgtcaccatctaacctgttaccattctgtttcgatttttttcttctcctattgtcaacgacagaatgagacggcctagtagaaggctcgtgaacagcaggagcctcgacagaagcacgtcatagctcagcaacagacggaggctcgatagcaacagacggaggctctatggaagcagacggaggctcgatagaagcagacggaggctcgacaacaacatgaggcggctcaacaacaggaggaggcgggtcgacatcagcaggcagcttctttctcatcattacagtttcgaatttctcttcctcgatcgacaaaagagaattgagaatttttgttttttagggctcgtgatttttcaaatcgaattggggaagttcagtctttttgataaaacgacgtcgtttactaaaaccgaaactgtgtcgtttgcaaattatgtctctgttaacgtctaattaaccctgtcaattaagtctgttaacccagataacgacaagactaaaatggcgcggtcaacacaagtttaagatttattagaaaagtcaacaaaagttcgatgtttttttcgtttcaaataaagtacgggatttaaatcaacgttttagcaaagttcaggattttaatgacatttttccctttgttaattcaatcatcatgtgatatgtgaagataatctgctgtatgtagtaaataaattttgaagtcatctgattgtaataatgtaataatatatagaagtaaatgttacttattgggcttctctattttactaagatgcaaatgaattaatattttataatttatttattttgtcctaagtatacatgtcttttttgtcttttgtctgaatctttctcgtcggaaacacagatctcagttccttacagaagaatctccgactcgtttctttgccggcattctcagatttccggatactagccatg

SEQ ID NO: 30262 - DNA, 3000 bp, Unknown; identical to SEQ ID NO: 30261
  misc_feature (1)..( 3000): 2750-1469P.txt file - cDNA_ID_3028372; gDNA_ID_2214602; Annot_ID_187091

SEQ ID NO: 30263 - DNA, 3003 bp, Unknown; identical to SEQ ID NO: 25023
  misc_feature (1)..( 3003): 2750-1469P.txt file - cDNA_ID_3028400; gDNA_ID_2214602; Annot_ID_187096

SEQ ID NO: 30264 - DNA, 3000 bp, Unknown; identical to SEQ ID NO: 13155
  misc_feature (1)..( 3000): 2750-1469P.txt file - cDNA_ID_3028404; gDNA_ID_2214602; Annot_ID_187095

SEQ ID NO: 30265 - DNA, 3000 bp, Unknown; identical to SEQ ID NO: 13156
  misc_feature (1)..( 3000): 2750-1469P.txt file - cDNA_ID_3028408; gDNA_ID_2214602; Annot_ID_187093

SEQ ID NO: 30266 - DNA, 3003 bp, Unknown; identical to SEQ ID NO: 26401
  misc_feature (1)..( 3003): 2750-1469P.txt file - cDNA_ID_3028423; gDNA_ID_2214602; Annot_ID_187084

SEQ ID NO: 30267 - DNA, 3003 bp, Unknown; identical to SEQ ID NO: 26402
  misc_feature (1)..( 3003): 2750-1469P.txt file - cDNA_ID_3028473; gDNA_ID_2214603; Annot_ID_187139

SEQ ID NO: 30268 - DNA, 3000 bp, Unknown; identical to SEQ ID NO: 13183
  misc_feature (1)..( 3000): 2750-1469P.txt file - cDNA_ID_3028480; gDNA_ID_2214603; Annot_ID_187135

SEQ ID NO: 30269 - DNA, 3000 bp, Unknown; identical to SEQ ID NO: 13179
  misc_feature (1)..( 3000): 2750-1469P.txt file - cDNA_ID_3028491; gDNA_ID_2214603; Annot_ID_187130

SEQ ID NO: 30270 - DNA, 3003 bp, Unknown
  misc_feature (1)..( 3003): 2750-1469P.txt file - cDNA_ID_3028499; gDNA_ID_2214603; Annot_ID_135603
gataaaaggaaactttaatatgaaaagaagattatcatatttgagccaaaagtaattaaaaataataattttgttgctcgaacgacgtcgctttgctgggagcgcaaataatctccggcttctgatcaaagccgctaactcaggcagaggctttaacatgccttcactccagttcaccgccgttgtcttctctctcaccgacggcttaagttttatctgtcggagtagtttcaatgcggagtgggaagaagagagctcgctcagaacctggatccacaaagcaaccccgaagcaaatactccgacaacccaccggattttgcctcgttagcgtctctttacccatctttcaagccctttgttttcttctccggtagtcgagctcgcatcgactggaccgattacaacgcaacccgagagctcactcgtgtcctccttctacatgaccatggcgtcaactggtatgatttcaattgtacaaaggaactagcttttttgctctcaagaacagttagttatttaccaaagtcttatatatataggtggattcctgatggacagctttgcccaactgttcctaatagatcgaattacattcattggatcaatgatcttttgtcctctgggatcattcaaagtttgggtggtgatggaagtaaagtaaagggctttgacattggtactggggctaattgcatttatcctctccttggtgcatctctttttggttggagttttgttggctcaggtttttcttcttcttttattatacttcatctgcattatactagcttctttagtagttggctctatgttctcaatttggtgacaatgttgttttgtatgcagattttactgttgtagctctagaatgggcagagaagaatgttcaaagtaatccccatttttcagaccttatcgagatcagagactctaaagttcctccacagtgttcctctgtccctgaggttgaaaatacagagagggagaaaaccatacaggaggaagctgaaatttccgccacggttaagtctgattatcatgacaacaagagttttattgaaccagctgtactactcggtgttgtcaaggaaaacgaaacattcgacttctgtatgtccaatcctccattttttgagacctttgaagaagcggggctaaatcctaaaacttcatgcggtggaactcctgaagagatggtttgcaatggtggggagcaagcttttgtgtcacgtattatcaaagatagcgctgtactgaggcaaagattcaggtaaattgtacccaaataaacctttggatcttccacattctggttttccatccatcaggacttatcgttttgtgaacatgtttaatattaggtggtacacttcaatgcttggaaagaaggctaacctcaaactcttgatatctaagctttgggaagtgggagtgaccattgtgaagaccactgaatttgtccaaggtcaaacatcccgttggggcctcgcttggtcgtttatgccaatagctaggaagattatagcacctcctgtagtcaaaaagagcgttctttcttttatgcttgaggtattctatctataactttcgtcatcctttacttatatttgttctgtaactatataaaagtctcgggctttacaaaagccttacattctccatggtggatttgtgtgtttatagtgcattaaacggcagtacagtgccgtagatgtgctgcaatcagttgaagaattcttcaagagctgtggcgcctcgtgcaagttaaactcttctacattttctgttgacgtaagtgcactacctgtattgttttgtcttgccatccaatcttgtttctacagtatctcaagctcaatggagtttctttctattgttgtgcagattgttgcatctaatgaccagtgcaacacaatctcaaagaatgacattgcagatgtagatagtgtaagaagccatggatatgaaaaacagtcactggatggctccagtttgcaagtccctgaatataacctatctttccgcatcttggtatgtttggatttcatttgagaaatccctaacaattgccttcaccttttcgaattgtttatgatgaagaaacttcttttacaggtgttccaacagatgccaggaacgttgcttataaaaggatcattgcagcagaaagatagtcccctctcaggttagtcattttgctcggtttccctaagttgctggaaaaaatttcacttctttattcatgaatctgcaaaagctttggttctattcatttgatctcaccaaaatcgcgaagtaccaaaactttcgctgttagttaccaacgtgaagacaactgaattgtcggtttaattttgcatatgcaggattgttctccagggtcttcggttcgttggaagaaagtttgaagtccaaattttgccggtaacgagtcccagggtactgttctgacttgaagactggcatctgtcaaaaactaaatgaaaatgatgaatcttcaaatcttagacacatgacatgttcttacacacaaaaacaagccgtcttttgaattgattcctacataaactgagacaattactctcaacagaagcaagcaaacttttttcagctaatcttgttgtggatgaaaagtgttgcatagcagaccactcgtgtttctcaactgcatatataactagaatcaagacttgaaaagacttaccttacggggaaagatacacagagccaagttggattacccaaaagtagtaaaggagagagagagagagagggttcttcacttcacgtgactaagcaagttacttttgcctttctctccagtttctctttttgatcaaccatcgtttgtgatgaaaaatgtaagacctctaccacctatatatatcttgcattgcatgtgggtgtagttattttgaattgtcattttctcttttcgcagtgaccacctatatataactttggtgatccctcaaccctttgattcatttggaaagatatg

SEQ ID NO: 30271 - DNA, 3003 bp, Unknown; identical to SEQ ID NO: 25026
  misc_feature (1)..( 3003): 2750-1469P.txt file - cDNA_ID_3028499; gDNA_ID_2214603; Annot_ID_187127

SEQ ID NO: 30272 - DNA, 3003 bp, Unknown; identical to SEQ ID NO: 26105
  misc_feature (1)..( 3003): 2750-1469P.txt file - cDNA_ID_3028503; gDNA_ID_2214603; Annot_ID_187124

SEQ ID NO: 30273 - DNA, 3000 bp, Unknown; identical to SEQ ID NO: 13187
  misc_feature (1)..( 3000): 2750-1469P.txt file - cDNA_ID_3028507; gDNA_ID_2214603; Annot_ID_187122

SEQ ID NO: 30274 - DNA, 3003 bp, Unknown; identical to SEQ ID NO: 26405
  misc_feature (1)..( 3003): 2750-1469P.txt file - cDNA_ID_3028511; gDNA_ID_2214603; Annot_ID_187121

SEQ ID NO: 30275 - DNA, 1743 bp, Unknown; identical to SEQ ID NO: 13198
  misc_feature (1)..( 1743): 2750-1469P.txt file - cDNA_ID_3028536; gDNA_ID_2214604; Annot_ID_187183

SEQ ID NO: 30276 - DNA, 3003 bp, Unknown; identical to SEQ ID NO: 25028
  misc_feature (1)..( 3003): 2750-1469P.txt file - cDNA_ID_3028544; gDNA_ID_2214604; Annot_ID_187175

SEQ ID NO: 30277 - DNA, 3000 bp, Unknown; identical to SEQ ID NO: 13195
  misc_feature (1)..( 3000): 2750-1469P.txt file - cDNA_ID_3028552; gDNA_ID_2214604; Annot_ID_187169

SEQ ID NO: 30278 - DNA, 3000 bp, Unknown
  misc_feature (1)..( 3000): 2750-1469P.txt file - cDNA_ID_3028554; gDNA_ID_2214604; Annot_ID_187168
aaatttacgacgatagattaggctgacggcccgaccacccgttatgggtcaataataaaggcccattaacggtataacttagcaagataacaaacgaagaagaaaagtcgttgacaaaaagaaaaaaaaaacacgattttgagacaatttgccgattcctcgatcatttcatctgctgaataacaacagtgattggctcttctgattagcaagcttcttcttttcgaaatcgcatcactttggctgatcggtggattctacgaaccatgttcaatttctggtaacatcaacttcatgaatctgatttttgtgattatgcgattttgttaccctcttttacctcagctcgattatgctgttatctaattttgattatgatcgttttggagaatttcaatttctatgtgtttgggattaaagaactctgctttttgttagttacttactgttttatgcataccattgatggctcttatagttagttgctgctaacatagttaaggtgaacaaaaattttagttgtaatcattaaaagaacctgatctatgctcatgaagttgtgctgggtcttaagattttgcaatgttagtatattgggtattggaacagtttcaggtaagtatttttaagattgttgtgttaaaaatccaggggatcaaaagaacagcaacaaggacaatctcgtccttctccagaagcttctgcaacaccgtggtattcgccgtctcttgtcacctctcctagctcatcccggcctcaaacctcagggcagattccatcacatgtttcaccaggtgaagccgccggcattattgccattttaaaagacaaaaggttagtcttcaatttccttataccttcttgtttgcctcttttgtacatgatgtataacagttttcttgtgtcacacagtcacacatttcttgtcatctttaatatgaatttatggtcttttaggcttggaatagtttagattaacgctagaccaaacactagatttactggttctgtggttttgatagtttggttgctgatagtctcttgtgattttgcgttgtgttactaatttgcagagatatataaagggaattgatttctgtacttgtcggtatgttatcttgtatgcttactcttattactcatttatgatgttcttcaaatgttttgctcttagtgtggatgagcttaggaagcttctctctgacaaggatgcgtatcaacagtttctgcactcgcttgaccaggtcactattcaaaacaatgtaagtgggaaacatgatgtaaaaatcatctattgtcttaagaaatgtagcttcttcattatttacgtttttgagatgattcagttttgtgctttttctttatatgttcattagatcagagaagagcttcgcaaagaaacgttacatctagctagtgagttcttgtatgactttttttgacgatgacaattatattcatattgcgagatctaaaacattcatgctaatataacaggagaaaacttggagaaggaaccacagatagtggagctcagaaaccaagtgaataatatcattcaatctctgagtgagttaattaagtatatgaaacttctctccatttgtataatctttttaaaaacagtgcagaataatccgtacatccgagcttgcgactgctcaagagaagctcaatgagcttgagaatcaaagagaagagatcctcaaattctactctccaggttctcttcttcatagacttcaaggtaagtaaaaccattagctgcttcactcaatatccttcatgtgtaacaacaaaatgatacatgtcggtttctaatacacaatcccgggtttgtttatcgcagatgctatgaaccaggtggatgaagaatcagaggagctgcaacagaagtttatggagaaggatattgacacagctgcatttgtgcagaaatacaaaaagctaagaagcaagtatcatcgacgggctttgattcatctcgctgctaaaacttcatctattggctgaaaacaaacttacacgttttgttttttttgcttccgaccttaattcgatgtgtaagtaaacaaaactggttaaaagtcgagatctatatacgagatcaatatatatcattgtattacataatcatgttatgctctatgaatctgaatcttctatagttctttctgattttgaatcttttgttattggttcgtcctggtttgggtgtggaaatgcacaattatgttcagatgacgtggaatgtgtccaatttttgtctttgtttaggaaactcacaccacaatttaccaaagcctcattcattctttgacgtgtccttatggatcatgaagactagcacgactcacctacaagtcaattttaaataatataagtaaaccatatcttaacttactcattcatataattttgtagttaattcgaaggtggtcttacgagtggtgactaataatattaagcctcactgaccctaaaaactgctcagaaaatttgtctaaagatttgcgtataagaaactttgagttctcacaataaataatagcggaaatatacaatttggttgatcccttgtttaagaaaatttcccggtttgcatgctcaattttatcatttcataatcttctgcatctataattgaggaaatttagtaaaacagagaaagcagatagaggaatcaatataccaatcgttaatttaaaatagtaaacaactagatttgaacataaaatcgaaactaaaccgaaccaaaccaaactaaaccgaaatcaataattttggaatatataaatttcattagtccccactatctccgctaaaacatttgagaacgtctctctctctctctctctctctgacagttctttctgtctctctctctgctcgatgcgaagaatcgagcatttgtgtcgctctctggaacgtgtgtcttcatcgggaatataaccataatctccacgagctgcttgaatgcgtacccttcgttccctaatg

SEQ ID NO: 30279 - DNA, 614 bp, Unknown; identical to SEQ ID NO: 13209
  misc_feature (1)..( 614): 2750-1469P.txt file - cDNA_ID_3028580; gDNA_ID_2214605; Annot_ID_187211

SEQ ID NO: 30280 - DNA, 3003 bp, Unknown
  misc_feature (1)..( 3003): 2750-1469P.txt file - cDNA_ID_3028587; gDNA_ID_2214605; Annot_ID_187208
ctagaaactccattgaagtattacattactttattgcatggttcttatatatcatatgaatgatttgagatttattgtaagtaaaaaaataattaacaatgataaatgcatctacaccgattaggcgctggagctgatggaactgattttatgcacataccagccgcttgcttaaacctccttacacacatctttttgcactcaccggtaacacaaaggtttacatctatagtcttataacactgttgtttatatccttggtccacgtctcccaccgctcctattaaaacaatgattcaaacttattatcttaatttcaatatttaaaaagtaaaaaaatatatactattttatccatttttcgagaagatatatatctcgaagagtttcatgtctattaacaaaaaataatctgtaacataaattatgtattttcttattcactaattcttcttgaaaaagtgtcataggatggtaacaataatcctcaataatatgataagaccatatcctctatatattagcagggaatttgaaaataaaatatttagggatcagtgtgctagggtatgcattcggcctaagaggagacacaactttacattatggaattatatactgtattgaacaaaaaaagatttgacacatattaataattaaaacataggtgaattgatatttagaagaatgatgctaagtggtgcacaaaaaaagaagaagagaaaaggtaactaaaacttttactagtcaaccagattttaactaaattgatttttctaaaacgaatatatgtaatatattaaaattttataaagataaatacaaacctaacacaaaaatggtgaacataatcagaatagcaaacgagagttgaatatgtttgcccatcatagatgatatacatgatttgtttttttttttctaaattgaaaaagtaagaacaaattgtagttatatacatgttagatgtctaggtactattcaaacatatctaatttaagctatctcccacctaagattccgaatgaaaaggatctatagtttgacccaagttctcgaccatttgtttattttatatgtaaaacgctttagactcggttatttttttcttctttacaatctacatttgacattgctaatttaaccaaaccatcgtcttcaaaaccacatcgctaaaaataaatgacctataattctattcaagtttaacaaaaaaaaaaaaaacaattctgttcaagtatcttttttggttaaagttctatttaagtatttattaacaaatttctgcagttgttttgatttaaatgaacatagtaaatctacaaaaatcacgtgagttcacttataattgttttgggctgaaatggaattcggatcccacatgagtaatgagtaacttgaaaattcgatcttaggtgacttttaacagaaaggatagcaaatcctgtgaagtgtgtgaacagtgaaagccaaagaaagagtcacgttataatacatgtgaaaccaattaaaaccaattacgtaccaaccgtcaaatatatcttttgacacatgaaacaattaatcaagaatacaagaggtaattaataaatcaaaaaacaacgtaaaacaaatcattattacggttttgtttagagaaaaatatatgaaattgaatggctaatgcaaccggaagccattaggtgattatttcacatgataattttttaggtgattatttcataaaaacgcagcactaaaaaccaatattcttaacataacataccaaatgaagttaatcataaaaataacgtaagatacaagactcaatctcacaacataaatggaaggcgtgaagggaagagatgcatgcttgacccctcttgtgccattatagattagagatcgatcgatgttgtgttccaaggcaggtgtgttattattacactcactcacataactctgtttgtaatatattaaagaaaatatatattgttgctgatccttcaagggaagaagaacttgaatttaattatagattgccaaagtgtaatgattgttcctacttcctacttgtgattctactacttcctaataatgccttaattaaaaaagtataggatgctaacaactaaaggtatgtgattaagtatcttatggaaccagatctagctactcaaattttctaattcgtaattaggcaaagtataaactcacactacaaaaaaatctaagtctagcatcaattttttaaaaaagttagtgttgcttttaaagtgacactagaattatatagtcattttgaaaagcgatgctaaattcagtgaagctaaaaatatttagtatcattttttaaatgacgttataattcatggttaacatcgttattttttggatcttgaaactaagcacaaaatataaacgaattttatttctgtttgattttgcataaaacattttagtaaaacaatcaattaatattatagatgctcaaatacttcaatatatttttgttattaaaatcatttattggatttagcttaattcggttagtttgattctgttagactaaatttatttagatttatacttggtatataaatttttacacggtttaatttgattggagttcgaattgatgaattttggtttgattcggattgattttttttggtccatccctagtttttatggtcaaaaacaagatcggtttagcaaaatctgaagactatttgggttttcattgaaccaaaagatttcaggaccatggaaacagagaaaaagtaaaaattatgttgggaaaaggtagagaaatcatgagaaatcatattgttcccttatgtaaatgtcttatctttttcacccaccagattattattatcaatcccaagcaacaaccactttatttcacatcaccttataaataccaactttcttcatagtctcaacaaatacactacactactcaacttataacctttctacactttcaagaaaccaaacagaagctgagttagagaaatg

SEQ ID NO: 30281 - DNA, 3000 bp, Unknown; identical to SEQ ID NO: 13212
  misc_feature (1)..( 3000): 2750-1469P.txt file - cDNA_ID_3028591; gDNA_ID_2214605; Annot_ID_187205

SEQ ID NO: 30282 - DNA, 3000 bp, Unknown
  misc_feature (1)..( 3000): 2750-1469P.txt file - cDNA_ID_3028595; gDNA_ID_2214605; Annot_ID_187202
tgttccagcagaatcaagctctttgtcttacacgacagctatgacacatatctcaatgagtctttggaacttcgaatttctcctttagctaacaaattcagtcaaaatatttcagcacacgagccatatgttttatacaatatagtttttgcaattcagtcaacatatcataataatgcattcaacatctgaaatttcttcaatcatacaacaaagccgaccagatagtttcattgtacaacaaaatgaataaggtcgtcgtctacaaaacaattcccagtttccaagtattgggtttgaagaaagttggttccaaacccaaaacaagaaagaagaagaaaaatcagtcactatacaccgaaaaacacaccatgaaaacacatcttgctgagcagtatcgtgtcaacgggatgcaagagaccagaaattgaagagaaacgaaggcaaagcagcgaaccagcttatgaaagctaatgccgttgatgtttcaaactgaacacagtggttttgtgcgcagctattcagatcgttgtctattagaaccgttatgcctgccgatgcacaagctgctgcaaaagtcagcgtcgatgtcacctgaaataatgttgaaaaatgcttatttgtacacatctcttttctcatacgattttattaaattgagaggctaaatggtaaatctcttaccccatcaccaattgcaaacaagctcacaagtcgacggttctgtagagagcgtttgaccataatggcatagacgtcaaccatggctagtgcaagactccacaagctctgcagaccagtagctgcaactaggtagctgatgaatcaaatacagtaaaccatcttagcagattctaacagtcaccaaacatggtttaatcacataaaagcataaaggtttaacccaatatactacccatcccgtacaatcggttcaactatcacattatgtccacagcttaacactgctactacaaagattcattcatctggactctagaaaatttgcaacaggagacctacatacaaagtacaccagtgcctgtcactaaggcaaacttacctaagtaaccactaccagacaccatgatgcaaagcatgattaataaccaaattaaacaacagtgaccaaatgaaaaacatgatatgatagccattttatcaacattaacttctcgaagaaagctcatctagttaaaatgatctttatgaccatgatatatcccggattagcagctacatcatattactgggcaccagtaataaaatcccctatacacagctgttaactagcttctaataagccttaaagatactaatagactagcaagcctcataacttatcatattaagccacaaacccgatgcttattttgtattgcactttcggaaatggaaacaacaaaaagcagattccagttcatagtgtatagcatattggaagaaagatagggtgctatcacatccgattctgataaatacagattctcacagaagtttatagtaaagcatatattcgatttctaatagaccaaagtcttaccagaaggcggtaacggaaggaaaatcactagtagaagccatgacacaaagagcagcagcagcaaacaagaactgaaaaaaacgcaatgcaagaccaagcaatgttccaggcattccttccatatcatccatcctcacccgaggcggattctctacttccgtcgcagctgcaggaggatcttccactggatgtaccgatgcatggctcacattcatttcttcttcttctttcctccaccaaactcaaccaattcaacacatctctctctcccttcctcttcaccaatagctgaattacaaatctaacaatctactactactcaaatctcccctacctgtattcaccaaattaaaccacaatttatacaatctaatgataactcagtacaaagttcaaggaggactaaatcaaacatagaatcaaatctccgcgatagctaaactaaatccaaggttacgaaattgaactagatttggctccggagaagtaaagagaaaacgagatccaatcaattgagcacgtagatcgagtaagggattggtgtttacctgagagaattaagaagagaggaagaaattgaaagcagccatggagcttgggtagaggaaattaagaaaatcctaagctatatttgagggaagaagaagaagaagatcgtggaaatggtttttaaggtttatgcgaagaagaagaagaggtgtgggtgttttgatcaaaaggaagaatatagcttgacgaaaagagattaaccattaaaccaaatttagaggtcaattaaacttcttaaggggaaatataaccaccaatctatattttcttttgttcacattttttttggtttcctaaattatactttaaaatatatctttttttaagaaacaataccacatatattttttattttttccctttttacattaatatgggtactaattttatttcaaatattatcagtttatcactaactatgatttatattgtagcaatttagcatgcttttttttgttaaactccaaaatgtgatataatttgtgatgaaaaaatttctgtaccaaccaaacgacaatattgcattttatttttttgtcaaatcagtcatatctgctatagattttttaattataatcaaatttaaattaataatataagatgtctatttaagtataatcaaatttaaattaatactgtgtaacaaattttcaaggttaatatagtactttttatgttttatttactaatttcttattatggttctaaactggccaatatttcgcggctttacattctttttggcaaatttctggttggtaaaaaaaaaatttgtaagtttttagttcgcataactcgggtgtcggccttctaggatcatatattaaaagtatgaattcttcaagcatttaaggcttctaagtaaggtatgttcttcgatcagcgacgattaagacaagtagaccatg

SEQ ID NO: 30283 - DNA, 3003 bp, Unknown
  misc_feature (1)..( 3003): 2750-1469P.txt file - cDNA_ID_3028610; gDNA_ID_2214605; Annot_ID_187194
attactctagtatagttactttaatacttcaatgttgtatatgatcaatgtaccacgctaaatctattaaatatgtgatttatacaaaaatttacatgtgaactattttttaaaaaactttatctacccagagattagttttgaactcctccacaggtggtgaggatttatcttcaattaacaggaaaaaaaaagtttatcatcattcactctaataaatttatttctccagttttccatcttcattttttgaaagtaatatatattaaaacttgtaaattttaattttataaaatatttatattttacagtttataattgttattaagtaacgctataccacgaatccatgagacaattgttaaaatttttaagttttaacccctattaaaacagcatattaaacatatttcaaaattttataaatattgattcaaatacatctaccatataacccaattccaaaataaaacccgttctgtaatttctttacccgtcccgtggtttttttaaaaatagtaatttttaaaatttaagaattattttttatatataaaagttttgcaaattgtatcattctctaatacatttatattttatagtttaattttatatataataacattatacataccacataacatttttggttttatataaccttttctaaattaggatgatttgatatgtttaatattagtggtcttaaaatataataaattaaagatttaatccgtattgaaattgtggattaattatattttacttttttattaatgttgattcaaaaacccgtccctccaaatccgtcttgccaaaaagccatttattttattaatattaattttattaatgacatgactctgaattataatctaaacattttatctaataacaaatgagtgcaccatatttatttaataggagactgtaccatatgacccgaatgcacttttatccaaatccaccaaaaaagtcttgcaaaaatactatagagataagaaacgatagtcggttttgataggtataagattagcaactatataagttagcttaaattagttaaagaatacaaattgaaaagatatattacactttattcgaatatagtatcaaaacttatataacacagagatttgataattttttaattattgaatacattttttgtgctaatttttatgtgattaagatttaattgatttcgtatataaaatattaaattgttttacgaacttatttgtttataatttggtaacagatagatatttgaatattcagatctttgatgacccgtctttagatccaataaaccctataatctagttattaacctgcagtataccgcaggtaggcttatactttagttaaactaaaaacttttattgtaaagatgatttaaatatatatgatattattttatttgattttaaatgtatagtaaactgtgagttgtatatgttttgttgatattatctatattgtttagtgtttaagattatacacttgtagtttggttgttaatttaagagtttcacctgtagtatatcatcttgtattaatatcgatctaaatccgtccattttacgattttccagcttgtattaaaaattgaatcacatctaatatgttattaattactgtagtatataagattataaattttcaatataatatgtgtgaaattgaatagaactatttcaaattatgattcgttactcagtagaaagttttcttaaatctatttttctcccgttataatattttttcatgtattgaacagtttatattcgtttttaaaaatttaaattatggcatatgcgaaaaaaactctaattatttgtttataatgatgatattatttttcggcaaaaatagaatcatataaagatgagaagtgaactataataattaataaaaaattaatatgataatttagatattaaatctaatttgttgattttaattggttacttttttggaaattaataatgtatttcgtttttctaattaaattaaattaattaaaatttagatatcaaatcttatatgttaattttgattggttattatttttggaaattaataatatatttcgttttttaattaaatttaattaattaaattagtatttgactttttaatctttaaagagataaattaatttactctttaaaattttatttctaatggtatacccatgtaattacttacaaaaattaaggttacattttaaaatgtacttcccaaataatatagtaggattttattaatttttatttgtctttaaacaataaagcttaaagcaaaagtgaaaccaattacaaatttacaacagttgcgatgtgtctagaaaagcgaaaaccgattttaaccctataaggccagaccaggccaaggcctatcatatcaaaaagggcaaaaacgagtgaatttggacaaaatcgaaaccaccaatcagaaaatatatgtggttaaaactttgaacacatcaataaacacgaaaagggtaataacgtcatttccataaattcgtaatcattcgtcctcaaatctttattgtcacttttacaaaaaatactcccaatttcagagaaacctgttgaaaaaaaattcagggaaaattggaaaaagtgatgatgatgacgagagatcaattcaaatcttaagtcctccaaattttaaaaatttcgatctccactaccttcgtcatcttcctctacttctgattctcttttctgggtttgtcgtttaatgggttgattttgtatcgtcaaaacggagaaaacaagaagacttcttttggttttcttattgcgaagaagatatttctagggtttcgagattttctgggttttctgggtttttgtgtgttctttgattggatttgattattgggcaatttccttggaattcaagaaacttctaaggttcttaaagtgtaaagctttgtgattttctcttattcatacattctaggactttggttttggagttgtaatg

SEQ ID NO: 30284 - DNA, 3003 bp, Unknown
  misc_feature (1)..( 3003): 2750-1469P.txt file - cDNA_ID_3028614; gDNA_ID_2214605; Annot_ID_187193
gaacgaatgaaaatgcaaaggttattattactactattttggggatagtgtttgggacttttattggtatcacattaccttcactttcgtttaaggtatgagttttgtttttcataggtccttttatgtgtccctttcatttttgcacctgttgaattttgtttcgtattcctgcagattaacttaccctcgcgccttatatcatctcttgatgtagccatatctggtgacaaatcccctgaagatttcggttcaagaaagtttcctgaggtatataataaacttcttgttcggttccctttcgttagcttttcgattatgttctagaatagtgcctcatttcagatgaaatgtatcgtttctgtatgtttgattgcagatatatgttccaactaacccgcgtggtgcagaactactacctccaggaatcgttgtggcgaaaactgatttttacttgcgtagattatggggagaacctaatgaagtattgacttctcattctatatttactttctcaatatatatggttttatctctgaaggccattagaatagttaatgtcaaaacaataacctttgcaggatttgaagaagaagccaaaatatcttgtgacatttacagttggatttgagcagaggaaccatattaatggagttgttaagaaggttctgcaatatcagcatgtgttttagcaagtattgttttatatattctttgtggatacactcagattttttgttttcttgtcatatcttcagttttctgaagatttccaaattttgctcttccattatgatggccggacaactgaatgggaccaatttgagtggtcgaagagcgcgattcatattagtacaagaaagcaaacaaaatggttagtcatctggtcatttaccggttattaagtatgtttgtcgagtatgtttttatcgaaattctctactggttttggcaggtggtacgcgaagaggtttttgcatcctgatgttgtgtcagcttatgagtacatatttatatgggatgaagatcttggagtggagcatttcaatgcggataagtaagttattacttgtctgaagtagcagaacaatcttatattttacattttgtgatggaattctattaaaacttcaggtacattgagttagttaagaagcatggtttagagatttctcaaccaggcttagagcctaacaatggactcacatgggaaatgacaaagaggagaggtgaccgggaagtccataagtaagatctccttctctaaccattcttctttgcctttctttcaaatttggttctgaattaagaaatgtgttgttacttactgttgaacagagatacaaaagagaaaccaggatggtgtaaagacccacatttacctccatgtgccgcgtaagtctctctttgaaacgttctctttagagcaactcaagagtgtttagtcattgtcagtactgagttttctgaaaaaaattccctctcacaggtttgttgaaataatggcgcctgtattttctcgagaagcatggcgatgtgtgtggcatatgattcaggttcgtcgatctgtagatacatagtcctagtcttagtccatcaaaataatgcttgttgttttgatcagtttgtttatgtttctgatgcagaatgatctggttcatggatggggtctcgactttgcgcttagaagatgcgttgaagtaagttgtttttgccccccccttgcttaccttaataacacaatattctcttgactgatgatgaaaatttgtgtgttttgcttttgcagcctgctcatgagaagattggtgttgtggattcgcaatggataatacataaagtgataccttcacttggaagtcaaggaaagtcagagaatgggaaagctccatggcaaggagtgagagatagatgcaaaatggaatggacaatgtttcagaaccgattggctgatgctgataaagagtatcttgggaagatggtgaaagattagatttgtttttcttttttctttctatataattaatatattaaaaaaacttttacttttgtatatcaaatattttacactaaattaggttttcataggacatgtgtgaagccctttttattgatattgtgtaagatttatacattttgattgagctttattatgttgtttgttactttctccatttcaaattcttagatgtttttaaaaagaaattgctttcactaaacaagagagaagtgaaacatgtaaaaaaaaaaaactttagaaaacaaaggtgtaatagaagtggttgttattacataatctttttgacttctgaaaagacaataagaaaacaagacttataaccagtttcatgatttatctatttcacccaatttcataaattggctattttatatttgctctcaataggtaacgtaaatggtagagaaattaaggagaagagaagggtattggtatggactttggagtgagtgtgaagctttacaccaaatccaaataatttcaattttcattttagtttctattttacaatattttgcccaatagaaaaagtatgagaaattcagtttcaccttcctttttgcttttagttcaagtcaattgtttgtccatagaaaaccatacaatgtctccctccattggctgtttcatttcagagtcttttttatggttaagaatttgctatcatatcattagtagaagtctcttatgaggaaaaacaaatattaagcaacatcattatagtttttctcatgtatcttgtgcgtaattatgtaaatgtcataattattaaaacatgaaattaggaagaacagaagtttggtgttagacaccaaccatttttatacaaacaaataataaaaatctcattatatcacctttgcatttcatcactcatcacattcacaatccttctctttttctcacatcaatatatatctctctttctctctcttcatttgatagatttgaagatttgagaggagagagaggaagaaaaaatg

SEQ ID NO: 30285 - DNA, 3003 bp, Unknown
  misc_feature (1)..( 3003): 2750-1469P.txt file - cDNA_ID_3028618; gDNA_ID_2214605; Annot_ID_187192
caattgagacaaaacaggccaatttattggccggtgatattttcatgtttcccttatcttatttttttgttaggagtataatttaattattttgtctgtcttttgaaatgtgtagttaatttctaatgaaaaataaaaataaaaagccaccaatcatgttgctccaaaatatgattacctttctacgaaaggggtcaaggtgataaatgtaaggaaaacacctcgagagactaaatcatcattacctctatcctttctcacaacataatgggctaaaatatgattgcataagataaaaatggatttgtatattacatgttgaatccaaaacagtagcattaagagccattttgttagattcacacatctttggaggaagaaaaccataaaacaagtggtgtgagtgtgtaagagatttgtctttttgttttggaatatatagaagacacaagtggtgagagtgagtggtaataaaaaaataacaaacaatattgtgtaaattgtggataaagataacaggagagacagtgggagaagtgaaggcagtagcagacatgcaccaaaggaaagctgaaatggctaagcactctgatgcttttatcgctttacctggttggttccttttcattttcttatccaccattttaatcattagattttatacaaaatgtgattagtaaaatgggaatttataatgttgaatgttattatgtaggtgggtatgggacacttgaagagcttcttgaagttatcacttgggcacagctaggcatccatgataaaccagtaatcattttgcttccatttctatttatatatattacattatacattcctaataacttgaagtaatcttagactaaactaggtaattaacaaggaaaaataactattgccatcaaatagtgaaagaaaatctcctaaagagaatacattattttttaggtaacacgttattttagttctattttatggacatctttttttcacatacgtcctaaccaaagtaaactctaaaactctaattttcttttagtaaattagacgttcacattagaaataatctataacgaacgattaatcgatcgtgacgaaaatcgtaaatgattgataaattcgtcaaatgaaaatttaagtcattactagtttcttaaatgccatgttattagttttttttttaccaataataattcttaatgttatgaatgtgaaggtgggactgttgaatgtggaaggatactacaattcattgttatcattcatagacaaagcagtggaagaaggtttcatttcaccaactgctcgtcatatcattgtatctgctccttctgctaaagaacttgtcaagaaacttgaggttgctttttcacttttttctttacttgtttgactattttctgtatagtttttttttttaacttctgtggatttgaaaaaaataggattatgtaccaaggcatgagaaggtagcctcaaagaaaagctgggagatggagcaaatagggctaagtcccacttgtgaaatctcaagatgaaaaaggactaattaatttccttaattaggacaacccaattgaatgatctctccaaattgggaccctctttattgattgtaaaacttagtccaagcaaaccggggaaaaaacagattgactttcttctttttgtgtagttgattctgttgtttaatgtattttttttagatttttattcgggaaaaaaaaagaaaagacagaaaatatgttggtttttttagtttggattttgtaatatgtcccccaacaaacaactcaattttatagtttttctttctttctttctttctttctttgttgaattcttgttctctagagttcctttttgttgtgattatagtaaattgagttttgatcaattcagattgaagttacaagtctcttgaacccattttataccactaaaaccaaagtataacgtaatacaccattaaacaagactagtaaccccttttgtaaaaagttgatttactaattctataaagctgtaaaatagtgaattaaacctttttgtaagaaaaatgatttactaattctataaagcaggaagcatagaaaaaaaattgttaatcaattcgtattatactaatgtaaaattaaaattgctcatattaaaaggtatttttgtccctcaaaatttacagtaaaaaagccaagtaacaatttttcaaaaaaatataattctaagcccaatcatggagttgctgcatgtacatcagaacatggagtcatggaccatctatgggctcagtcccaaacttagcccatatgtttcctttacagtaatcttattcttcttattcaacacatatttcttaatgattctatttcctttgttgtcacaaatgaaagtagttaagtttgactgattacgagatttagaaacaagaaaaaccagttttaattttcaaatcttgttggctccaaaagaatgtaataaatgagttgtgtaataaaaaaaagacaggaacaaatgtatgtaatgtcctaataatagagcttatcttttgattaattaatcaaaaaagtttgggccttttaagaatttaaaaaacctccaaaaattcgacgcaaataggcctctccaccaaatctctctctctttctctctgtcacactctttatcactctctgctctcacagatcggagaatctcctctgagagctctaatctctcagctttcttcaccggcgtctccggatctaataatcctgtaaggcctgtaagtaatctcatttttattttcaagatttatttgcgatttcatctcttttatgctgaatttgattttcgatgtagccttgttttagctatcagtattacaattagttatcactgtgatatatatcttctctgaagtattatgtttgcgttttgaagctactgcagaaaaaagattgaatttttacaatttggggtgactcaattttgttgactagagtgtttggagatatttctaactaaatg

SEQ ID NO: 30286 - DNA, 3003 bp, Unknown; identical to SEQ ID NO: 25043
  misc_feature (1)..( 3003): 2750-1469P.txt file - cDNA_ID_3028639; gDNA_ID_2214606; Annot_ID_187248

SEQ ID NO: 30287 - DNA, 3003 bp, Unknown; identical to SEQ ID NO: 25042
  misc_feature (1)..( 3003): 2750-1469P.txt file - cDNA_ID_3028650; gDNA_ID_2214606; Annot_ID_187245

SEQ ID NO: 30288 - DNA, 3000 bp, Unknown; identical to SEQ ID NO: 13235
  misc_feature (1)..( 3000): 2750-1469P.txt file - cDNA_ID_3028660; gDNA_ID_2214606; Annot_ID_187240

SEQ ID NO: 30289 - DNA, 3000 bp, Unknown; identical to SEQ ID NO: 13225
  misc_feature (1)..( 3000): 2750-1469P.txt file - cDNA_ID_3028664; gDNA_ID_2214606; Annot_ID_187239

SEQ ID NO: 30290 - DNA, 3003 bp, Unknown
  misc_feature (1)..( 3003): 2750-1469P.txt file - cDNA_ID_3028674; gDNA_ID_2214606; Annot_ID_187231
tggtcattgcaatatatctgatgtttatagtttcttgtatctttagcagatctttagcagtagttaattattacgtttagaactcttcacatgaaacaataccaaaatcttttgatataattaaaaaattagtgatgaagtcaagtcactataatcatatttcactaaattgtcttaattatatttttttaaacatatgtttataaaagttttatcgtatctacaactcttcatgatatttttggatacagttttaagaaaaaacaaacaacataatgatatcatagttcactaaattgtctaaattatgtatatatttgtttttggtcaaatgtctcaattatattttgtatatttttttttttgctcaaatgcctgatgatataaagcaaataaatattctcagcattgaacatataaattccgataaatatcacaaaaataaaaataatcaaatatcttatatcggataagaaaatacaaaatcagtcagtacaagaaaaaaaattaggtccaaaaagtttttatagaacacaaaaaaaattattataggtttgatccgatccgatttgacccgactcaaccttacccgaaatacaatatcttgaagcatgttttaaatgattaaaataaaaaagaataataaaaactaaagagagtaaaactcaaaacaaaagtttttttattgctttctatttctcttctcttttctttgtaacttataaacgaatgaatgaataaaatgaactatatataatagagtttacttagttagaaaataaattaattagcgaaaaaataataaataaatatcatccatattttagtgaagaagtaataaataaacatcatacatatttgaaataattactagaatagaacacaattgtatgtttattcctataatagaacacatcttttttttttattcgtatgttttcagtacttgtgtaattacacttaatacccttgattagttttaattaaatattattattaaattcgtttctaattaaaaaataaataaaaaaacagtgattatccatgtcatcagttcatgtcatttaccctaatccacgtcatccgaaaccaaaaattcccttaaaactttcagtttctcattttttcagcacatcttactgttcatccgcgcaaaaaaaaaaaaaaaaaaaaaaaaaaaaaaaaactgtcgctctcttctctcgttcagtcgacggaaccctaatttcatcgccgttctctacttatctcgtctctttcggccgaaactctttcggtggtgtcgaatttcaagtcatcaaaaatcgaaacccaaatcaaagagatctatggaattttatgtgatttgttacaggttttagttgaatcaagaataactactcttttactttgattttatatgtctatcgtttagttttcctctcaatcgatctatttagaaatatttctacttctatcaatgttttgattcatatggtttcgtcttcctcctatgtatccctcaaacagattattacgtttcttaatttgattgttgttatttggccaataaatttcatattgtcttccccagaaaaatgttgctttccgatctgtattataaatcagccgtaaagtgatgtaactcagccgtaacgtgatgtaactcagccgtaacatataatttacacaaccattcgtctttcctaaatgataactcagccgtgacatgtaatttaccgaacctttcgtcttccctgaagcatataactcagccgtaacatataatttacactcatctttcgtttgcccttgaacatataactcagccgtgacatgtaaatttatagatgtcttcccttaaacatataactcagtcgtaatgtaattttaccgaacctttcgtcttccctggaacatataactcagccgcgacatgtaaattgactgaacgtttcgttcttccttaagcatataactcaactgtaatgtaattttatcgaacctttcgtctttcttggaacgtataactcagtcgtgacatgtaaattgactaaacctttcgtcttcccttaagcatataactcagccgtgacatgtaaatttgtcgtgaaacaataagagatacaacattttgtctaactttatcatcgagcaccaacttcacaaatttgtcgtgcgttgttttcgcatctatctgcacaagtttacaccctctttcattagtgttaaatatgtatttttgtttctatacccaattcctggaaacaacaattaccaaaactagatcaaccatatcgggagaaagatgaaagaaattgaagaaaaatgaggaaaacgatgaggaattagaagttccggtgatgtgaaaaactcaagtgaagaagacgagttgaaaaaattttaccctatttttttatcctttgatgatgcacatggaatgatgacatggaatattacagccgacgtcgttttgaattgatgaggtggcaactaagccaccaaacgaacatttgataactcagccatcaagcaaatctatacgtcagtcgcaacatgaatactattacagtaattaaaaaaggaaaaaaaataaagttaagtcagccgtgtaatgtcgtaactcaactaactcaaccgtaacgttcaacaactcggccataactgcatgatattatagtaattaatcttttaaaaataagtcagccataacatggctgagttatatcgtaatccagctattggcggctgatttatatcactcgaccataactcagctgtcacatctttccataactaagccaatcaaaactataactcggccgcgtcgaggaaataagtcagcctttttctcataactcagccatattgttggctgggttatcgtataacttcttataactcggccgaacatccttaactcaaccataccgttgtctgagttatactataactcaggcaacatttttcaactcagccgtaacgtctggctgagttatacttatacttcgccgttttgttatg

SEQ ID NO: 30291 - DNA, 3000 bp, Unknown; identical to SEQ ID NO: 13230
  misc_feature (1)..( 3000): 2750-1469P.txt file - cDNA_ID_3028680; gDNA_ID_2214606; Annot_ID_187228

SEQ ID NO: 30292 - DNA, 3003 bp, Unknown
  misc_feature (1)..( 3003): 2750-1469P.txt file - cDNA_ID_3028716; gDNA_ID_2214607; Annot_ID_187267
aacatacttccgaataacataactctcggatccaccagccctagttgcacgtagtctccaactacagttttcatcaatacaatgaagaacatacctcgtgagatctgatttcactgtatgaaactcaaagttgtgcttcactgcaaacatccgcaacgtgaataccatttcatctttgtctttgaaattttttccaataaacaaagaatcagcatcacttagaccagttgaaaacgcataactagaatactgttgatcaagaatactagatgtttcagatacacacgcctcaataatcctagaggttaacctcgactgccaaaataaaaagcttacctcaaacatcaatctatcttaaataatgattttacaaggatttttaaaaggggtttaaaaacgataatgattttacaagattttttaaaaggattattacctgagtagtagatgcagaatgagaagcaaaaggatttgaagtcgtctcagcctgtaataaactcaatcactgacttaataatgattttacaaggatttttaaaaggggtttaaaaacgttaataatgattttacaaggatttttaaaaggggtttaaaaacgttaataatgattttacaaggatttttaaaacgattagtacctgagcattagggacagaatgagaaacaaaaggatttgaagtagtctcagcctataataagcacaatcactgacttaataatgattttacaaggatttttaaaattataacacaagaaggttattgaaaaacctgctcaactgtcacagaaatttgctctatagtcaaacataactgaagcaatcctccactctgtgagaatttgtgcataaaagttgcaagctgtctatcgttcctagtataaagaggatgagattgtatggttgtagacgtggagactaacttgtaactaagcttcaaagaattggttgaactatctatttgaaaatcctctacaagaatatcaaccaacgcgtgataggtaatgtgctcatcaatgagcactaaagaagctcccaattcaatgtctaattcaaattcccaagtcatattgtttgtcaacttccacaagccacaaacagaatacaattctagcattataacctgataagataaataacaacaaaatcaacacctacaaaaacactgtcactacagagagaagcaaggtttacaaatcgttttaaagagtaagtaagtagcatagaataatttacaagggattttaaaagctttgaaaagtggttaacatggtttacaaatcgttttaaagagtaagtaagtagcatagaataatttacaagggattttaaaagctttgaaaagtggttaacatggtttacaaattgttttaaagcgtaagtaagtagcatagaataatttacaagggattttaaaagctttgaaaagtggttaacatggtttataaatcgttttaaagcgtaagtaagtagcataaaataatttacaagggattttaaaagctttgaaaagtggttaatatggtttacaaatcgttttaaagcgtaagtgacatagatctatcacgaaagcatatgcaaaagaggtaaacactaaatcagaaccaaaatctattacgaaatagtataacgaattcacataagcaaatctatcacgaaacagtataacgaattcaaaaggattttagaacagtataacgaatgtacaaggattttagaaacaaattcaatcatcaaatctcaaacaaaattcaaattcgaagctgaagcaaatgtcaaactgtcgattgaatcaggattcaaataacgaattcacataatcaacaacaaaaatcgaataaaccaattcgaaaacgaagatttaagctaacattataaaatcaaacctgggaaacgcaagagattcgacgacgacacacagctctacttacgacggcgaagatgggttttcacggcgagtaaactcactatttccgacggcatgggattcaacggcattcacaatttccgatggaggaagaagagagagagtgaagaaatgaattaggtctgtgggtagctcattaaaggtaatttggggagaaaagtattagaaagggtagaaatgaaagtgggaaaaaaaagggtagagttgcaaaagggcattgagaaaagggcattagagtgaattattctaattcttttgacatacaattgttagtaattatttaactggcctattctactttataaataggtttttgtgcaaaacaattctcaaaatcttctatttttgtaattttatttttcacgtccaaaaaatacagaattatcataggaagttaaaaataatacgcaatatagttttttcgctattgtcaaattctcaaaattttgctaaataatatatcaaatcgaagacttcgagatgataaggtcaactatatcattagattttttaaaaacaaatgtaagtaatcgtaaaaacgtttacaatatatatatataaaatttaaaaatgaggtttattgtctactattttaaatttcatgagattattttgtattttttcgacgtatatggtaaaattgtaaaaatagacgactttgataattgttttgtataaaacccttataattagttgacgtaatatacagctaaaaacttttagtacagtctacaattatagtgaatgaatcactcttcttcgacttaaaaaaagatagtataacaaactcaaatttcctaaaagaatagtaagttagttacacacacattgtagtttgttttaatgacaaaataaaagaaagaccggtcgtagtttcttctaccaacatataaaataaaaataccaagtcgcatttgtacaaaacttagataatgggacactgccgaagaaaaggtctttgattgaccaatcaccatcttgattatttttctcacaaatccatttattttctctataaatacatccatctaaatcaaaacagatcattgtcccaaaatacaagcaaaatacaaagatg

SEQ ID NO: 30293 - DNA, 3000 bp, Unknown; identical to SEQ ID NO: 25048
  misc_feature (1)..( 3000): 2750-1469P.txt file - cDNA_ID_3028750; gDNA_ID_2214608; Annot_ID_187286

SEQ ID NO: 30294 - DNA, 3003 bp, Unknown
  misc_feature (1)..( 3003): 2750-1469P.txt file - cDNA_ID_3028754; gDNA_ID_2214608; Annot_ID_187284
ccttcctttctcttgtaccagaaaaaattgcgtctagttgatctatccagcaacaatttatctggaaatattcctacgtggctgctgacgaataatccagaacttgaagtcctacagctgcagaataattcatttaccatctttccaattcctacaatggtgcataatttgcagatctttgatttttcagcaaataatatcgggaagttccctgataagatggaccatgcactaccgaatctggtacgtttaaatggctcgaataatgggttccaaggttattttccaacgtctattggtgaaatgaagaatatttcattcttggacctgtcttataataacttctctgggaagttacctagaagctttgtcacaggttgtgtttcaataatgttcctgaagctctctcacaacaaatttagcggccgttttcttccaagagaaacaaacttcccttcacttgacgtgttgagaatggataacaacttgtttacggggaacatcggaggtggtttgagtaactccactatgttgcggattctagacatgtccaacaatgggctctctggtgctattccaagatggttatttgagtttccttatttggattacgtattgatatccaacaatttcttagaaggtacgatacctccttctttgttgggaatgccttttctttcgtttctagacctttctggaaaccaattttctggagccttaccgtcacatgttgatagcgagctcgggatatatatgttcctacacaacaacaacttcacagggccaattccagacacattgttgaaaagtgtccagatacttgatctgcggaacaataaactctctgggagtatcccgcagtttgacgatacacagagcataaacattcttttgttgaagggaaacaatttaacagggtctattccacgggagctttgtgatttgagcaacgtcagacttctagatctttcagacaacaagctcaatggtgtcataccttcatgcctctctaatttgtcatttggacgcttacaagaggacgcaatggctctcaatattccgccctctttcttgcaaacaagccttgagatggaattatacaaatcaacttttttggtagataagattgaagtggaccgctctacttatcaagaaactgaaatcaaatttgccgcaaagcaaaggtatgattcttatagtggaagatctgagttcagcgaaggaattcttcgtcttatgtatgggatggatttgtcaaacaatgaattaagtggtgttatcccgacagagcttggagatctcttgaaactacgaaccttgaatctatctcacaattccttgttgggatctataccatccagcttctccaaactgatagatgttgagagccttgatctttctcataacatgttgcagggaagcattcctcagctactcagcagccttacctctcttgctgtgttcgacgtgtcttccaacaatttatcaggaatcattccccaaggaaggcagtttaacacctttgaagaggagagctacttaggaaatcctctgctttgtggaccaccgaccagtagaagttgtgagactaataagagtccagaggaagcagataatggacaagaagaagaagacgataaagctgctattgatatgatggttttctattttagtactgcttcaatttatgtgaccgcattgataggcgttcttgtacttatgtgctttgattgtccttggcgtcgagcatggctccgcattgtggatgctttcatcgcctcagctaaacatgtgttgccttagatctgttgagcttagttcttggatatttcagtgaaattttgtttatgtatggtttgagtgtttttgtagtgtaatttacgatgccttttcacttatgaatagttgtgtctctttatctcaattttttgttaaaatatttaaggttttttttgtctttttattgaatcttttttttattgaaatatttacggattttttaaaaggttttgtcctcttattacatgtcttttgcacttttgaacggttgtgtctttttaatgcaattttttgttgatatatttataaattctttcgaatgtatctttctatcgtatctttttgttgaaatgtttacgattattttttacaatcgtatattttcagtttacgtttgtgtctttatagttgtatctaatcatttaaagttatgtctcttcattatattttattgcatttactcgtcacaatttctcgtatgagtagttgtctatctaaatgtttgtgacttttgaactttatatatttgtcactttctaagtgaatcccaaatttttgttcttttacacaaatttgttttattataaatccaaactaattaatctgtaaagtagctccaagttctttactctctaaactatttttaaacatacattatttcaatattaaagaaattcctctaatttttgatctaaaaaaaataaaaaattggcatcttcgttagaatttttatacttttttaaagttgattaaaaattcttcatttctatgatcattccaaaatttgatttagaatatataatttttaatgaactttaaattttagattgcaatgtattttgatttattgttaaaaaaaactttttaaaaaaaaattatcttagtttatgacttttcgtttcatatttgtttattacaaacttttttgaaataattttctccgcgatgtcgccggggtctgcgtcctagttattagtacaatggaatcaaactaatgtaaaactgtgaacttgacggaaaaaaaaaaaaaatactgtgaacagcaaagggaaaaaaaaaaaagaaaaaaaatgtcagaacaaatccttctcctccattgagacagtgtacttctgcttcaatggacatttgatatcatcaaatcctgcgtcaggtgagaaagacgcttcgccgttgtcagagttccttttctttattctctgtagaaactagaggcaaaaaatg

SEQ ID NO: 30295 - DNA, 3000 bp, Unknown; identical to SEQ ID NO: 13250
  misc_feature (1)..( 3000): 2750-1469P.txt file - cDNA_ID_3028762; gDNA_ID_2214608; Annot_ID_187282

SEQ ID NO: 30296 - DNA, 3003 bp, Unknown; identical to SEQ ID NO: 21037
  misc_feature (1)..( 3003): 2750-1469P.txt file - cDNA_ID_3028771; gDNA_ID_2214608; Annot_ID_187277

SEQ ID NO: 30297 - DNA, 3000 bp, Unknown; identical to SEQ ID NO: 13266
  misc_feature (1)..( 3000): 2750-1469P.txt file - cDNA_ID_3028855; gDNA_ID_2214609; Annot_ID_187307

SEQ ID NO: 30298 - DNA, 3003 bp, Unknown
  misc_feature (1)..( 3003): 2750-1469P.txt file - cDNA_ID_3028872; gDNA_ID_2214609; Annot_ID_187300
ccgtatctaatatccaagaggatgttaaagacttacccgagagtttttctgtgctcgtgcttgcaccaccattgagtaagaccttcaaacgacgccactccacatcactaaagccactcacaccatcacggtctgcatcagtgataacataattcgcttgttctgtttgtggttgttgagaaacatgaacagcattgacgttgatatgacgccctcgaccaacagaagcagctccgggtgtgacgcctttgcctcttccattaacaacacggctacgtggtctctcaccccaccattcaggatacccgacgactgcaaagcagttgttggaggcatgaccggagcgattacaatgtttacaaaccacagctctctcgaaagcatcaattcgatcggagatgggacgtgacttggtttgaaccgcatgagccacaacttgagaggaatcttcatagtgatgcaccgtagttttgagatcttcctcttgacgaacaacattgtaaacctcctccagagactggataggcacacgggaaaccagagaagatcgaacagttcgaaaactgtagtcaagaccagacagaaactcatgaactttgtcactttcacggtcctgttcttggagaaatccaagatcgcagtcacactttccacatttgcagacacgcacgggacgataatgagccatgttgtcccaaatctggttcagttttcagtagtacgcctcaatggcgagaccacgttgcttgcaacacgccaactccgccttcagttgctgaatacgcggaccattcgtcacagaaaatctcttcttcaagttgtcccacaaatctttggcaacatcacgatgggaaatactcgaacggagagatgaatcgatggacatcttgatccaggacacaagtaaggcctgaatcgtccaccaatcgtcaagatctgcagacccttctgctggcctagcaatcgagccatcaagaaaaccaaatttcttgcgagagcagagagctgttttcatgccgcaagaccattcatcgtagttggatcccttgaataagggatgagagatcacggcacctggattgtcggctgcggtaaggtcgtaaggtgagatggtgcgtcgtgtctccatcgggttaggggtcgtggtcgtttcggtcgcatcagagtttgctggggtggccatcgtttcaaagcaaacatgtttaagacaatagaaaaaaaaattgtcagggctctgataccatgaacaaatagagatcgatgtatgagaaaaagtttcttgtccttattcacagtagcctttacattgttatataggtaagagacgatatctactttcctaaagagatacaaatcagaatcaattcacaataaatgtgattgatattggagcgtatcacattgatacgttaagatacgctattacgctattacaaagtcctaaaaaaaatggattaccgagttacggtcgcatggaaattttaaactaagggtatcagctggtttagaaagtactttatatttggtaagggtttcttatacaagcatttgagttgtgtgccctgaaaatatttgcctctacgtatttctcggtttggccacttggagaaagataatcaaatgctcgtattgactgaatggaagtactagtgtggctgttactagtgtggtttgttgaaaaacaagtctttctttcacgggaaatcgttcagttactttacaagttatcattgcttttattaatggtttatggaaactacaatatcctgtttaggttggttggtatctttcgaaagttaacaatgagacatcactagagagagcttttaaccttcgtcggagtctttctccactatatactgaagtggaagtactagtctgggcagtgccggtcctgacctaaagctgaacaagtaaaggttttaggcgccaaaatatatataacattttgagggcatcaaaacaataagatattttgtagtatagtggctgttccttgtttttttgtttatcatgtcttggatttacgtctcccaagcatcattttgctatattttcaatatttgtctgcaaaaaaaaatagtttgggctttaggcagtccatagtgttggaccgatcctgagtatgagtgatgagatacatgatcgatgaacataaaattgaaattactttcgtcacgaactgccatgatctagtaatattagatttcttcaacacaaaccctttcaaatggcaatttgttttcttacaaatttatcctcaatttacaaaaatatgcaggtcaaacccataaaattcaatttaatctacaatataatccgtcactaccacccccaaatttatcaaagtactcccacatgaggaacgtgagagtgttctacattaacattctattttttggttgaatcatttgtgcttatctatatatttttgaatcatttactttgaaaaaataaagattttgttttatatatctatatagatgatgagataatacaattttttgaaaatagagaaaattaaataaagatgagagggctaattaatattattgaaaattgttttgttctattgaaaaagaataaaaacatccaacacagtaaatacatttttatgatactttacaaaatcaaataagctatttgtgtaaactttgaaaaaaaatacgtgaataaataacttttttttttcttctcactgataaaaagatttcaaagacggtggcgcacataggtattgcgtgtgcaacgcttacctcacatagttttgacacaagctagacttgttaaaccacatgccatcattttcatttctttttatatttcctgcctaatcaatctagcggctcccacagaaaattactctcctccataccaatctttctttattttttgcatctctatctgtcacacaccaattcttattttatgtatatatattgacgcatacatctccaaattaatcaatagcttatctagttcttgactgttcaacgatcaatg

SEQ ID NO: 30299 - DNA, 3003 bp, Unknown
  misc_feature (1)..( 3003): 2750-1469P.txt file - cDNA_ID_3028895; gDNA_ID_2214610; Annot_ID_187349
acttctttgtgggatcttaaggaaaaagattgggatcgtaaggataagcaaagcaaaaaccaaatgcttgaaagtcttctttcaagaaccgaacctctttcagagtgtgacttggttcttaagaagaagctaattgaggagttgttttcataagtaccgaacctctttcaaatgtttaatttctttctaagtacttctaggatttgtttcaatgtcacaacaatgacatgtttaatttgctttgtctgtttttattgcaaatcactttgcttatgtatgatattgtcttaatgttatgtatgatattgctttaatgctttttatgatattgttttgtctcttatcttatgtcacaagtcatatttggccttatatgtcacaagactttgttgttaacttttgcagtttatcatcacgggttggagacaaagatagacaagacacgtaacttgcaactcatgttccacttgatgccaaaagagacatatgatttgtttgctttgttgtcttgtttttagctttgagtctatcaacaatttaaatatgaggtacttttagactaaatatatttaattaaggtatttttattccaataaaaaatattaggtattaaacaacaaaaaataatagatgattttttcaggatttttttgccaaattattttttagtttattatataaaaatattatgctttatttaacatatataaaagataaataatagaatatttattatattatttagtaatcacaaatgatttaaaaatgctaagactgcaaaactactattttttacggtaaaaatgtcatttaatcccccaactttcaaaaaattggccattttatacatcaacttcgtatgtggctgtttaaaacatgaactaaacgttgactaatttttaaaacatgatctttcattgatcaggccaaaatagacatgccgttatcagtcattaacggaacttctaacgtccgttatcatccgttaactttattagtcaagtttcaaattgtggccattttaaacatcaacttcttatgtggccatttaaaacatgaactaaacgttgactaccatttaagacatgaaaaattcgtttacagggccaaaatagacatgtctttatcagtagaacctagaaacccgttaatgactgttaatctgtccaaaacaacgtcgtttgaaaataatcgaaagaacataaagatttttcccatatgaaattccatattaaaaagttttaagcagaacccaagaacatagtttgataaagcgataatcgcagtgccagtaattggaaacaaataaaggtgttttcgtttatatatttgttttaaattttaaaaggaatcatggaagcaaattgaagactcattataagattgttcgtcttgtttgggcggttgtagaaatagatttggggaactagggtttcatttagaaaacaatcctgattttcttttgattattctcaaaacaaagtcgttttaggaatactaatagactcgttaacaagtgataatgaatgttataagtttttttaatgaatgatgacaacatgtttattttggcttggtcaacgaatttctcatgttttaaatggtagtcaacgcttagttcatgtttaaaatggccacatataaagtcgatgtttaaaatgaccacaatttaaaacttgactaataaagtcgttaacggatgataacggacgttagaagttccgttaatgactgataacggcatgtctattttggtatggtcaacgaataatcatgttttaaaagttagtcaacgtttagttcatgttttaaacgaccacatacgaagttgatgtataaaatgaccattttttgaaagttgggggattaattgacatttttccctattttttaccaccttttgcaacaataaccttttatgttgtacatttttaaaaataccccttccctttaacagaatgaccaaattactctcatctaataggaacatgtaattggaaactgaaattttctagccaaatttatttttcccgcaaaaaaaaaaaattccgccaaatttttttcccgccaaaaaaattcccataacaattttttttttcagccaaaaaaatgcttttaaaaatccttgtgaaatatttttagcggaaaatagatttacaaaggattttaaaagagttttaaaagatttactagggatttaaaagagttttaaaatatctacaagggattttaaaaagattttaaaagatttacaagaaattttaaaaatttttaaaaagatttacaatcgaaccgacccgaacctgattggacccgaaccgagattttctatttattctattgaatcctagaataatatacccgatatacccgtacccgaccgggtattacccaaacccgacctgcatacctgaatgtcctgccctactacaaattttgatatacagtattgctaaaactttatcatcgttttgttattaatatgacgcggttaaaaaaatatgagaagtctacaaatttttagacgtagatgagataataaaaaggaaatataacttttctctattattggtatttagtttttataaacaaaatgtttacaaaaaagaataatattttttttgtaataataaactctgtaaattgtgtacttttgtgatatataagcttcaactttctatatactttttaatctttgtttttttttttaatttaaaatctttatataagcaaatataatttatattccactccgtttaaagcaccatcgatgaaaattcccggtggattctcgccggtaggaggagatgtctcaattttcactcaaatcttttttagtttttaccaaaaatatattaaagtaaaaggcaaaaaatcttcaaatttattcttaccaaccaaacaaacaaaaagaatccttgcaaaataatcataaattttaaatattttcccatttaaagagatatgcaagtgagaacttttgagaggcgcaacaacaagatg

SEQ ID NO: 30300 - DNA, 3003 bp, Unknown; identical to SEQ ID NO: 27839
  misc_feature (1)..( 3003): 2750-1469P.txt file - cDNA_ID_3028906; gDNA_ID_2214610; Annot_ID_187342

SEQ ID NO: 30301 - DNA, 3000 bp, Unknown; identical to SEQ ID NO: 13274
  misc_feature (1)..( 3000): 2750-1469P.txt file - cDNA_ID_3028921; gDNA_ID_2214610; Annot_ID_187334

SEQ ID NO: 30302 - DNA, 3000 bp, Unknown; identical to SEQ ID NO: 25054
  misc_feature (1)..( 3000): 2750-1469P.txt file - cDNA_ID_3028937; gDNA_ID_2214610; Annot_ID_187330

SEQ ID NO: 30303 - DNA, 3000 bp, Unknown; identical to SEQ ID NO: 13288
  misc_feature (1)..( 3000): 2750-1469P.txt file - cDNA_ID_3028969; gDNA_ID_2214611; Annot_ID_187386

SEQ ID NO: 30304 - DNA, 3003 bp, Unknown; identical to SEQ ID NO: 25057
  misc_feature (1)..( 3003): 2750-1469P.txt file - cDNA_ID_3028977; gDNA_ID_2214611; Annot_ID_187378

SEQ ID NO: 30305 - DNA, 2614 bp, Unknown; identical to SEQ ID NO: 13278
  misc_feature (1)..( 2614): 2750-1469P.txt file - cDNA_ID_3029005; gDNA_ID_2214611; Annot_ID_187362

SEQ ID NO: 30306 - DNA, 3003 bp, Unknown; identical to SEQ ID NO: 26421
  misc_feature (1)..( 3003): 2750-1469P.txt file - cDNA_ID_3029020; gDNA_ID_2214612; Annot_ID_187424

SEQ ID NO: 30307 - DNA, 2543 bp, Unknown; identical to SEQ ID NO: 13299
  misc_feature (1)..( 2543): 2750-1469P.txt file - cDNA_ID_3029125; gDNA_ID_2214613; Annot_ID_187450

SEQ ID NO: 30308 - DNA, 3000 bp, Unknown; identical to SEQ ID NO: 13300
  misc_feature (1)..( 3000): 2750-1469P.txt file - cDNA_ID_3029129; gDNA_ID_2214613; Annot_ID_187445

SEQ ID NO: 30309 - DNA, 3000 bp, Unknown
  misc_feature (1)..( 3000): 2750-1469P.txt file - cDNA_ID_3029133; gDNA_ID_2214613; Annot_ID_187444
tagctcccccttcaacctcccaggcatctatcaattgccatgaaggtcctccaataattttttttgtagaagtgttagtatcatttcccataatcacaactcttaacaagttttttttttgttttgtcccttttcttctatgaaggtggtgcacgctctatctcggtatttgataatgacattggtagtggttcaatttctcctatgattgtgactggtggcaaaaatggtgatgtcggtttgcacgatttccggtttattgcaaccggaaagatgaagaagcaaaggaaccctgacggtggatcttcgactgatggagatcaaaacaagaatgggatgctttggtatataccaaaggctcacttaggtgcacaccctaaagcctattttcaccttcatattccaattttaccggaaaaatatcctgaaatttgattgacattgatgcaaatttcagggagtgtgacaaaaatagcgacaatcccacgcacaagtcttttcttgacgggaagcaaagacggagaagtaaaactttgggatgcgaaagctgcaaagttgattcatcattggcctaaactacacgaaagacacacttttctgcagccaaactcgagaggctacggtggaatcatccgggttagtgaaccaaatcacctaaagcataatcctttcatcgtattttctcacagtggctttggtttcttagtaaaccagaatcaaagtaatgtcggtgtatgtaatcgaatttgggtatgtgttacgaatttggtgtaggctggggtgactgacatacaagtttgtccgaatggatttataacgtgtggtggtgatggcacggtgaagttcgtcagcctcgtagattcttcctatggcgatgctaaataaaaagaagatacattttccgggaaagttttgcagtcgagaaaacgagttattgctaccttgcgtgtgtttattgaatacgtgattttttgtgatgtagtttttttctctatatggtttaatatttgtgtatatacaaatatattaaagattatgaagcagtagaatcttgagttgaccataatccagattttaatttatctttgacttgacttcaatctatactcggaaatatcatctatttatctttgacatagttttcgttgactttgttgcatcagatttagaccagattaaatcggactgattccaattagattggtgttaagtgtagtgcaatagaaccgaaaataaacattatcaagatttagttcgttattgtaattttttttctttctttttggtgttggtttggtattagctcgatatagtttaataagattatgaaaaattgacggctaggaacctggccactatcgtattacgtagtggaatattatcttatggttgattattaaactgctccataatttgtgttgtagtcttgtagacgaaatgatatgaatcatcaaaatgtttgattaaaaccccatttgccaagaattattcctaaaactattaagttaaggcaaaggtccatttcattaataattattctaaagaagttagttgtatatatagtatatatatagactatggtgttaattatgactgaatatattagtgctcacataaagcatcttattagaatatcttagattgcttaaataattattaaccacgtaataaataaatctcatgtaacactatcaattggagaataatggagagagacaattaaccataatgacttgaagacacttggcttcacctaacattcaatttcctagacgaggccactatttacattctctttacctaactttcagaactacattaaaccaaattgacatgtaaaaaacctaattttatattttcaacatgtctatttaccattggccactttattacttaaatgaaaacgatgtcataaaaaatattagtagaccctaacttgaaatttaaaatttaatcgatcatttaaaaatcaaaatcattcgacgcaattactacaagatttttatgttttaaccaaacatttatgacgtaatctaccatcgcgcgtaatcgtatagtgataactgataagataaaaggtcttatccgttaaaaaaggaaagggaagccttttttagatcttcttttttgtcgccacgtgtaattaatatctaatcgaacggctgtcaggtgaaatctatgggcaaatctgtggactcaaatactcattaacataactatgggtcctctcagaaaacggtgccgttttgcggaagcttgcgtgctgaatgacacagagactaagaaaacgataataaactgcaaaatgattcaaaagattttaatcgaaagcaaacaaaaattctctgacaatcagaaaacaaaaaaaaatcagaacaactcttatcttcttcacgagactgactaaacaatcatagatttttccgttttttgggtttcgtctggtgttactctctccttctggttagttctttttttccgaattcttacaaattattgcggtttcattaagatgaattatgatttggatcaccatccgttgtttttgtgtccggttttgattcttaggtctaatcgcgtttcatgttttttttttgtgttcttctgggtttgataattttatagttgaagttttatgaaatttgatttcaattgcaaataatgatgatttgtttagtaagttgataaattgacaaagaatctggctttggtttttgtttgcttctaagaaaattaggaactaattcttcaatttacctggaaagcaaaacatatcagattctctaaaaagtagttttgtaataagcttttttggtgatggatctgtcggcaatcagaaagattcttcctttgaaataaatgattcatattatttttcctataaatagattcaaaacggttaataagattttgctaaatctacctaatttctaaatcacattgatcttgaattgaattctcagtctcttgtcttatctttagagttatggtgaaataatg

SEQ ID NO: 30310 - DNA, 3003 bp, Unknown
  misc_feature (1)..( 3003): 2750-1469P.txt file - cDNA_ID_3029264; gDNA_ID_2214615; Annot_ID_187517
aagatcgtaacccccgatggtgcttgccttctttattccacactcatctgggttcggctctgataccatttgtaacgccccaatcgcccctactagtgggccccacgtcctctctcttccccatgggcccactcatgtccgacagtcggtgcgccatgttcgggaggctttaaagacttgttaccgaccctacaagtcaccacacgatctttccccatactttgtcttcactcgtatcgttcgaaaatcacttctcggaaagtcacccatcctgagacaactccagcccaagcacgcttaactctggagttctctcaagacctttaaccgaaaagataagtgcactttagtgacatagatgaccaaatcaattattttaaatctctctggatgcaccaccatattcctgaaaccggggtgttacaactggaaagaacagttcctacgcttttcctttgagtctcctttaaaaatagttttgtaggaaattggacgaaaatgtttccgactattttcctaccactatatttcctttcgttttccttctattttcctacgagatttcctacgatttcataagtcgtaggaaattgaatagaaatttccttcgaaaaactgacgaatattttcgacggaatataaatttggtaggaaattggaaggattttggtaagtgttttgtcttacaaaaatttggtaggaaattttgtcggaaaatacaatgttttcttgtagtatatagccacccattatcatcttttgttttatttgcagatgatttagatgtcttttgatttccttttcctgtgatttaatttaagagttgtttgagaagaagtaatctaaaatttgtttagcatttgtaacatatttgttagtttttatggattgctgtcgaattttaatatttataaaaatattattagacttggtggtaaatcatttggtgtattgaaagatcgtttataaccaatgtacctttaagctttccagtagctcttttcgccaatagtattgcatggagcatttgtcaggtttttctttgttcctctacaaatatataatattagtattgttccatttgttaaatgtagtttactattatttgccgacgtattaacttgaatacccaaaaaactttttttttatatattttatttatatatgtatccagaaaacttagtttatagtcgtttggttttcctcggcgtacactgatgtttgacatgtaaattgtactctgaaatggagaatttgtataggaataaagtaagtttgtttgtttattttttaaagtagtgatcgtaaatgcattatttgatactattattgagagatggtaaccttactttgtctttgattggtgcattgtggttcttcatgagtctctttttttcttttctttttagctgcctgagttgaagtttgtaagtagccttttctcttacctaaaggttctcgcttcatgatttttaattgtttttttacttgatttctttatttcgtaccatcagtttgtggttttatttggttttcttatgagattgttgtctttagtgtaatgatgtagtaaaaagcttgtaatagtgagacgaattcttttcgtgttcttttgttttgtttagtataagttttaagtataaccaatattaaattctccacattgttttttagttaatgagtggttatatcctcgatagattaagggtcttgtgatttagatgttttacgttacacatacgaatttattgtctttggtattaatatattttcaaaaactaataatattgaactcctcttatttctaagaaattggagtctttgggaaatcttttatattaggttgtctttattataatccggtagatatgtttttaatggaattacatgaatacatttgtcaagttattccttttaattatttattttaacaatattataatagctacttgacaaatcgtaattagttaaattccccaatgtcttcagttttttttgggttgcctctttggaaactctctacggcaacgtcttcgctatttcggttcttaaaattatgattatatggctgataaataaatgtaagagttggaatttatttgattaagaaacttccttacaacatcaaggaatataaactgcatagaaaaagaaatagtaaaaaaaaaagaaataacaaaaacagctttgctttgacactgtgataacccacaactctataagcattaaattaagggtaaattatatacagtagccgttgacccacttttattttctgattttgacattgtgggctgggcctttcaattcttaacctttcagccaaaaactaaccaaaatgcccttgacgcttcctgaccgggtttggacgtacggactgcgtcgttggaatccaattgaagcgtacactgttcaccgacgggaagtgcattaaatgttttctgggtttcggcgaatttgacactgtaacttggaattaaaatttttaaaaaaattgttgggctcagatgttttaaatgctaaaaagttttgacaaaactaaaactcatgattacctattataatagagattatattataagatatttacataattgagattagaattttggacaaaaaaaacgaatccaaattgtgttacggtgaagaatctgaagttttcagttgctgtttaacaaagtttgaacgtttgaacgggagacaatctgtgatctaggtaagaaattcgtgttattcttatgaattacacctgagaacgtgatatgaaagtaatgatccgtttttaaaaatttctaagttcataaattgttttgttggagattctttttgtctttgtagatataaatgaaagccctttgatctgttttgttaaatttctaagttcataaattgttttgttagagattctttttgtcttcgttgatataagtgaaagccttcaaaaagatctgattttttgtatttaatgttgttctgacctgaggaatttatgttgcaggtatg

SEQ ID NO: 30311 - DNA, 3000 bp, Unknown; identical to SEQ ID NO: 13317
  misc_feature (1)..( 3000): 2750-1469P.txt file - cDNA_ID_3029395; gDNA_ID_2214616; Annot_ID_187536

SEQ ID NO: 30312 - DNA, 3000 bp, Unknown; identical to SEQ ID NO: 13322
  misc_feature (1)..( 3000): 2750-1469P.txt file - cDNA_ID_3029433; gDNA_ID_2214616; Annot_ID_187524

SEQ ID NO: 30313 - DNA, 3003 bp, Unknown; identical to SEQ ID NO: 25070
  misc_feature (1)..( 3003): 2750-1469P.txt file - cDNA_ID_3029439; gDNA_ID_2214617; Annot_ID_187573

SEQ ID NO: 30314 - DNA, 3003 bp, Unknown; identical to SEQ ID NO: 25071
  misc_feature (1)..( 3003): 2750-1469P.txt file - cDNA_ID_3029443; gDNA_ID_2214617; Annot_ID_187572

SEQ ID NO: 30315 - DNA, 3000 bp, Unknown
  misc_feature (1)..( 3000): 2750-1469P.txt file - cDNA_ID_3029476; gDNA_ID_2214617; Annot_ID_135817
aaccacacgcaaaataatcgtaagtagagacgttgtttctgatgaaactaaaattttatggtggaatgatctaggagatgagtcgggagaagaatcaggaaccttttttctcggttttgaagcatttggaaataacggactaagaagagaagatgaagaatatgcctctgagacaagcgagaacagcatagaggaagaaggtactactcgtatcggggaaatcagaggaacagaggaaaacagagaaactgagacgatgatacaagtagaagatcaggcactagtcaacacataacctgtactaagaagatctcagagacaagtctcaaggcctaagtacttaaaggattatgttctacttgctgaagaagaaagtgaacatctgctctctataataaacgaggaaccttgggattatgctgaagcaaaagaaacacgagagtggagagcgtgtgaggacgaaatcacatcaattgagaagaacaagacatgggatttagtggaacttcctcaaggagctaagccaattgggctcaaatgggtgtttaagctaaagaagaacgcagacaggagcataaacaagtataaggcaagactcgtggctaaaggttacgtacaacgacatggcatagactttgacgaagtcttttcccttgtagcacgaatcaaaacagtccgcttcatcattgcccttgctgcttcaaacggatgggaggtgcatcatctcgatgtcaaaacatcattcttacacggtgaattaaaagagacagtatttgtttcacagccagaaagattcacagagaaagggagtgaaggcaaagtatacaaattgaataaagcactctatggattaagacaggcgcctagagcatggaacaacaaatttaacaagatacttagggaattaaagttcatcaagtgttctaaagaaccatcgctctatcgtaaacaagagaaagttgatcttcttttagtagcagtgtatgtggatgatttgcttgtttcaggttatagcttaaagctcattaatgatttcaagaagggaatgtcatctaagtttgagatgagtgatctcgggttactcacatactatcttggaatcgaagtaattcagcataatggaggaattatgttgaaacaatggagatatgcagaaaagatcctagacgaaaccaagatgagtgattgcaacgcagttcacattctaatggactccggtttgaagctgtcaaaggcgggaacagagaaaggaagtcatgactcggagacagagaagaacattgagccaaaagagtatagaagaagcattggatatcttcggtatctgcctcacacacgacctgacctctcatactgtgttggcgtgttgagtagatacatgcaagaacctaaagaaggtcatggagtagctatgaagcagattctgagatacttgcgtggcactacctcctacggactactttcacgcgaggagacaattcggggctaataggtttcagtgataacagtcacaatgtagacgaggatgatgggaggaacacaaccggacatatattctaccttgatggctctccaataacttggtgtacacaaaagcaagaaaatgtggctttatcgtcttgtgaggctgagttcatagcagctacagaaggagctaagcaggcaatttggttgcaggagttacttggagaggtaacaggaaaagcatgcaagaaggtgaggtgctcattgacaacaaatcggcgatagcacttgccaagaatccagtatttcacggccggagcaaacacattcacaagaggtaccatttcattcgtgagtgtgttgagaatgaccaaatagaagtggaacacgttcccggagaagaacagaagacggatcttctaacaaaggcacttggaagaatcaaattcaaagaaatgagagagctagttggagttcaagatttgtcgaaatgtgatttcaagcttaagagagtgaatgttgataagcttgaagttagcttgagaaataaactaaccaaatcctaagagatttaggataagattgtatttaggagatatctaaatttagtagttatctaatgttattaggagttatctaatgactaggagctttcatataaatagagataccaagttgtggtaatcctattgagaagtttagagtttgagagattgagagttttggtgagagctttaggttttgagtaagtttcttaaagattaataaagagtgagtttttatatacaccattctcttgttctataattcgatactaaaaaatagtccaatgtctattaataatatctcgcaacccaatacataactgtcatgtaaatatttagttttttttatattttttctttttcaataccgacgtcaagattttgtgcatatatctttagaagcattaaatgctgctgcatcattacgtatctaacaatatctgctttaataggggtaaaaacgtcagaaattattgtaaaggaagaaagatgtttaaatatagaattatctagcacacttttttaatttctttttttctgagtatatatatatttaactcaccaaaagaaaaaaatttaaatgtttggcaagaaagatagtaaaagaaaatgaaacaaaaataataataaatttagaaaatttgttggcttgacaataaaaaaaaaacttttttcaataaatagaggatgtttatgaactaaaacttaaacaataaaatgtttttgaagaaaaattgaattaggttggtattcaattttaaatcatgacagcaatgtatccacacatgttcaaaaaaaaatgaatctagggaattgtgtcaattaaccatgtatgatttcaatatctaaaatctaacaatgatgaaagtaaaaagaaaaaaacaagtttgcataaaaagaagaaacagaaatagaaagccaacacaaaacagtaatctctcagactacaactttactcacttcaccagctctctctcacttgatgacaatg

SEQ ID NO: 30316 - DNA, 3000 bp, Unknown
  misc_feature (1)..( 3000): 2750-1469P.txt file - cDNA_ID_3029476; gDNA_ID_2214617; Annot_ID_187562
gggtccaaccacacgcaaaataatcgtaagtagagacgttgtttctgatgaaactaaaattttatggtggaatgatctaggagatgagtcgggagaagaatcaggaaccttttttctcggttttgaagcatttggaaataacggactaagaagagaagatgaagaatatgcctctgagacaagcgagaacagcatagaggaagaaggtactactcgtatcggggaaatcagaggaacagaggaaaacagagaaactgagacgatgatacaagtagaagatcaggcactagtcaacacataacctgtactaagaagatctcagagacaagtctcaaggcctaagtacttaaaggattatgttctacttgctgaagaagaaagtgaacatctgctctctataataaacgaggaaccttgggattatgctgaagcaaaagaaacacgagagtggagagcgtgtgaggacgaaatcacatcaattgagaagaacaagacatgggatttagtggaacttcctcaaggagctaagccaattgggctcaaatgggtgtttaagctaaagaagaacgcagacaggagcataaacaagtataaggcaagactcgtggctaaaggttacgtacaacgacatggcatagactttgacgaagtcttttcccttgtagcacgaatcaaaacagtccgcttcatcattgcccttgctgcttcaaacggatgggaggtgcatcatctcgatgtcaaaacatcattcttacacggtgaattaaaagagacagtatttgtttcacagccagaaagattcacagagaaagggagtgaaggcaaagtatacaaattgaataaagcactctatggattaagacaggcgcctagagcatggaacaacaaatttaacaagatacttagggaattaaagttcatcaagtgttctaaagaaccatcgctctatcgtaaacaagagaaagttgatcttcttttagtagcagtgtatgtggatgatttgcttgtttcaggttatagcttaaagctcattaatgatttcaagaagggaatgtcatctaagtttgagatgagtgatctcgggttactcacatactatcttggaatcgaagtaattcagcataatggaggaattatgttgaaacaatggagatatgcagaaaagatcctagacgaaaccaagatgagtgattgcaacgcagttcacattctaatggactccggtttgaagctgtcaaaggcgggaacagagaaaggaagtcatgactcggagacagagaagaacattgagccaaaagagtatagaagaagcattggatatcttcggtatctgcctcacacacgacctgacctctcatactgtgttggcgtgttgagtagatacatgcaagaacctaaagaaggtcatggagtagctatgaagcagattctgagatacttgcgtggcactacctcctacggactactttcacgcgaggagacaattcggggctaataggtttcagtgataacagtcacaatgtagacgaggatgatgggaggaacacaaccggacatatattctaccttgatggctctccaataacttggtgtacacaaaagcaagaaaatgtggctttatcgtcttgtgaggctgagttcatagcagctacagaaggagctaagcaggcaatttggttgcaggagttacttggagaggtaacaggaaaagcatgcaagaaggtgaggtgctcattgacaacaaatcggcgatagcacttgccaagaatccagtatttcacggccggagcaaacacattcacaagaggtaccatttcattcgtgagtgtgttgagaatgaccaaatagaagtggaacacgttcccggagaagaacagaagacggatcttctaacaaaggcacttggaagaatcaaattcaaagaaatgagagagctagttggagttcaagatttgtcgaaatgtgatttcaagcttaagagagtgaatgttgataagcttgaagttagcttgagaaataaactaaccaaatcctaagagatttaggataagattgtatttaggagatatctaaatttagtagttatctaatgttattaggagttatctaatgactaggagctttcatataaatagagataccaagttgtggtaatcctattgagaagtttagagtttgagagattgagagttttggtgagagctttaggttttgagtaagtttcttaaagattaataaagagtgagtttttatatacaccattctcttgttctataattcgatactaaaaaatagtccaatgtctattaataatatctcgcaacccaatacataactgtcatgtaaatatttagttttttttatattttttctttttcaataccgacgtcaagattttgtgcatatatctttagaagcattaaatgctgctgcatcattacgtatctaacaatatctgctttaataggggtaaaaacgtcagaaattattgtaaaggaagaaagatgtttaaatatagaattatctagcacacttttttaatttctttttttctgagtatatatatatttaactcaccaaaagaaaaaaatttaaatgtttggcaagaaagatagtaaaagaaaatgaaacaaaaataataataaatttagaaaatttgttggcttgacaataaaaaaaaaacttttttcaataaatagaggatgtttatgaactaaaacttaaacaataaaatgtttttgaagaaaaattgaattaggttggtattcaattttaaatcatgacagcaatgtatccacacatgttcaaaaaaaaatgaatctagggaattgtgtcaattaaccatgtatgatttcaatatctaaaatctaacaatgatgaaagtaaaaagaaaaaaacaagtttgcataaaaagaagaaacagaaatagaaagccaacacaaaacagtaatctctcagactacaactttactcacttcaccagctctctctcacttgatg

SEQ ID NO: 30317 - DNA, 3003 bp, Unknown; identical to SEQ ID NO: 25077
  misc_feature (1)..( 3003): 2750-1469P.txt file - cDNA_ID_3029569; gDNA_ID_2214619; Annot_ID_187614

SEQ ID NO: 30318 - DNA, 197 bp, Unknown; identical to SEQ ID NO: 336
  misc_feature (1)..( 197): 2750-1469P.txt file - cDNA_ID_3029569; gDNA_ID_1564001; Annot_ID_148663

SEQ ID NO: 30319 - DNA, 3000 bp, Unknown; identical to SEQ ID NO: 25074
  misc_feature (1)..( 3000): 2750-1469P.txt file - cDNA_ID_3029581; gDNA_ID_2214619; Annot_ID_187609

SEQ ID NO: 30320 - DNA, 3003 bp, Unknown
  misc_feature (1)..( 3003): 2750-1469P.txt file - cDNA_ID_3029601; gDNA_ID_2214619; Annot_ID_135839
catctgcaccctcagggatttctccacagtcatggatcacaacatcctgagaaggacaagactgttcctctatgctaacatgctcaatcgaccgaacaacacccattcctttcgtaacccttccaaacacaacatgtttcccatctaaatgagaagtgcgagttgtcgtaatgaaaaactgagagccattagtgttgggaccagagttagccatagagagcatccctttcctctcatgtttcagctcaaaattctcatcgtcaaacttcaagccatagatagactcaccaccagtaccatcattagctgatatatccccaccttgtatcataaaccccttgataacacgatgaaatcgattcccctgtaaacaaatacaccaaataccataagtacatcatcctatagtacaatttcaacctaaagttttgatctttacctcaccactacaaactacagtaacctaattgcaatactgaaacaaagtcagaagctattcagcaatacgagcaaaaacccattaaacctcaaatcataagcattcagaaccattctatagtacaattgcatcctaaagttttgatctttctttcacaactaattgcaaatttaaccaagttttgatctttataaaccccaatgacgaatgacccattaaaccacaaaccctaaatcacagaaacaacaaatacccatttctacatttcatacataagagagtataaacaaagatatagagagaaagagagaaccttgtaatggagaggtacaccagtatttggacctaaacccttctcaccggtacagagtaatcgaaaattctcagcggttttgggaacaacatcatcgtaaagctcaataacaatccttccttcaagctcacctccaatgctaatgtccatgaaacactttgacctacccatcttcttcttcttcttcttcctcttgctttcttgaaaccgaaacaaagacgagacagagagagagagagagagagagagagagagagagagagagagagagagagagagagagagagagagagagagagagagaaagaatcagaggaagagacaaagaacaatggtgtgaatctctgtctcagtagcttccgtctctaaaagactgtagacggggacttgtctcttattaaacgcagaaatcaaaacgacagatagaagaaaaccctaggacccactttcttcctccaacaaattttgtctctttttatttatttttaacttttaattaatttatttattacttgctgccaaaattaaaaaataagaaatttattactcgtcccttcgggtacattccataagagtggatagtaggtgattgcccactatggccactacacaataaatatttggttttattatttctttttcttaaaaattatttaatttttttgcaaaatattattctttttttttagggaaaaaatctaaaaaaaacccaactattttttatttaaaactttaatacccaattgtttttgattggaacctaaagttccaaaatattaaattttgttcaagaaaaacactatttaattgttcgtggttaaatcattcatgcgcgttaacagacgttaatttggctgacggaatcactaaaccggggttaatggttaacaatccgcggtttaattgactaactaaaagactacagtaccctcatttgttttcccccaaatcgatttgggattgagaaaccctaactccccaaatttctaatttctctccaaaaaacttagaaattgaaagaggcgatgattcgaagcgtttgatcgggtatatctgcgttcgatccagttggtaaacagtcgaaaagatgaggtatgtcgatttgtgtgttgtgggtctgtcgatttgaatttttagggttcttaagtttgaaattttctgggtttgtttgaaattgggttaggggttatgaatcagttaggttatagtttgtttaccactactaatcggttaatttctattttccagtgatttcgagtgtttgaaactcaacataaactatagaggcgatgtatccttcacggaccaagggttcgattactctggaggggtcgaggcgaaagacatggtgatggatcctgatctgatgacatggtctatattcgacgattcttgcaaagaaaatggagtcaatggtgaagtcgaatcgatttggtacaagcttccagaagaggaaatctattcagcaagagttatcggtgccgacaaagatggtgggataagggagttatgtcgtgaggcgatgattggtggggaagttgacatatacatcgtcaatgccgtctctgtacctgcagcttttccgcttccaaatgatgttgtagaagacgaggaacttggagttgaggatgatgatgccgaagatatcatagacgaggagcctgcagcagaaactaatgagtgccctgaaagagtacaagctaatggagaagatccagtagaagaaagaaggcacgatgatcctcggtttgaggctttctttgacgaaattcacaatggtacagaagctgcagatgatgttgttgatgatgctgcagctgaagacattaacacagtaccagaagaaaccgttgctgaagaggttgaagatgaagatgaatttgagagacagtgttatgatgtagagcgtccggatcatgcaatggacacagatgatgaatgggatgcgtatgaccaagcagaaagatcatcatctcgacagaagttttcgaaggataaacctccatacatttggatgttgcagactttcaatagtggttaagaggttaaggatcaactcttgcggtatgtattgaagatgaattatgatgtgaagttgtgtagatggggtgcaaataagttggcagcaatctgcagccatgaaaattgtgagtggaagatatactgctccactcataagcgttcaggtatatggagagtataaacttatgttgataagcatcaccatgctaagagtgggaaagcaaaaatg

SEQ ID NO: 30321 - DNA, 3003 bp, Unknown
  misc_feature (1)..( 3003): 2750-1469P.txt file - cDNA_ID_3029601; gDNA_ID_2214619; Annot_ID_187600
tttaagtacctggccttgtcgaaacaatgctttaacattgttatcttcatcacgcatagcaaattcagtgtccaacaacgctccttttgcatctccgaatttgagtttgcaggcctgccacaacagccagttacaatacaatgagataacatagtaaaaaaaaatcggttatacaggcacaacaaagcaattaagttggacaagtgaaaacactggcaacgtaaacagagatgcaaacaataattcatatgagcaatgtatgtcccacaagcataatctcagagaatattatcctgcttatgtcaaggtcaacctaccctactttttcccaagaaattaatcaaacagcagaaaccaacataaatgacaggtctgcagtgtagagcacttcaaattaatttttagttcacaatcaattgcttatcattctatcgacggtacagctcatccgtaagaattaagcagattcaacaaaaaaaattgtaatgttaaaaacccaacagagtaagaaatttaagttcttttggaaaaatcaacgactccaaagacaatcaatcttcagatggtacgtaaagcacacacacatataaggtagatatgttcaacttacaagaaaagatatcaacaaggatgtatgtagctttaaaaaaggtgtaaaagcatgatgaacttacagcactattagtgaagatctgcgactttgtcttacgcaaggcagtactcgtctctacaagatcccaagtagagagtgagtgggaacattggtatggatagtataaatattttttgagatgaagtaagtggaaacatatatagagagaaaaactgataaaccaccttcatcaatgccctctttctcccagcaaatatccagatagcgtaaagccttacggtactttctaagagccatcttatagtcttgtttctgagagtaaatcaaggtcaaaaacagatcagactcacagaaatgaaaatatggaacagacaaacgtatatattcaatttaaaacaatggaaaaagcaccttaaagtgctcattcccatgagccttgacaaaatcaacagtctccatccaccaagataactcagctgggctttcattcagatcaataggccagtcagggtacacatcaccatccttgaaaaagtcacaaatcccatcatctgcaccctcagggatttctccacagtcatggatcacaacatcctgagaaggacaagactgttcctctatgctaacatgctcaatcgaccgaacaacacccattcctttcgtaacccttccaaacacaacatgtttcccatctaaatgagaagtgcgagttgtcgtaatgaaaaactgagagccattagtgttgggaccagagttagccatagagagcatccctttcctctcatgtttcagctcaaaattctcatcgtcaaacttcaagccatagatagactcaccaccagtaccatcattagctgatatatccccaccttgtatcataaaccccttgataacacgatgaaatcgattcccctgtaaacaaatacaccaaataccataagtacatcatcctatagtacaatttcaacctaaagttttgatctttacctcaccactacaaactacagtaacctaattgcaatactgaaacaaagtcagaagctattcagcaatacgagcaaaaacccattaaacctcaaatcataagcattcagaaccattctatagtacaattgcatcctaaagttttgatctttctttcacaactaattgcaaatttaaccaagttttgatctttataaaccccaatgacgaatgacccattaaaccacaaaccctaaatcacagaaacaacaaatacccatttctacatttcatacataagagagtataaacaaagatatagagagaaagagagaaccttgtaatggagaggtacaccagtatttggacctaaacccttctcaccggtacagagtaatcgaaaattctcagcggttttgggaacaacatcatcgtaaagctcaataacaatccttccttcaagctcacctccaatgctaatgtccatgaaacactttgacctacccatcttcttcttcttcttcttcctcttgctttcttgaaaccgaaacaaagacgagacagagagagagagagagagagagagagagagagagagagagagagagagagagagagagagagagagagagagagagagaaagaatcagaggaagagacaaagaacaatggtgtgaatctctgtctcagtagcttccgtctctaaaagactgtagacggggacttgtctcttattaaacgcagaaatcaaaacgacagatagaagaaaaccctaggacccactttcttcctccaacaaattttgtctctttttatttatttttaacttttaattaatttatttattacttgctgccaaaattaaaaaataagaaatttattactcgtcccttcgggtacattccataagagtggatagtaggtgattgcccactatggccactacacaataaatatttggttttattatttctttttcttaaaaattatttaatttttttgcaaaatattattctttttttttagggaaaaaatctaaaaaaaacccaactattttttatttaaaactttaatacccaattgtttttgattggaacctaaagttccaaaatattaaattttgttcaagaaaaacactatttaattgttcgtggttaaatcattcatgcgcgttaacagacgttaatttggctgacggaatcactaaaccggggttaatggttaacaatccgcggtttaattgactaactaaaagactacagtaccctcatttgttttcccccaaatcgatttgggattgagaaaccctaactccccaaatttctaatttctctccaaaaaacttagaaattgaaagaggcgatgattcgaagcgtttgatcgggtatatctgcgttcgatccagttggtaaacagtcgaaaagatg

SEQ ID NO: 30322 - DNA, 3003 bp, Unknown
  misc_feature (1)..( 3003): 2750-1469P.txt file - cDNA_ID_3029658; gDNA_ID_2214620; Annot_ID_187656
aaaacaaataaaatgtgataagaaacaataaaaccattttgaccaaagttcttatagttttaatattctttaattgtcatttgttagtgactaataatattacattaaacctaatgtataaatagaagccccatcttctacgcctttataattagcaacaaccaaaaacattcatttgtcattttgtctcctcttttgttttctctgatcactagtatggctgtattcagagtcttgcttgcttctcttctcatatctcttcttgtcctcgacttcgtccatgccgatatggtggtacaattttaacaaccaaatatattttcttatttgattttattttttcacaacttttgtctacgttctaatggaatttttttcaaaatattcatgcagacgtcgaatgacgcccctaaaatcggtaatatctctatcatataaacacgtacgttgaatttctatatacgtgtgtttaattgaagttttggttggaaattgtatgtatttgtagattgcaacagcaggtgccaagagcggtgcagtctttcgagtaggccaaatctttgtcacagagcgtgcgggacttgctgcgctaggtgcaactgcgtggcaccgggcacatccggaaactacgacaaatgtccgtgctatggtagcctaaccacccacggaggacgcagaaagtgtccttaaaaactctgtcgctgtttgatttgatttcgtttataatactttacttttatgagagtaattgtggttattttcttgggaattattaaaaagcaaaagaaagagaatgttatacgtcatgtgcaactcttcgatctttgttttagtgtttatccaatttgtacttgttggtttggttcctggttaacattaggtctgaaaaggtattgtttttcattatacaattcactaaataggcatcgtacttgcatataaaataaagaatgaagagagaagtaaaagagttttctttttttactcatggaagttaggcaatgggtttaaatatggtaacaacagaattggaggggacttaatgaactatgacgtaaaactgagagcgattgaatatgtaacgttaccaacaataccaataaaattatgaaagatagtatatgaaattacgtttaattaatgtttccgggttgaatgtattatatatagaagtaacagtacgatttttattacatttttgtacaagattcctagaaaggtataacctctataaagttaataatagtcttgagtcttgactcttcgaggcaaataaattcaccgcataattaatcgttcaactattattctatattctatataacatgagcttcaacaaaagaagcatcaatcatatcttcaacagtatactgcagtgtaatgtaacatattcaagatcaaaccggacaaaaaagcaagataccgtcgaaacaatcaaaccccatgtatcataaactcccatcttctctttcctaaattccccgtcgcttgcacaatccgcaattcaaaagcaacacaacactagtcacgttaagcaaatagtacatcttccagagttcagtgtgggacaatcctgttgatcacaaagagcaataaaaaaggttgtttcaagcaggagggaggatattgaaacaaatggaagaagaaaatgtttctgttctttgaaaattaataaattcacgtaataataggagaactatcagtcgaagggtaagagaaaataaattaaatataatcatcatttcaaaagttgaataacttagtttattttaaaaatgacgaataaccagaactgggtggattcgaaccaccaacctctcgtccactagaagaaaacgagcgctctaccaatttgagcttacagatctatatcacgaataccctaccactacggcccacagccaataggaccaacacttgactctttaactctattttaatcacatattaaaaatatttctgtttttagagaattcaatatttaaacaacttctaattgaagaccaaaagatgaacttgactaaacatgaacggtgatgctaaactgttttcaagacacaatttcacgagaacaagagactagataggaaaattgcaataagcttttctcattatataaaatgttataatgattgttctcttccacaacaggccacaataaactaagaaaataaaatgtaatgaactataaatatcaggaatttttgacttagcacataaccagatactatcttttgatcaagatacctttcaagaacaaatcaacttcagaaaaaaccaacgtcagctttgcatagcttcaattccgtcgtctaccagcttcatagttactacaggaactggtggttacagacatatacaaactacgagcaaataaaaatgttctttaccatattctaaaaagcttctaaacggatagaactaataaaacaataccaatgatacatacaaagaacccgcaaaattgtttaacagcaattcttaataccatcattttcaatagattaaatgacaacttgtaaaacaataattgatcaataagataaataacaaaaccaataaaattaaaatttcatgattcgcataagcgttgatacaagttaacaattagggcaaccggattatggtttatttaaatccagaattcctcttgcagattatgtttaccttattatgctaattaagaattcgatttaatatggatatgagtacctgatttaactctcgaggttgttgggcaagaagatttgtaatcgcccactgctccatattggttacaaactctgcttatgatcggtttttgagtgtatatgagcatttaagaaagatatgaaatgtgaaagagcagggagagagatagagcagaggcaagacgacacacacagaggagaagagatcccgggaaaaaataataacccgtgcgacctcctctccaaaacccacaaaatcttttttttattgaggatcagttttttgacctgccatgcaagcgcacctgacatg

SEQ ID NO: 30323 - DNA, 3003 bp, Unknown
  misc_feature (1)..( 3003): 2750-1469P.txt file - cDNA_ID_3029664; gDNA_ID_2214620; Annot_ID_187654
gaaagaattttaccatctatgaaatttgtatataattaaacactatgtaaccaagtgattaattatatacggatagcttgagaaatcattttggtagattgagaaacttttgtctcctggttacggatagcttgggaagggtctctactttatacctattctggtttctggcttaaaagaaatttacaaatttctaccaaaacaatcatctctaattacgaatatgtagtgtgtttaatgtactgtatatatatttttttgagttttagaccaaagatcagattctaccaaaaatgactgtgattcttttaactatattgtagatgccttaaataaaagaaattcaaatacttttgagattagtctaacatataccccaattatcaaagaacaaacatattttctgcgcaattggcgtagctactcctttaggttattttgaaaattatcaaagaacaaatatattttcgttctaaagtttaatatccatttgattattttgaaaatttggttcggtttcggttcggttccggttctttcagttttaaaatttagttaccatttagttattttgttttgaatatttttggatattttgttattttgggatattattggatattttcggataatttttgcttatttttgagtattttattattttctatttcggttcggtacaaatttggtattttattattttggtttcggttcggtacattcagttcggtttatttgcccaggtgaagacgtagccactaaaccataagaacaaggcccatacttatcgcacatgggcttttaactgtttattatatataaaaagcccatcatgtggttcgttacaattttctgttaaaatgtttggcccattgtcgccgtagattgtcttctccgttcgaaatcgcatccatcgccgtcgtcgtcggtgacgaaaaccaccgcgtaaaaccgtttcctaaatcagatgttcaatcttagaagtatctcttagaagctctcttgtatgaaaaaatgggactgttaagcataatccggaagatcaagaagaaagagaaggagatgcgtattcttatggtgtatgtcatattcttaaatcgttaatcttctccgatctaatcgtacattatcatgttgtgctgattttggaatgtttttttggcagtggacttgataattctgggaagacgacgattgttctgaaaataaacggagaagacacaagtgtgattagtccaactcttggattcaacatcaaaaccattatctaccaaaagtaaagctctatttctctgctcttgtagtttcgtgttcttcagagttggtttaggaatttcatcgaacatgttataggcaatgatgagtttgtggtgaataatgtgtgtgtaggtatacgctaaatatatgggatgttggtgggcaaaagactataagatcgtattggaggaattactttgagcagactgatggtttggtttgggtggttgatagttctgatcttaggaggttagatgattgcaagatggaacttgacaatctcttgaaagaagaggtatattcataaaagtatcaatatctattcaatcaaaagcttttgtaagctgaagcttgggttgctgtttttggtgaagatgattcatattcaaatcttggttttaatggcagaggctagctggttcatctttgctgatactagcaaataagcaggatattcaaggtgcactaacacctgatgaaattggcaaggtaagggttttgaaactcataagtcgatttggacataggggttatcgggttgaatcattttgtctctcggtcgggtttctcaacttcagtgaagattagtgggttaagtaagatatgttttgagttgtatattgtgtgttaaactgagtttcatcttcttgcttatgaaggtgctaaacttagagtccatggataaaagccggcactggaagatagtgggttgcagcgcatacacgggtgaaggtttgttggaaggattcgattggttggttcaagacattgcctccaggatttacatgcttgactaatcgactactgcattgcacaatcaatggcttgttatactcaactatatgcagtgactttgtattggctctaagtttttccttcagttctattgtaacgatgattagacaaaacataaatatttccaagacgaactcttctcattttgtttcattgaaagagacttaacaacaaaatgatgtctcatacaaccaaataaaacttattgataaaaatccaaccataatctaccacagatagatgaaagttgtctctgcagagtaagaaggaagaagaagcatacaaagagagatcatttggacttctttccttgtttcttcttgacgacttcatcagtgtacattatgcctttgcccttataaggttcagggggtttgcaactccttaccgttgcagcaaactgatgcactctttgcttgtcgattccagtgcagcaaaccacattgttcttgaaacaaaagactcgaaccgctggaggaaccgcaagttcgacttcgtgactgtaacccaatttgaggtataagaaacgccctgcttcctcagctctagctttgtatccaactccaacaatcttcaagaaccggaaaaacttggcttccatgtctctctatcctacagagaattaccctgccaaagaggaaaatttctcagcttcttcaaattaagaacttggaaaccaatagagttcaccattatcataaaacgatgctcaatcaaaatctgaaggcagtagattttgtctctctagccactcaaatcacacaagtaaatatgaaaattgaccaaccatgctacgaaaaattgccatttttttcattactttgtatctcagagacgtagaaacgagcgatgagctaacacagtaaatacgtcgaacactttccgtgcactatttcaagaacaatataaacggaaataaaaactccagataacctcatttacaagaacatg

SEQ ID NO: 30324 - DNA, 3000 bp, Unknown; identical to SEQ ID NO: 13359
  misc_feature (1)..( 3000): 2750-1469P.txt file - cDNA_ID_3029670; gDNA_ID_2214620; Annot_ID_187648

SEQ ID NO: 30325 - DNA, 3003 bp, Unknown
  misc_feature (1)..( 3003): 2750-1469P.txt file - cDNA_ID_3029682; gDNA_ID_2214620; Annot_ID_187645
cgtaagaaaggcgcagaagatctctcgaagataagatcccaagatttggagaactagtccgattctctaaccatgttcaaaggtgaaaattaaaaagaagacaagaacacctgaatattctttgataaatgtacttcttttcacatctctaggccagccagtaacttcgattcaagaactcaatcatcccaagagatcaaagagatttacacaagatgaactagtttacaagaggctgcacaaaagaaaagaaaaaaatggtttggttagtgaggaatcatcttgattaatttttcattttaataaatgaacatatcattgtcaaagaatgttattccgtggcacccacgaatgaacatgttttagagggctaaaatctctgattatgccaaagtacatcttttttagtactgtgtgtcgtctgagatttgtcttattgtctaataattggaatcatgttctgacgtacacctactagctaaaggcaccagacataaatagtgtttaatattcagcaaaatcatcgtccttttctatagatgctcaatataaaccagtaaatgtatagattacccaagttgctcaacgatcttgaagccaataatggcatgattcgctttttgtcacactccggtgattaaagacttcaacagagctaatcagatcgaaaagacatctatcactgcaaagaagtacttaactatatacttttctcgatcacacaagatggaaaaattgcaagaaatattacacacaagcttaacaattcacctacaactacaacactacaacagatactcaataaatttcagtaaatataagattacctgaagttgctctttttttatttattgaataccatgaggttttaagccgaaacccgtaattctccaaagcccgaaatcacatcatgtaatattagtttcatctcaaacgtcactcgaaccggcgacctctaagcatgtaaattgcttaacgatctttggagccaagaatggcaaaatcacaatcccacaatggaaacaatataaaagttaactaagctaatccaacaatgcaaagaggaactctatagagattatattattttcaatcatacaagaaaaaaaaattgcaaaaaatattaaacacaagcttaacaatcacatgctttatgaatagtatcggatacgatagggggttaattcgacactaatgatgatgataagatccaaaatgctgaaagaggtaagggagggtccaatagttattggtaaactttacggacactagcaagaaaaaggaagcctcctaatttccttatagcaatggtcaagagaatctcattccactaaaactattaaacctttattatgtcctttaagggactagactctaatgatcattatcatatcaaagcttctatcaaaacttttgtcccttcactaaaattttatgtggtagctaaaagaatggtcattctaaaaatctctcatttcaaagtatatattcttccaactggcttataaccccacacattgcttttctcctcctacatataaggagctccacactccctcaaactaaaccaattcaagtcatctctatccgtcaacaatacaaaccaaccttctcaattcctctcttttcatccacattttcactagctaatggcttctagttcaatgagcacctcatcatggacagctagagaggacaagcaattcgaaatggcgttggcgaaattcgacaaggacactcctgaccgttggcaaaaaattgcaagggcagttggtgggaaatcaactgaagaagtaaagcgacactatgaattgctccttagggatgtgaatgacattgagtcaggacgctatccacaacctaggtaccgtaacactaattgaagccattaataaaatgcctttctatcaagaagaggacatttgagagaatctataaagaactaagaatttcgatgtatttcttatattctatttgctttctttttttgtttttttttttaatttctgtttggttttcagatatataataatctctctcaatatccatcctattctaatccaatcaatttaagttcatatagtaacagtctcggaacattctatcagttttatggattaagcatacgaaaaatcagaaatcatcgagatttgatcgatcaaacttcgtataagtcgaagtcattattatttatttatgataaattataaatcgaagttgatagagaaaagcaagacttatttttgcactataaaccaacatcaatgcgtagcatgagatcaataaacataatcttcacactgaaatcgaaggattcacgaaacaaaattattgatgttcaatgaaagaggagaagatgaatgtttcgaagttcggtaacggagtaattatgactgctaatatccttcgggttaccgtgaactacacgttatgtaagcaaattttgggcgggaacttttacactcttttgtttcttaatatacacatttatttttaaaatatttcagttgttgaaaattaactaatacactacaagctcaaatatttatatatttctctatatagaaataaatttatggacaaaaaaacgaaaatatgcttaaacgtaaaactaatataaacgatattattaaacacaatttgtataggggaaaaaaaaacgatcaaagattcaattctcctgtcaaaggatcaaatgtgaaaaatggccttacaaatgggctaaaatatgggcctatatttaatttttggcccatatctggattcgagtagtctccaaacaaccgatgtgtcatacatagctcacaagtcagtcataactcataacctagccaccgtgggtttatgctcgggcctaccggagagacatttccgacgactgtgcacaatcatttctattaaccttgagagtaccattttctcattccgaaatgtttgaattgtaaaaggacttttgtttcttgcttggggtttaggaggctgctttttagtcgtatttcaatg

SEQ ID NO: 30326 - DNA, 3003 bp, Unknown; identical to SEQ ID NO: 21273
  misc_feature (1)..( 3003): 2750-1469P.txt file - cDNA_ID_3029686; gDNA_ID_2214620; Annot_ID_187644

SEQ ID NO: 30327 - DNA, 3003 bp, Unknown; identical to SEQ ID NO: 21038
  misc_feature (1)..( 3003): 2750-1469P.txt file - cDNA_ID_3029713; gDNA_ID_2214620; Annot_ID_187633

SEQ ID NO: 30328 - DNA, 3003 bp, Unknown
  misc_feature (1)..( 3003): 2750-1469P.txt file - cDNA_ID_3029834; gDNA_ID_2214623; Annot_ID_135916
atgtttgggcctttgtgttgcaaactgaaatttatggccctctgttttggctttaggatatatttacaacataataaattacacaattccaattagagatttgttcttagttttgaggctttttgacttaaaatttgagccatgaataatctttcttcttttttcatcatagataatcatagatagagtatagaaatattatatttgatttttttgtgtgtgtttaaacctgaattatatttgatctaagactaactatttcaactgattatgagtccatcaagtgaaactacctataccacatacgacatttatggttttttttttaatcaaacaaaaaaaattattgtatattttggttaagagatatgaagtgaaatcacgtgtgagtaagaagaaagagacatgaaatcatatattaattaattattgtaaattttgcacaaaaaaaagaattaattatatataaatatatatatatatatatatatatatatgtgtgtggtatctacataattaattattcttcttgtgattgtaatattttgtaatatttttcactatatgtaaatatgtgtgagttattcgacatttatggttttatagtttccaaaggtatcaatatcactgtttggatattgaagctaaagtaaagagagaacgtaaacgaaagagtagagagaaactaactcagttaactaataaaaccaattgtacaagtagattgattaattcaagaaaacaactaatttgttaacaactccgtttaacaaactaacaaactcacaaaactaaaactaaaacaaatttgttaaattattatatatttttaacacttttatgtctttgtagtatatattattgaattttcttgtcaagtaaagtttttggatttgtttggataaaactgggagtttaggaaaatagagcaaatcagcaaaatgcatcaaatgaaaaaagattgaagatcacgaccgaccttgacaatcgtaagagtcagtacataagatgtccagaactgatcggttacatacttgtaccgatcattataaaaaatgtttcttagtttaggattccgactcattgcatataaattcttaacactttgtaatcgtataggcagattgttttgtttttttttctgtgattatctagtttttctatataaaattttataaacaaaatgatcgtttgaagaattagagcatatttgtcatttgttattttgactaatccatctccattcaaattgtccaattatgtttagtcaaatgagtttgaaaattttgcctaatttaatcatccaaatgagcaaaagaataaagccacacattacttactaataatattaaagcccacattaaaataatttctcacgtaaaaaacaaatacttacacaaacctatataatctagactctacttcacttgtttgccctaaaccatctatcatctctctttcaattcatctacaccttatttttatatttctcaaatacttttcgagaaaattatataccctttttaatatacgacgaatgaaatcgcaggaagataatcttctacttgttcttctactcgaggggataaaaaattacggacttaagagatgggataagatactagcatcacttcttctatcccagcgaagtatcgctaaatgtaaaaaaaaattctaatctttcgttaaacgaaaggtaaattattttctcgaaaaaatttgtgtatagaattaaaggttttctttagtcaatagctaatcaatcttatcatttattttctactagtttcttatttgcacaatacatttgagaaaattatgttatgttttcaagagttttgggtttttgtagagtattagataaaatcaatattttctctcttgagactagtttcttctttgcaccatacatttgtgttctttttcattttctcaaagctgtttgttttaccgaattttctcttgggttgtggagaatattttttttttttagtttttataacaccttatcttatataaaaacaaaagagtttgtttttacaagggatgatggatgatgaatctatagatggtcgtagtaccacactctctatggactcaagttgtggagaatctttttttttttagtttttataacaccttatttgatatagaaacaaatgattttgttcttacaagagatgatggatgatgaatctatagatggtcgtaccacattctctatgcaccctatgaatcaagttgtggaatcaatcaaagttggccacatatagttatgaaatgattttgtgataaaaacacaaattaatttctatgtgaatcacaaagaaaatatatatatatatatataattcccatttgaagtttaagcacagaccttagaaaaatatgtaaacaaagccgatgtctatagtccaataaaaacaaatttcgccgggaaaaggaatataaaaaatttgtcacatttaccaaaaaataataggagagtttatatagtttcaacgtacaattaatgatctaggttatcgagttttaatttccatttctcctaattttgctgacttgagctacatattattgagcattcttgttctttcagggtttatagagagattggctgataattactgtttgttatctgagtccccaaacgatttactgatatcaacaacgtattgatgatgtattgttttagaaacacatatatgtaaaaaaaaaattcttgattagagtgatatcaacaacttgagacatggacaggtaacaggttgatccacaattctatctttacgtcataataataacaaaaaattcgtaaaaagatgagttttgttaattacttctcttattataatcaaagttttgatttttattttccaataagtcgccgggaaaagtaaaataaaaagccgtcacgtctccgataaataatagagtatcgttagataggtagcttcaacgtaaggaatctaaattggttcagctcaaaaaacgaaaacgatg

SEQ ID NO: 30329 - DNA, 3003 bp, Unknown; identical to SEQ ID NO: 30328
  misc_feature (1)..( 3003): 2750-1469P.txt file - cDNA_ID_3029834; gDNA_ID_2214623; Annot_ID_187723

SEQ ID NO: 30330 - DNA, 3003 bp, Unknown; identical to SEQ ID NO: 26003
  misc_feature (1)..( 3003): 2750-1469P.txt file - cDNA_ID_3029843; gDNA_ID_2214623; Annot_ID_187725

SEQ ID NO: 30331 - DNA, 3000 bp, Unknown
  misc_feature (1)..( 3000): 2750-1469P.txt file - cDNA_ID_3029855; gDNA_ID_2214623; Annot_ID_187717
ccgagaagatttctctcgaaccttagctgagagattggtagccgatttcgagaaggttctacacgagctcgatacgcttcccgcgagggttcacgccaagatggctagtggaaaagttaacggtgttaagaagacgccagaggagacgcaaagagaagtcacggcctactggaagaagtttgtggacactaagactgacaagaacggcgttccgttagtagcaagtattaccaatcaatgatgggccaaatgtatattcaaattattgggtgcagacaaatttttttttagctaaaggcccaactacaccatagcaaatcagcaccattcgatctcagaccattcaaacactgtaataaaaacatttttagttttagttttatttttttgcaaaacacgtataacaggtaaattattattctcaataaaaaaacgtattataggtaaattattattatagccaacctaattatgttgtcaagtttgaaaataaaaataaaagagaggaatatattaaagaaaccctacaagtaaaaatcaaattttagtttcttgttttttttagacaaacaaaattagtttcttttttctgcatctgaaaatactttcctattttaagtagaggccaattaaagaatgtgggtccccgcgaataatatcggcgcaaattttttcgtcttttataaatgggccccacaagcgtgcctacatttgggcccattaaagaaaataatcgtactcgggggaacatgtctagaaactgataaatcgataaaagtaatacatactgacaaataatgaaggaaacaatataaatgaatagtagtatagttatagaaagaaatattttttaggttttaaattgacattatgattatacactcaatcgcattagacacactgtagtcacatcactattttgtacagttcgaaatagttaattgtctcgtggttctacaaaagcagttttatttataacattttcttttgttaattttgttttccgatcaaaatttttggattttacctacaaaataaaacatgaagcgaaatgaactcaaaagagtttattatctcattacaatatcatataattactctacctctaacaatattcacccatactaaaccattactatatattatgataaattcatcgtctaataacaacaattctaatacactaaacgaacacgaccaaacttattctatagtgattacattgcttcaacagtttccaccattccgaacaatttcatcatcctatcaaatcaaatcgataaagtcaaaccatgtcaaaaaatcatatatgaaaacaaattgaaataaagggatgtaataatggaagaaggtaatcgtgataggacgtgacacgaccccaccattgtgaagaatgaagaaaagcatacaaaagaagaacggttgttcaccaaatcagaagcaaaacagaatcaagatctataataagctagacagaatttcttctatacatgacttttttgatcaactaaagaagaagaaaaagaagatattacatagttcattatttttgtttgaaactgaggataatggtttaatgaactgtgaaatacatcactttttgaaaatgtcatccctaatttctatgacttaacaatccaattacaacaaatattgttaatcttgactgaccatatatatgttctttttactcatgacgttgatatcagtaaaatgtaaaacattaaacgttatataacagtaaaagttataacttatatcagcaaaagttatatcagcaatattttaccactgagctaacgttagtaaaacaaacacaacatccacttcataactcaggaacagtgaaatgaacgtgttttatatcctttttttaatcatttgtaacaactataatttgaagatgatcttagattatgtgcacatagctcattacacacatgattattaattccgaaaaattgattacttaatatttttttaaaatgatttcacaatattgttaataacatttaatcacgcaatcaaccattatatatatttaaatttcaattacgtttaaaaattgccgacattatttactattcacatgtgatattttcttattctagtttaatcttgtgtgagtcaaattataagattatttactaaatttgcttaaagcggaacagtaaaaataacagcatgatgtgataccataacctttagcattaaggtcccccatctaaccaaaccctaacaaaattcaaacacatgtacggagttagacaggaacatctctaatattaacgttgaaataataacaaaattgatacatttgttttttgaatttacgaagttagataacatagatcacccgaatacttgtttttttttttttttttttttttttttttgtgtgtgtgtgtcttttctagtagttaattactattgaaaccatccaagtagcggagtcacataaatttaatatagtatgcagattatgtaattgtgaccatatgatatatggcaaacatattactaatctaaatatatatacatatatatatatatatatatatatatatattattgcatggttataatatataacctaatgattgtgtattaatctcggggttgtgtatccatccgaaaaattcaaattttcataaaatgtgtgtttgttaaagagaaaattttttttagcacctttacatttctcaaggaggaaaaacactatccatccaacatttcttcttttgctttatttctttttccgttgactgtattgagtacaaattcgtcttcatcttctaaacctctccactactttttacttaactttttttttcttccaagtttattgtttattctcagttacattcactttagacacacaatccaccaacataaataggcagtgatataagttaatatcatagaaaacaatcagaaaataattcagaagagaaaacacaacaaaaaaaagaaagaaaaagaaagaaagaagaagagatg

SEQ ID NO: 30332 - DNA, 3003 bp, Unknown
  misc_feature (1)..( 3003): 2750-1469P.txt file - cDNA_ID_3029858; gDNA_ID_2214623; Annot_ID_187716
caaataggcaaatcatcataatacatctgaaagtaataatctttttcaacagctcttcgaaagtgttcaacttcttctctactaagcttctttttacagtacacctctgagtctttctcatctctaaagttaagcttgtatggagcactaacaagcctatccccattcaaaacctcaccaagagcttccttcttatctttcacaccctctacacaaaccaaaacaaatgcatattgacaccaaaatacacaaatccgaaaaaagtgaaaaaccacacataacagagacaacattgagcgtgctcgtacctggaatacaaaaggggagatcgaaatagcgatacgtctcactgcaacaatcatcaaacacaagtaaaaatcagtcatataacaatgcaatcgaagatctatcacattttaagaacacgaatcgaattttttcaaggtcagatacaaaaattcaataccaacgcaagcttctacagaaatttgcaacgatcaatttatcactcatcaaagagaatcacagatctaagctaccgacaaaggaactgagattagagaattggatttacctgggattgtgaaaggggccgaccttgttggcgtagagaggaacggagtcaccgtccttgtaacggtggtcggaggcatcggatctgacagtaccggcgccggagaagatgagagctccgataaagaggagcagcgtcgttggtaatctcatgatgatgtgtgttaatgtgagaggaagaagaaaatcgtgagatctgagtttgctttatatttttgagagcaacgcttatggcaaaaggacgattatattacttttatttattttatctctctttttaacgaattttcttctactaaatgcttaagaaaaaatattgcgaataaaaagcattatgtaagaaaataaaatctgcgacattttaatattttttttagaaattgaaatgattatttttatatattttatttttggttgttttcttaaatcttctaaacaaaattcgtattaattcacaaaattttaaattatttaatacgtttcgtaagaaacttgtgaatggcagaggcaagtgatataaactgaagcaaataaaactttctataatcgatattttttgttacaattgtcgttttttttttaataagtagcaattttctattggtagagtgattctctcgttcttgtgctttctactatttataggagttttattgcattccatgtgactataacaatcagtaatgttctttttactctttaacaaaatcatgatgatgaagatacaaataaaaaggtggtcaaaagaaaaaagatcaatagtgcctcgtttttttttttcacaatagtatctcgtttatgaaattgattaaagcaaagcaagtaaaaagtattatcaattggaatataaaccaaattttttgtacataaaatgaatgatgtagtaatttatatacctgattatcttaactaaactcaattttttgcaaccaaaccagataaataagaacactataaaattaagatgttaattacacagacaataattttatttatttataaagtttatttttgtaacagctctgatacttattgattttgcaccttctttgatggtggtggcgaatcatacactcatcagcgaccatgatatgtaatccatcaacgagttctctctgaatcttctcgcctggaaccagttttccagagcataaacataagccttagaacaaaacaaacatctactatcccctgaactactaatgatagagtaatcaatgtaaactcttttcctattgtagaatttaccattagacaaattattatgcatgttgttagcatctctactcttgaaaaatcttcgtaagctgattggaaaatcaaagaataacaaactaactaactaacaatcactactctataagcaaatcttgaataccaatagagattctttatgttggattctatctttgagcatttcattaggatcgacggttggtcgattaatcaatactaacccaaacagtcttttaacatgcacacttgataccttgtaggtgcttctgggtagcatgaaaatgataattggtgttattctgatatgcgaaattgaaaatgttgttgtgcatcagctaagcataattgaaagtttaaaaaatattataaatttaacgtgaagaattgaaaggtatcagattaatgttttggatcagccgaatagagtcaggctaatccaaattctcaaatattttcgaaaccttaaacacatcaaactccacgaagtaaacacactcacacacatatcaaaatccacattataaatgtatttttggtaggctagtcgtctaattctaaaatagccaatttacatttgcaattgtttattcaaaaaagtacaacagtaagaggtcttatcaattaaatcataagaaaaatatgtcccaaaatgtcaaaaaaccaactacgaatatttcttttccttttaaggccaaaccaggttttggaatacttattacaaataaactcaatttcaataaattcttgtacacaaattaagcactaatttcattgtgaagataccatagtcacattcacatctatatgacatcaatctataaaatccaaaacaaactatatattatatttatattatttttttgtcatcattatatttccattaatttatctaattctggttctaatatactcttggtcagaaaaaatataaacattgaagaattggtcggctgaaaattgtgaaaaatatatagcagaaaaatatgataatgttatcataaacaaaattaatagtaaaatttaattttaatttaacactacagtactatacacgtgtgtatgtatagctctataagtatttactctctttcagctatttattttttcagtgaacgagcattcttcttcttcctctgtgttgttgcttcttagatatattcaaataaaatgacgactgtaatcgacgcgacgatg

SEQ ID NO: 30333 - DNA, 3000 bp, Unknown
  misc_feature (1)..( 3000): 2750-1469P.txt file - cDNA_ID_3029892; gDNA_ID_2214624; Annot_ID_187755
aacatcgttgacaaaatcttcaccataaccgacgcagaagtcacaaccgccatcattccaacgctcacggtcctgttcatgtaaccaatatcagctcttaaaccgcagatgatgtagaaaagaggcattagcattcccgagaggaaatcgtggagcttctcttcgatcatttttcgaatgatgtggtcatgagggatcgatagaccgaacaagaatgctccggtaattgagtgaaccccacatacttcggtgattaagctgcaaataatgactccagcgagagtgtaccatacgtgagtgtctcccacttgacctccttcgacggtgttgttgaagatccaagccactccaggttggatcacaaagtagcagagaaggacaaaagctatggttgatgctaatgagtatggcaacatttcgttgcgtacacctaacaaattaaatatggttttcgttagtactataattcagtaactatgcgtgtgtgaggaaaaataacacaagggaacaaccatatttagttaccagatttggaaaaaatcgccattccaaaaatgaagagaatccaagtgcacaaatcagtaacaacggctgcacacattgcagtatgtcccatatccgtacgcaagagcttgagatccgcaagaatcctagcaagatcagggaaatttgtacagccaaatgcgatcgaccagtacatacaacctgctaggattttgtcggcctctccgttactgggaaggtagtataagccagcaccggcaagtaaagccgcaaggaggccaacaatggctatgatcactggtttgatgtctttgatctttatcatcctcaagtccaagccgagaccgaggaggaaaacgttgtaaacgagagctaagtttgcgaatgtctcaagaagcattgtatatttataagggaatataagtttaaggaccacttcgttattgccgagcacagtcgggctgaacagtaatccgcactgtaaacaaaataatcattacaattattataggatcatattataaattatgtacgagattaatttgaaaaagatccaataatataaatcgtatgttgcaagtggacaaatcttaaattttttatcattttggttttatcttaaaatcaccgttttcgaaaaaaaaaagaagcaaaaagctgaactttcgttagaacaatgaagttaattgttagcaaaaatttaatcaagaatttgaagatgaagactctttaggacatagctaacaaagaaaaaaaaggaaacataggtttgcaatagttgtgggtaataagtaatgaaaaaaaacagtttaaagattgataatggttagttaaatatgttttcaagattgactactcacaagtatttgagcgacgaaaggaggaagacatagaggcttaagaaaatagtagagtatgcggtaggtaagattagcgacagacagttgcgtcataaagaaaggagctgcggctgaaatggtgttgcttccatgcattgccgtttggttataacatacgactctcccaaaccgcgacgaacttgcatcaatagattcagctgcgggatcggccatttattggggggattttccttaatagatttaaacgggattctctcaaaaaaaacccaaggttttggccttttccctttcacaaaatctttgtgtttcatcatctgttttgttttattgcattaataggtgagagctacacaatctgtttttccttttttttttttttctctaatcttcttctttgtcattgctaattatagtttttttttatgtttgatgtcaaatagaaaagtactagtaatttagctgtctttgtattctcttttgcaaatgaaattagtcaattttggttggttttcttgtttagtctgttataaagggattataaaatccaattacatgctgttttccttgttatcaaataatagtactacatgatatcagtgttttttggatagatgagttaatatctcccttagtgatacaatgatatatttttatttcatttaaggaaaaaggctaaaacacagggttgcacatgtaatcatgatgttcttggatcaagaaattagacagataatgatgcaggtttgaatatttaaagattacttaacaaaactaaaataaaaactttcgaccataaataaaaaaagagagggaaaagaaagccaaacctagctggaaaagttaatccaaatggtccagtctcagaaaccggccttaaccgccaccggagattctccaccggccattaccttcacacaccccagaaaataaataaatggaaaaatatgtaactttctataagatttgacaaagtctacacttttaaggtgatgacttcaagtttaagcaccacacattggtgaaaggccttttggctctgcagtaagagatggaaacaaacgtaaagggcactattgtcttttaatgaaaaagaggaaagaagttcactttcacagcgaaacagtacctggccatggccgatcaagagaaaagttggtgcagtagcaatatcaaaatgtaaagcagacaactttattgttctaaaagcagagatttcacattttgttcaacgtacgaggaccccattcatactcaaaaggaagcatcataaagctttgaaaaggagaaacatatgaagagtgtgaccttacaccaaacagttttctatggaatgcatggttttcaaagcaaatgacctaagagagaatatctgaaagaagttgatttgccgccgcctttactgcatcttaagctctaaaacctgcaaaaaagagttaagagacttagtggagacgagaggtgactaggtgagggaaaagtcactttctaagttaagaatctccagtatcttctgattcagagtcgcctatttttttatgattcatctctttcttcttaccttttcttttgatctatctctctgttctccaactgctgcagattctcagtgtaagagcttggaagagcttgagttatg

SEQ ID NO: 30334 - DNA, 3000 bp, Unknown; identical to SEQ ID NO: 13394
  misc_feature (1)..( 3000): 2750-1469P.txt file - cDNA_ID_3029896; gDNA_ID_2214624; Annot_ID_187754

SEQ ID NO: 30335 - DNA, 3000 bp, Unknown; identical to SEQ ID NO: 13395
  misc_feature (1)..( 3000): 2750-1469P.txt file - cDNA_ID_3029900; gDNA_ID_2214624; Annot_ID_187752

SEQ ID NO: 30336 - DNA, 3003 bp, Unknown; identical to SEQ ID NO: 25090
  misc_feature (1)..( 3003): 2750-1469P.txt file - cDNA_ID_3029912; gDNA_ID_2214624; Annot_ID_187746

SEQ ID NO: 30337 - DNA, 3000 bp, Unknown; identical to SEQ ID NO: 13390
  misc_feature (1)..( 3000): 2750-1469P.txt file - cDNA_ID_3029929; gDNA_ID_2214624; Annot_ID_187737

SEQ ID NO: 30338 - DNA, 3000 bp, Unknown
  misc_feature (1)..( 3000): 2750-1469P.txt file - cDNA_ID_3029935; gDNA_ID_2214624; Annot_ID_187735
atatctatgaatttacccacatggtaagcctgattgttttcttgtttgatctcttgtctgcagcggcggattaacctgccctgcatctgattttatcgaagagacatttcttctttcggttaagcaagctctccctcagcacggtcttttcatagtgaatttggtcacgagatcacagtccgtcaaagatatggtagtatcaagaatgaaaaaggtaaagcaaatgtgattcattccttgtaaattctctgcatattttcacaaatctgatctgatactattgcacggaaattgagtcatagaattgatctctattgttttgttttttgccaaggttttcgatcatttatttggcctgcaactagaagaggaagatgacgtaaacgtagtgctctttgggctttgctctgaatctgtaatcagcgagaacgatattccagaatctgcagttatactggagggattgctcaagtgccagagattggaaacgaagcaaagcatcatagacgctacaaagaagctgaaatgctggaaataaaaacattctttattatttcgttttaaaaagacgtgtgagatatatttctgttataagttaagattgaaatttttgagactatattatatacaatacacctagtttcgtccatacgcaaatggaaaatgaagcgtggagtttttttcataacctttatgattgttagacctaccaacttattgaagcattcaatttggatgatagtgaagttggaatgtaagttaaacatcaatgtcttgattaattttgtgcatttttgggaactatccgtattgtttctgatttgagtgatcttccttattgttgctaagaaatgctcgaatggtgattagcataattgctgtttattcattggagctataataattatggttgtaatattgtaatttgggaaagaaagcctttgatacaggccgattttggtacgtacgtaagagagatataaattgaaacacctaaaccaaaatctggtcgccgcgaagacaaaagaaaaacatttgtggcaaagaaacaaattcagaaaccgcgtgggtccgatatggaacgctgatcaattggacatttgtaaacatttcaaatattttgcatgtaatcaatattgttgttatattttttgccttttagttatagttaggtttgttttttctgtttgtttggttagattcaactatttgtttatgcttttcaattttgggttagtatttagctgtttactttggagaaacaaaagaagatagattctgttccatataaacaaaaagctgtgtcgttgaaacttgaaaatgtgaatatactcggatatcaaccaaagggtacgctgcattaaccaacctccctcgtagaaaatttcaaagaaaggataacaaaacaagaaaaagcacaaagttgaaaaagaagtgacagatgcagaagaattggtcaaaatcattttgacaaaactacataaaaaacaatcaaatgtcactttcaaaattattagcttatttattattttattatgaaaataatgaaagcgacttctatctgggactggtaaaaggacctctctcaccattggttgtacattagctgtcaaatttttacatttccattacattccctaactccaaatatatacactaaactaaattcttcaagttacttcctaattactactatagtaattatttcctaaccgtcaaatagtactgaataacacatataatatagtttcgattgattaagagatttgaattaaacagaataaagttttacgattatatattctaacaatttatttgtctcacaaaaaaatctatagatttaatgagaattaaatgaagaggacgaaaggaaaaacaaaatgaagaaaaagacatatgaaacgtagtcccctcttttctttgctttcttctctacataaaactaaaactcctctctttcacgaccctttaagtaacgacgccgttttcatccaaacacaaacctctggaatcgtgtcaccgttggagctccggcttcattaatggctttcttcaagacctgaagacaaaagaaagtaaaaatatatatacactagagagaccaagatcctcgtttatgggtttcatcgtgtcttgtgcttagggtgacataaatacccatttagagagcttagaccaagaagttttagagtttgtgaagttacttgttggttagtctgctgtttctggcaaatgctgagtctcttctctctgtaagttcttttttcttcatttactctgttttgttccccatttttggtctttttgacttaacttagagtattttaaggcaaaataaaatcatgaatcttttggtattttttgttctcatcttcttgtggggtttttctattgaagtttgcttagctttgaatcttgtctaatggagctaactcgatccaaaataaaaacacgtataatgattaactagttctgctcattagatgaactaaattaatgagttaattccgtagtttcatgcatcctacaatgtattgtctatgtatggaagcaaagtatgatatcatatttaaacatctatgattgtgctactaaactttaaataatactttaagctgatgtgatcttatatggataacctctgaccattatctactttctttgaccattgctcttgttttctaatccaaaagtcgtatcttccaatgcattagttggtccaaacctagatttgcatcccttaatttgtagtagttaacatctaattttgatgttaaaaccaagacaccactttgtttgtctggtctgagaatatctcaaggcgtatagttttgtccttatgacgcttgcaaaagcaagttgttgagttgtaatcttatgtttttttctgcaacttgccttggatgaagccatgagattatctttataaatggtagcaagtaaaccggtttcttatgtcgaaaaaccgatcatttttgttttgtttgatgacaaggaatg

SEQ ID NO: 30339 - DNA, 3003 bp, Unknown; identical to SEQ ID NO: 26434
  misc_feature (1)..( 3003): 2750-1469P.txt file - cDNA_ID_3029964; gDNA_ID_2214625; Annot_ID_187790

SEQ ID NO: 30340 - DNA, 3003 bp, Unknown
  misc_feature (1)..( 3003): 2750-1469P.txt file - cDNA_ID_3029980; gDNA_ID_2214625; Annot_ID_187786
tcctcgagacttcatggtgaacaaagtcccgttccccttaccctctcctcagatcttcaacctggatcaaatcaatgcacttacaaccgatacacttgtatctgacaacggttagtcattattcatagaagtgaaatgagttattttccttgagttaattgagtctcactttttattgtacaacaatggctatttcagccttgaagtttcaggatctggaccttgtcccccataaattgaagggatatccggtcgagtttcttatccaatatcgcaagggtggtcctaacttcggttctactgtcagtgaaaagataccaacagacttctacccttgatgctgcttctctgctcaaaggtcatttcctggactaattttttcatgcaagtgtcacaatgagattgcggaaaccagatttgctatgttgatgactttcatttacttctgtcaataataaacgggtcctcctctttgttgtgttcttgaaaaaattataacacatcaacatcattataagttagagaggggacaatatatttcttgatgtggttggtcccttaggatttatgcaatgtctggttcgtttcgaactccatgtactacttcccttgagtaaaactaaagccatatgctttcatctttgcattacatatagctcggtgttgtatgttttacttacgacaaaacgtatcaacatgcatctgtatgcaatagaggttaaaccctgagtaatttgaagtttcctttacatggtcaagaaggtatttcgactccgttatctcccagtaatgaaacattgatgtccattaacccatcttgaggccttcggtatccttaatttaggggtgggtaaggaatctagtttatgcaaatcgtagaataattcactttgcttctggctatagaaaaagtaaagaactttagggaaccccaagaaccaagcaaagcatatagagcaaatatcatctctggagagacaggatagactcatttttgcagtctgtaccaaaatggaagatgacggagactatcccgaacccgaatctggcagtggtggaataaacttaaacgggagaaatgttggtgcggtgatggtggcgcctagggatgtagacatagcgagtcaaagtggttgcaggatcaatatctacgtgaacagcaatgttcaagcaacatgtggttcagctttgatcggtagcaaggttaagctaagagatcctggtgttcatctccatatagatgacgttaaaatgacccgcgacgataccatatctagacagaaggagatgaccttgattaaggttgggttatgtttggtctgtctttttaacatgtttctagtattcattctcttcctctcctcttggttccggaaggaaagtggttccgtatagatctccccatcaaccgatgatcatgctaagaagtaagaacgatctcgcctataattgtttcctcgatttagttatacttatctatgtcctaatttgtagattattccagaaagttcctatctataacagtcaaaaacacaccatatgttgtcttaattcatatcattccagattaaatcgaagattaatgctatagtccaatcatataaactatgtagtagtctagtgggacaaacgacgtgacgatatcaagagggtacaggattaaaagctatgaagtacgttaccaattacaatctcaagattctcaaccaccggattataactacaagtaccgatttggcgatttgacgaatacagatctatcaattagctagaaattttctttccatgcattttcccaccctcccattagatgatgatgattagaagaccacgatctcattggtgttcactgattcaagagcatttcaagagaatataattcttaattatgaatttgttcaataattaatccccaccccacttttccaaatcacccttacatgttcaccaattgtaacaaataattaaagaatcaaaagtgatttcttttttaatacttattgttgggaaatacttaatgctagtccataactctcttcaattatttaaaggaggagtaagtaagtttttttgcaagtccttttgtggtatccatgtgagttatacattggggagcacaaacttccccactcccacaagccacgtttgtcgcttaaagtttctaagtttttttaattttcgctctttttggtttgttatttatgagtgtatggaagtggagtctcccccttgaacacttcaacatttacactactaatcccgacttagacgacaaacattttttctaagttcgaatgtaattctcctaattcgctttgacctgtttttgaattttatactattcaattttaatttagatatttatctactttagacttgtagaaaattgttttcaatacgagcatatttattacctactatggaaccatttacggatttaccaccataaattagacaccagtattcatataaactatctctaattttgaatttaaacaaacgaaaacaaaacttaaatcttcaactggctaacaaaattttactcatcaataaaacaaagcagtgcattttgttttgcattctaatgtctcttttctcttattcgacctacatcaatagtttcatacaaacaaagtcattttggagcatttttggtctttgtttagacttaattatttatgtaattaggtttgcaaaaaggctagtcatctgctttatgcttactgtcaatccgtcatcattagttggacatcatgcacgagatttggtctcaacaaaaatattaacctatttctacacaacattcaaactaaggcagtcaaaacttatgtacttattgaaatactaattgattagcagagagacgttaaacaatgagcttgaacttgaagtaatcatgttacaacgtgttttggttcatgcttagtgcttaccatcaaattctgcgatttgtgttatttccaacgtatagcatgctacaaaccactcacatgattacacatg

SEQ ID NO: 30341 - DNA, 3003 bp, Unknown; identical to SEQ ID NO: 25099
  misc_feature (1)..( 3003): 2750-1469P.txt file - cDNA_ID_3029987; gDNA_ID_2214625; Annot_ID_187784

SEQ ID NO: 30342 - DNA, 3003 bp, Unknown; identical to SEQ ID NO: 26435
  misc_feature (1)..( 3003): 2750-1469P.txt file - cDNA_ID_3029991; gDNA_ID_2214625; Annot_ID_187780

SEQ ID NO: 30343 - DNA, 3000 bp, Unknown; identical to SEQ ID NO: 13423
  misc_feature (1)..( 3000): 2750-1469P.txt file - cDNA_ID_3029995; gDNA_ID_2214625; Annot_ID_135952

SEQ ID NO: 30344 - DNA, 3000 bp, Unknown; identical to SEQ ID NO: 13413
  misc_feature (1)..( 3000): 2750-1469P.txt file - cDNA_ID_3029995; gDNA_ID_2214625; Annot_ID_187779

SEQ ID NO: 30345 - DNA, 3000 bp, Unknown; identical to SEQ ID NO: 13418
  misc_feature (1)..( 3000): 2750-1469P.txt file - cDNA_ID_3030010; gDNA_ID_2214625; Annot_ID_187769

SEQ ID NO: 30346 - DNA, 3000 bp, Unknown; identical to SEQ ID NO: 13439
  misc_feature (1)..( 3000): 2750-1469P.txt file - cDNA_ID_3030103; gDNA_ID_2214627; Annot_ID_187850

SEQ ID NO: 30347 - DNA, 3000 bp, Unknown
  misc_feature (1)..( 3000): 2750-1469P.txt file - cDNA_ID_3030153; gDNA_ID_2214627; Annot_ID_135979
ctcttcgaaggagaaggtttcgatgaatcttcgtcattattattaggctcgccgtatatagcaaagtcttcatcatcagatgaggcaccatcggagtcgtcgaaaaaatcaaaccggctagaaaattcatcatctgcttcttcgtcacttgcttctttgtcagatgcttcatcgacacctgattcatcgtcccctgcttcatcgtcccctgcttcatcgtcttgataatcgtaacagacaccttcaaacccccgacccggaacttcgaatctagattctgctcttgagtcagattcaatagggcgtttcgaaccccttcctcttgatccgtccttccgactaatatcacttgaatctttcgccgtaaactccacacagagacgtagctgctcgaatttcgtcaaacctagataacattgcaactgtcgatcattggagatataaactggtggagtatcgaagggcatagttttcagagtcttgttggagaacatgtaactcagccgtaactgatgggtcgactgattcactccgtaatcatcgatcaccgtcttgaaaagactatcgtaaactgctctttccgcttctagctgcacaactctacaccctctttcgtcggggttaaatacgaatctctgtttctttacccacgaaccggaaacaactatgaccgtagcgggaccagccatatcaagagaaagatgaaagaaattgaagatgtatgagaagatgaatgaagaaaagaaagttccggtgatgttgtaacgttcaggcggtggacacaatctgggaaaacgatttaaagcaagagacttttcgtatttccgtcgaggatgctgacatggaatgatgacatggattattacagccgacgccgttttgaagtgatgacgtggcaagtcagccaccaaacgaacatttcataacacagccatgaagcaaatctttaagtcagccgcaacatgaatactattacagtaattaaaacaggaaaaaaaacaaagttaattcagccgtggtatgtcgtaactcaactaactcaaccgtaacgttcaacaactcggccataactgcatgatattatagtaattaatcttttaacaataagtcagccataacatggctgagttatatcgtaaaccagctattggcggctgatttatttcactcgacaataactcagccgtaacatctttccataactaagccgatcaaaactataactcggccgcgtcgaggaaataagtcagcctttttctcataactcagccatattgttggctgggttattgtataacttcttataactcggccgaccatccttaactcaaccataccgttgcctgagttatacaataactcaggcaacattttacaactcagccgtaacgtctggctgagttatactcatacttcgccgttttgttatgactcatatatttttgacgtaagtcagccgcaacataccgtaactcagccggctgagttcatttaatccacgtcagcaaattctgacgtggcagtggcattccctgtaattacgttttttccggtaacgtttagtaggggcacgctgggtaataaaaaaaactcgaaaatataacagtaattaaaaaaagttctgtcgtgttctggtaataacacctaatttcttacccatcacagttaatctcccatttaattttttaccagactacatttacgtttgagttttgttacctattgtatttggattttcatttttatgcttccttcaattattgtaacactaattgttattcaattctatagaggtcaactgaatcgctttaagagttaagttttgattacttgaagactgttgactatatggtgtggcaaatacaacatgattactaccggagcttcacctagtcaacagtctccacttttggacctacagatgcactatctccggatagaaagcttctccactcttggaccgacagatgcaccatctccgggtagaaagcttttactggactgtatttgtgaccttaaggttcttttgctcaaccccaattttagtacgtaacctaacctcaaaattggccttacttttcgacgatatttagctcaactctgatctgccattcattaccttgcagctgtcgaactatcaccaacattcaatcttgcaaaagggaattagggttgcacatagtgggataattgttcaactttggtccatcgttaaagctttggcccaatactaaaagtaatggattctttttccaaaaagaaaaacacaggtttgttattttatctttatgttgtttgtttgcttgtcgttggattcttctggatttcacgaccaaacgcagccagtaatagttgataatagctgataattctatcgattgaaaattgtaatcgttggtgacaattgatataattagtcaccaaactaacaacatgcaaacaaacaattttggtcgctattgctggttgatcaggtccatagggatgagacatgatcatgaccaatatgggatggggacttggttaccatttcatatttttgacacccgttattacaagaacacatgcacaaaccttatttaatttgtctttatatgctttgctgtttatagtatttgacaacttgtgtattacttttaaagtaagatttttaaaacaaatactttattacttaataggttacattgatagtatgatatgatttataaattaatagggtaattattgaagatttgcttatgcacaattggttactttagttatcatttgatcttccacataagttttagtattatctgcaactcgttacttgaccttaccattttcttaataattaaatgttaataaattcatgtatatctaatatgattattataagatattatgtgccattttagatactatgccaacaatagtaatacaaatgtgtgcatatataaaatctgaaacacaaaagccaataacaaagaaaaacatctaaatatctatccaaaataaatg

SEQ ID NO: 30348 - DNA, 3000 bp, Unknown
  misc_feature (1)..( 3000): 2750-1469P.txt file - cDNA_ID_3030153; gDNA_ID_2214627; Annot_ID_187827
tcagccataacatggctgagttatatcgtaaaccagctattggcggctgatttatttcactcgacaataactcagccgtaacatctttccataactaagccgatcaaaactataactcggccgcgtcgaggaaataagtcagcctttttctcataactcagccatattgttggctgggttattgtataacttcttataactcggccgaccatccttaactcaaccataccgttgcctgagttatacaataactcaggcaacattttacaactcagccgtaacgtctggctgagttatactcatacttcgccgttttgttatgactcatatatttttgacgtaagtcagccgcaacataccgtaactcagccggctgagttcatttaatccacgtcagcaaattctgacgtggcagtggcattccctgtaattacgttttttccggtaacgtttagtaggggcacgctgggtaataaaaaaaactcgaaaatataacagtaattaaaaaaagttctgtcgtgttctggtaataacacctaatttcttacccatcacagttaatctcccatttaattttttaccagactacatttacgtttgagttttgttacctattgtatttggattttcatttttatgcttccttcaattattgtaacactaattgttattcaattctatagaggtcaactgaatcgctttaagagttaagttttgattacttgaagactgttgactatatggtgtggcaaatacaacatgattactaccggagcttcacctagtcaacagtctccacttttggacctacagatgcactatctccggatagaaagcttctccactcttggaccgacagatgcaccatctccgggtagaaagcttttactggactgtatttgtgaccttaaggttcttttgctcaaccccaattttagtacgtaacctaacctcaaaattggccttacttttcgacgatatttagctcaactctgatctgccattcattaccttgcagctgtcgaactatcaccaacattcaatcttgcaaaagggaattagggttgcacatagtgggataattgttcaactttggtccatcgttaaagctttggcccaatactaaaagtaatggattctttttccaaaaagaaaaacacaggtttgttattttatctttatgttgtttgtttgcttgtcgttggattcttctggatttcacgaccaaacgcagccagtaatagttgataatagctgataattctatcgattgaaaattgtaatcgttggtgacaattgatataattagtcaccaaactaacaacatgcaaacaaacaattttggtcgctattgctggttgatcaggtccatagggatgagacatgatcatgaccaatatgggatggggacttggttaccatttcatatttttgacacccgttattacaagaacacatgcacaaaccttatttaatttgtctttatatgctttgctgtttatagtatttgacaacttgtgtattacttttaaagtaagatttttaaaacaaatactttattacttaataggttacattgatagtatgatatgatttataaattaatagggtaattattgaagatttgcttatgcacaattggttactttagttatcatttgatcttccacataagttttagtattatctgcaactcgttacttgaccttaccattttcttaataattaaatgttaataaattcatgtatatctaatatgattattataagatattatgtgccattttagatactatgccaacaatagtaatacaaatgtgtgcatatataaaatctgaaacacaaaagccaataacaaagaaaaacatctaaatatctatccaaaataaatgaaaaacttttcaatctttctattcgtgtttagtctttgcatgtttgaccatgtatccagctctggattcaagatcacgaacgaactcaaatccaataaacttcttcggattggatgttattccaaagatgacatattcggtccaaaaacaataccaataggacaacatgttgaaatcaattttactattaatttttggcatacaacacgttttatgtgtaatttggaacaaggacctaactataaacattatcagaaatttacagcatacaaggtttccggttttatggttgaggaaggcatataggactagagagcaagagaagatggaatctatttagacaaagaaagcggcaaacatattggaaaatcgattaatttgcataaaatgtatgattggttaaattatgtttaacaatctacctaagaacaaaaaatattttatcttatcatcttgaaacaagaaaatttaccattcttcttttccttcttccccttttcttctagtttttatcattcaaaagcaatctcataatatttggttttaatacatttcacaaaccatctctaataacaaaattcaaatttcttgaaatcccaattgtaatcataaaaactagtcacaatggctattacgagaggctatttaaaggacaatttcgattataaatccaaaatgtaattcaaatccgaattgtaatcataagaaatcctaattgtaatcaaaattttatccaaaatctatccgtttcacccaaaatcaaagaaaaaaggatcaaaccatcaaatctaatatgaaataaaatcctaattaaatacaacacaatcaatagaatgaaaccttaaataaaatcctaattaaacacaacacaatcaatagagtgaattaaaatcttaattaaacacaacacaacataatggttggatcgtaaataagtgaaaaccccttgttttatttgtcttttactattttttggagaaaaaaaactagataaacatatttttttttttataatgggagctaaatagagaatgttttaacccgagaggcccgagtagattaaaatccgaattcaaccttttcggccaagaagaagaagaaggaaatg

SEQ ID NO: 30349 - DNA, 3003 bp, Unknown
  misc_feature (1)..( 3003): 2750-1469P.txt file - cDNA_ID_3030163; gDNA_ID_2214627; Annot_ID_135970
tatttttgacaggccatactggcgatgctatttcccgaatacacaagcagtgatctatgttgttgactcgagtgatacagatagaatcggggtggcgaaagaggagtttcatgcaattttagaggtaaagtactgctgaggcttcctcttcttatactgttgtattattttgtgatggacttcttgcatccaaaagtaattgaggtaaaacgatgatgatgtatatcggtagttgaatggaaatacaatattggttcagtttcttgtttaggacttgttatagatgcttgtaagttgtatatcaagtattgttagccttctaataggtgatactgaaattgaagtatctcggttagtactggacggaaagaacaagtgatcatttctctctgtagatcttgctagctaatcttaaactctcagcaacaatgcttacttgagtttacctctgccactgtcagcatttaactcgcactatcttttcaactatgttttataggaagatgaattgaaaggtgcggtggttctgatatttgcaaacaagcaggttagtagtctctaaatgtttgctcttccgattagtttgggctgattcatctggaaatctgtattggtttctgttgctaaaaagctttagtttgttttgcatgcacaagacacttttttgctgatgaaaaatctataactatttggtctgagtttcattaaatcgacttaatttaggatcttcccggtgcactcgatgatgcggctgttacagaagccttggagttgcataagataaagagtcgtcaatgggcaatcttcaaaacttgtgctgtgaaaggcgagggacttttcgagggattggactggtaagcacattctgaaaccgaaccattttcttggtcccattattgaaacactgaacccatttctttatgcatttcttctcaaatattcttctctcatttccatcttgatcttcaggttgagtaatacattgaagtcgggaagtggctaaaatcatcgtcatacaccaatctgtcacatttctcaagagtgtaactttgatcatttttacttattggtttgtttagtatcttttttttatcttagttcttcatcttaaagagttaatatcaatgacatgttcacttaatattctctttttgttgttttgtttcattctgaaagaaaaaacccaacacagatttttgattgagacccataaggggtaatatcatcactttttaacatgaaatattgaactgattccagacgaaacactgaattggttccaagtggtgtttttgccgacttggattcagaagctcaaacgtttggggttttagaagtcctaatttatgtaatttgtctgctccttaattaatgataaaattgttgacactattatgccatttagtagatagtaagatttttttttaatgttttcaaagaggcaaaaataatttgcaaggaatatatagaactagcaagatactagcctaagctatttgattaactttcctgctaataatgctagtatgctaccaaaacaaaacacaagcgatttgtgaagctctttcttaaagagtccggctcggcgtttagagaatgtaacttgacggtggctctctttcttgatcttaccatagaatcttttatatggcgggtgttgagcaaattaacttaaacaaatttgttttattatcgtaactcaataaaaattacgatttctagtcataaacaaaaggctgtacatagcattaggcctgctacggatccggatatccgggttttttggagtatctggatccgtatccgtatccggcggatatgtagttttaggatccgcatccggatccgtaaacctcggatatccggatttcgaatatccatgaaaaaaccggatatccgcggatattcgagatccgtttatttttgggaacaaattcaatttcctatttcaccaaccagattgaattcaccaccaaaagagatcgacgtgtgcccgacatcagactttgcaaggcacataccaccaagatctcgtctttaacggtgtccaatctgctcctcctcattcatctccgccatcgacactttgaatcccatgtatcatcattcccgtaagtaaacttccgtccataaatttacgacggtggaaccgagatgaatatggtggggagacggtgatgaagattacatggagatgagatggagatagtgaaggaaatggtgatgaaggaaacattcacggcggcagaaaaaatatgttatgaaaccctaatagttaagtcccaaacaaactcaaattccatcattttgtcgtagtgggctaatattggactattgggcttaacattgataatgtgtatttgattaagcccaggatacaaatataacttaagcccataatacaaatatgtagacatattgaacggatgcggatattcggctctgatttttttcataatctggatccgtatccggatccgccggactcgtatccagatccgccggactcgtatccagatccgccggactcgtatccggatccgtcgcacctaattattcggttttccggatcggatcacggatccggattcgaatacccgcggataacggattttagtcccaggcctacatagcatctacggtaattattaactattaagtaaccatgggtaaattcgaatttccttgccgacaaaaagaaggaactttccattccttttgtgaaagtccgtgagaacatgaacccaagttaatacaccttcacatgattagccccacttctcctaaatgtctcgtaaactccaactattcggctaagattcactaacgtgtcatctctctattcgctattcccagatctccatgacccacttcactccctgcgcgtccggtacaatcgccacttccataacaccaagagtcaatacaaaaaaaaagccgactccattattatccctctctctacaaaaaaaacagtagagagagatatagagagcatcaatg

SEQ ID NO: 30350 - DNA, 3003 bp, Unknown; identical to SEQ ID NO: 30349
  misc_feature (1)..( 3003): 2750-1469P.txt file - cDNA_ID_3030163; gDNA_ID_2214627; Annot_ID_187818

SEQ ID NO: 30351 - DNA, 3003 bp, Unknown
  misc_feature (1)..( 3003): 2750-1469P.txt file - cDNA_ID_3030165; gDNA_ID_2214627; Annot_ID_187816
cgaacaaatgcatgtgcggtcacgagggtagaatggtaattttcaaggaggatggtattggtgctggagaggagaaaatgggagacagagagaaagccaaagaaaatgaagaaacaacgagtcagtgagcttttttgttttcttttcttctctcagtcttgtctttttttttttgttggggaattttccttcgtgttttcacgggaaatgtaaaatttactgagagaaaattttgggttatgattaatgaatgtttgcttgtaatttcctatccccaatggtggaaaactcgtttttagtttttgtaattctcaaaagtgtgataggtaacctttctcatacagctttaataccaatcagtaatagagtaaactaaaacggaataacataatagtacttaaaattcttacaattttatgtcatcactaagatctacaaaaaaatgaatcatagtatcataacactatgtttgcccaaaaaaaaaaaaaaaagtatcataacactattgatcataaattcaaagcttgcaatgtttcgatggaaacgtgattcatcccgtacacaaactgtaattttatatacattttcagaaactaatgtaatgcattaacccttttgtattacgtatatattctcacattttatattttgtaaggagattcgtttagttactttaattatgaattgttataattgtgtctcctccatgtatttgtgttactttcatattttccttgcatttatatattttatttaccataggatagttctgaatttgctatcaacttggatattttaaattaattgagactccatctagttcaccgtcaaattttaactatacttgtttaactatacttgttatataacgagtgaataaactggaaatagtattactattaactatgaacttacattcgtaatattcgaaaatatgtgcgtgagttagtcttgtcacaagaaaaggaatcatattctttttttcattaaacaaaaattggaaacacatattatggtataaatcaaaagataattcgattacttgccccatttgcctgctttactttcaatttgataatatcccatcaacaagagtcttgttacatgaccaaattttcttctgttctcacgttattaagtattttgaagtgaagtgcactccaaacaaacgtctaaaacttaaggtttgtataatcctcaatcaaaaacattttacaacttatttctatttttttatattggggtctttttcccagctactaatatacgatcacttaagtaattttttgtaaaaatcattaaaaatcctaataaactcatttgcgtagttcaattacacacatacatatgtagtaatataaatattattttccgttttaaattatcgtaaatggaatgtcatttagaattttaattttattcaccacaaatgtttttttctgttttaatatatttgtttgttaaaatttatattttcgtcgctaattagtccactgaaattataatccacaggctagataatccactgatttcaacaaaggtgaaaaaattatataactaatatttgtccattagtagtagctaattaattgaaaacgtttgttctctgaatcgaaagagctgcataagagaaaggggacacgtgtcaaaaacagagtttaatatgaaagcgaagacaatgattctgttttgacttatttgtcatttgctgagctgtctttagaggcgccgagtagccgcgtctcccgcaagaaagttccaaagcaatacttcttctttcattgcattcatttccccaactgtctcaaactttgtgccgcataagcaaaaggtacaaataaaataataataaaaataaaggatggcgaaaacaaaattacttgtatcaaacaagaacattttgttaatttttccgagtgaaaacatcacttgatatggatatgcgattttagttgttgtaagtttctctagcataattgataattcctattaacatcaattttgatatagcattaggacttcaatgtttttatttttagggtttgttctttttgacttcattagtctagtggtactttaagaccactttttcacctcacacatggatgatccagacctagtcaagctaggagtgacttttatgtttatataatttatacatgttaaattattttagttttcttttttaaaggagatgaatttaattcggtgtggatcccgtctctagaaaatatagggtctttgggcttgaacttccaaatattcgaataacaaaaaaaattattttagtttttaacccaaaaagaaaacatttgcgatcaaatgttattgtaaacaacgcacactaaaaagacatttacccttttcggtgaagagacacagggacagctacatgcgacccaaaaaatgagcttaccctctatttcacatatgtaagaatatactctaattagactcagcatgtagtataaagaaggtgttgacaaaaaagctcaaataattcgataaactaacaatgcacgggtactaattaacaaggaattctcataaaattgaaggtaaatttaaacaacaataagagcatcccaattaggtaagagatttagttaagtaattgcgatcaaggaaacaagtacaacagaagtggaagtctgtctctatatcactttcttccctgatgcataaacttacctcttgttcacaaactttgttaacattttgataatgcaatgaaatgaaattagaaattcaaaacaaaaatagagaaaagtacaaccagtggactatagtccaattagtcaaccaaagtaacaatgggccgagctgataatatttaggcccaaaaaaagcctctggacgaatcagagacactggaaatgaacgttcttcttcgcactaactctcaaagaagaagaaaagatctgagaggtggtcgaatgatccaagagaagaagaacaatctctcttagatcgtttgatctgatccaatcgaagaagaagatg

SEQ ID NO: 30352 - DNA, 3003 bp, Unknown; identical to SEQ ID NO: 26440
  misc_feature (1)..( 3003): 2750-1469P.txt file - cDNA_ID_3030185; gDNA_ID_2214628; Annot_ID_187893

SEQ ID NO: 30353 - DNA, 3003 bp, Unknown
  misc_feature (1)..( 3003): 2750-1469P.txt file - cDNA_ID_3030224; gDNA_ID_2214628; Annot_ID_187880
atctttacatatgtatgtatgtatgtaaccattgattcatgctatgtttattatttatgtatatgaattctgaagaatactatttagaccaacaaggatgataaaaataaaatgattatttgttaaatggatctttcatttttaaaagaaagagaaaaaaaaaaaattatccaaaaaattgtgaaacaaaatatatataaatttgtagagattttttaattattatggaagaagaaaaaaacaagttttctacgcatttgttttaacaaccgtgtatttgagggttttaaaaaaaaggagaaataaagaagaaaaattaaaaatggctttaaaaactttaaaaaaaataaagcataaaaagtttgattggtagaaaaaaaaactgtgaggactttagaatactcttaaagtcctggaagtcatgtgccaatcaccccctttaacctgaatacgccaagcgtttttgtaaggcttaagcgatttcaaaggagtaaatggaagaggattagcgagcatcatttaaaaaaaacaaaattagaaatgaatgtatgagtctaagatgagtgagtagattgaaatgaggggtccgatatttataagaataagtggttaagtaaaaaacaaatacgcaaaagatattattcctgaaaatcaagtttattccatatcacaaaatctcataattataggaaaatgtttagcatttaccgtaaaagtgggtatgtatatatggaatacgtgtggaaaatgtaagataattccaaatgaagatccaaatggaatattagatgtgctataattatggagaagtgatatattcgaatgctggaaacgaagatacgcaataaattaaatgaaattaatacgattcgttgcctgatatatagtcagataatttttttgcatgaaactacaaaatcgtacggctagtaattaatctattcaatggctaggattaaacggagaatccgacttttttaaaaaagaataaaaagaaccgcgttttttttttgggaaatacgaaatcgaaaggctaaaaacaactcaattcaatggccaggattaaaggcgagtacccaaatttttaataccaggtaaaatgatccgcgtgttttctaagtgaaactgcgaaagcgaacgactaaaaacaattcaattgaatggccaagattagaagttatgacccattattttaaaatctgggtcaaaaggatccgcgtgttttgtaagtgaaaccccgaaatcgaacagctaaaaacaattcaattaaatgaccaagattagaagttatgacccattattttaaaatttgggtcaaaaggatccgcgcgtttctaaaaaggtttttttcatgacataaaatttttaaccttatggcaaatttattattttagcgaaattcatgcatactttattaaacgtaattatcaaataatagagtagattataattgaatagtataaacatattttcattttatttttgtttttgtttaactaagctcacagcgacacaattccgaatattagcaattggagaaagaataaaagacacagagcaccatattattcttttagcccaaaaatttccacaagtacaaatccggcaaaaacacatacatagaccaatttttggtttactgacgaaattttcagatcagaaaaccggatttgattcaagtgggtccctaaaccgtcggttttaaacaatattttcaacgatgagctttttcaagtcaaactagcgaaacagctatcagacctagacaaaacattagaaacacaatcatgatgattatcttgatcgtctttagatggactattaggcatagatctaagcattcttggtgaatctaagctttttctcaagatctgtctcatcgcagagatcaaatgtcttgtcagattcgatggtgggcttgaggatttgaacttattacacttgttcatgtgtctcgccatagcttcttcttctgttgttaaaaatctttttgttctcatgactttgtacttcacagcttcagaacaaaatccagagatccatttccctatgtaacgctctcttatcatctctgtgtacgattctgtacactcgtcggttaatccgcaacagtcacacgtcaccgaatctagctcatcgctggatatttgtgtcaccggaaccgttgagataattattacatccggtgttgaaattaacattgttggatcactaagtacactatcagacatggtttcttgatttaaaaccctgttgagaaaatttcgatcaacaatctgattcttacttcaacataagaaactataaagaaaccaagaggagaagttttatcagtagcagaagatgagaagataacgcaataagcttgtgatatatcttctttgttttgtctctgtttctgaaacagagaaatggtttttaaaaagggattcttaaaagaaattggaatacatttttttttttttaacgttcgttttgccactctctgtcttctaaattactttcatctccgagaaaaatttcacaaaacaaaaccattgcaaaaacagagtattaaaaatgctttttatctttggcttttcttgaaaacaaatagaaaaagttaccgtttctatttacttcacggaaaaaacattagaagttcataaaaattcactcgaatctctcgttacttcagaagagagaaaaaaaaaagtattgttttggaaatatatgaggaagagaaaatgagagaagaagtagtgcaggcgaaggagaagcaatgtttggtgttttataagagagacgatagtagtaactagtgacgtggaatattgattttaattttttagttttattttatttattgaacattttatcaaaacgccgcgtattagagaggatgccctagtttaatgtcttggtataaaagcctatattttgcatttttcatccgactctctgcgttaggtttcattttagcggcagacgagagagcaaaagcaaggagaaaccctaaccatg

SEQ ID NO: 30354 - DNA, 3003 bp, Unknown; identical to SEQ ID NO: 25108
  misc_feature (1)..( 3003): 2750-1469P.txt file - cDNA_ID_3030244; gDNA_ID_2214628; Annot_ID_187874

SEQ ID NO: 30355 - DNA, 3003 bp, Unknown
  misc_feature (1)..( 3003): 2750-1469P.txt file - cDNA_ID_3030267; gDNA_ID_2214629; Annot_ID_136020
tcaaaaaccgatactctcttcttcaatctccctctcttatctctccaagctaattctccaaaccgtcttttctcaaaccctaacgtacggattagggtttttgttcgttgattccaaaggttacgactttcaatttctccaccaaattctctgtaaaggttaaagatttctactttcttttgagttcttagcctgattctttaaccttttcgttgtcattcgtcggaattttggagtggtcaaagtaataatctttatcacaattcaagctttttgagagttgattggttaaaattgtttctttttgtttttgcgagtttaatttagtttgagatttgtcttcactggtttctggttttgattagaagttgtttctccattgtttaaaaagtaaggagtaatgtgtagttgcagtagttttttttttttttataattgagaattgtggattatgttctgattctaatgattgtttaataatttgtttaattaaaatatatgattaggtgacgatgaatgagaaaggagaaaagacttgtcctctatgtactgaggagatggacttgactgatcaacatcttaaaccttgcaaatgtggttatcaggtttgatacattacaaccacttttcctcacaatgtggctctcttgtttgtttattgtcactgtttgagtagaatgtgtgttttggggtcttgtttatagtctgaaaccgttgggtgttgatacgtttcattaagggtattgcaatttgctatgggcagagttttttctcaccctattcttttgagtttaagcaccaaagaatctaagcttctgttaattctgtatgctgtatatattaacacatgcctctgtggagagttgtcttctgcttgaaaaggaccacgatgtgtagtctcagatttcgaattgttttataggttgtcccacattgtctataagcatcttgtgaatggaccttttcttataatcgatgtttaaagctgacattacccagccttatattgttgcctgttcatttatgtttgaattattcagtgtgccactgtggtgatctataagaaaccctttttatgtaaatacatgtactttgtgcagatatgtgtttggtgttggcatcatattatagagatggctgagaaagataagacagagggtcgttgtcctgcatgtcgtacccgttatgataaggaaaagattgtagggatgacagtcagctgtgaaaggtagatctgaagctgaaaacaaacccttttttgtttctgtgaaacgtgtaaaaacttatctttttcttgttctgataattcactaggttggttgctgaattttacattgaccggaaaaagtcacagaaggcgaagcctaaacctgcggagggaaggaaagatctaactggtgtgagagttattcagagaaacttggtttacgttatgagcttgccttttgacctggcagatgaagatgtaacttaaacagccttaacttatctccttggcactcacatttgctttgaaaagagataacctttttcatatcattaatctgggttgttatgtatgcagatgtttcagcgaagagaatactttggtcaatatgggaaagtcgtcaaagtagcaatgtctcggactgcagctggggctgtccaacaatttccaaacaatacttgcagtgtgtatgtatccgtatttctttacacattcgaatgattgtatctagttcttgatgaactaatatttgtgagtccatatagctaagcacaaccccatttctttctgcggtctatttgacatgtttgcttttaacaaacttcattgagctaacattttcgtttttgtctaaaattgaatttcccagatatattacttactccaaagaggaggaagcgattcgatgtatccgatcagtacatggatttatattggatggtagaaatttgaagtatgttatgttttctttttttttcaaaaatagttatggtagcctgtggttcaatttctaatatatttttggatgtcgttagggcatgttttggaaccatgaaatattgtcatgcgtggttgagaaacatggtaagcagatattgacttgcttttgctcactaggtccctctatatacttaaatacaaatccaattgtgtttcgtggatgcctttttgtttcagccttgctccaatgctgaatgcctttatttgcatgagattggtgcccaagaggatagtttctcaaaagatgagaccatatcagcgcacatgaggtaaattaatttcaataatctctgccttttagttaaatgaaatagattgtggttgattcttgtttttcgttgatgttgatgttgggctccgttagtgaagtatactttaattgacattaatattgcatttagctcatgttttgtggatgcagatgtgaacttgttcactagctggttttctttgaaagttttaacacccatcctttcttgaagctaggagagatttgattttatatcagtaatttcttctgctctatatgttgtgctcgttaggtggttatctgattcccgttctgtttgaataggaaaatggttcaagatattactggttggagggatcattatgtgcggcgttcagggagcatgttacctccaccagttgatgattatgttgataatgagtctagcacaagaattattccaaaagttgttttgaatgtaagttgccaactcttcttggagcttcctgaattttttctgctctcagcatattcacatgccgttatactttatgagaaggactagatgcgtttatgtgtgataaattctgcttttgacttctttcttattcgcccttttttttcctttgcagaatgtacatagtgccgcgaaaaattctcctccaaatgacagcaacagtcactctgttactcttcctgctggagccatgtggtacactgaattcttatgataatgttttttttaattgctttgtctgagaaacttaacttgtttttcaggggaatg

SEQ ID NO: 30356 - DNA, 3003 bp, Unknown
  misc_feature (1)..( 3003): 2750-1469P.txt file - cDNA_ID_3030267; gDNA_ID_2214629; Annot_ID_187911
aactcctctgctttgtctttttttttttgaatctttataaccgaatctttcaaattgatatttgttatgccgtagtagtaaatgtcagaagtggacaatttagatctctttttggagggtttcagttttttttttttatataaaaatatacatccttgtcatggatttttggaggtttgagatataaatggaaccttatgttggctatacccattttataaacaatacataatcttttaacattagagttgtaatggtggtgatgaaatgtatttgtctcggattccagatcgtaagattttgatggtgaggttgtgttatgtatcagacacttcgtcctaaaaattgaacaagttcttggctggtcgagcagacattttattgttcaatcaatcctgcatctaaccgaaccatatgaacttttgtttgagttcaacaaaaccgaatcaaatccaaattgaaatcagagattaaccaaatgtcagatggtaattctgatctttatttattagtagtaaaaaaaacaaagaggctcgttaattgtggttctttaaatagagcggcgactttgactcgttcatatatttgaccaattgttatcttcaaaatatcttagctagcatcttatatccaagtagagcaaatttcatgcattgacttcaaaaagaaaaggagggagagtgacctttcttgggtgtatatttgtatgcatagaggaatatattactctaaacgtaacaatctcatcaagtttgggtttgaagaatctgttttcggctcacaagttggtgaaatgcattcaaagaccaaattggagacaaagatcattcaagagattatcttttccagacagtcatgggtattctgaatagcctcgctatatggaagtgtagcatgttggagataaagatagagaagacaccatcatgcacaagtccaacaagttcatgcttctctaacctctcatatgtgttaatgtgagattgctcgggtctaatggatttgacgtggttgttgtttactccaaaccttattgatcttaaggttggttcgataaatgaacaagtatttgatgatataataagaacaagcatagtgtcgaaaacttagaaagcttccattcgactctaaaagtggtgttgttggtaaagaacttgtcataaatcacgtagacgaggaattgatagaaagagttaaatgggaagacgaggccacaagacttcgtttctcatcttcttcctacaaattccaaaaagaaatgtccaaaactatctagctccgcgggaacgtgtgtaactacaaaaatgcataagttaattaaaaagtcagctccttactaagtccgtcttgtccaagtacttcgctccgatatgtttctaagtcattattctttgtagattcataataaacccatctctttcttggtattccaaacattccttgactcatattttgatattattgtattcatccaaactttttgtgtaaaccaaatcactataaacaaaagtcataagaaagttaagaatttcatttctttgaataaccgctcaaatatcaattatcttatcattcaaaattgacattaaattcatcattaagcagaataaagctataataatccaccactagctagaacttattggttcaaccgtaaagaagtgataataacctaaataccattaaataactcatcaatgcttgaatgatttgagaccgaacccaccttcccagtactggagcgttactttccactttctagactaaagaaatctgagtagacactcaaatcattcagatatttccgcaggtaaaccaattttagaaatcccaagttgataactaaaccttaagtagctcaagtcgaattaaaccccaaatcctaaatctgagtgatattttttcccgaaaataattggtttttacgatatgaatttatcaccgtaacaactaccttactaacaccatgtcacaacaggtccgagacatcgagacacaactctccacataaaaactggactaaactaaagtgttcgacttcaaactcaaaataaaccggactaagtgtttgaaattaaattaataaaccaaaaaccgttaataaaccggactaaagtgttttaactttttaaccatcactaattaccaattatccaaaataaataaaccagaataatccgaaataataagaaaaataggttttagaatacctagaaagtaactggtcgcatgagataaatgtacttttaacatgaaaaaataacttgccgtcaaaacaaaaaaaaagaacatgaaaatgaaaaataaattaggtataataattattatttaactatattaattgacaaaaaaaattgaatttgacatctttgaaaaaacaccagccattggcagaacaaaaggtttagccacagtttttttttttctcctcgtctcttcgcaaatcctcttcttccttcgattctctctgaaaatctcttctccttcctcaaaaaccgatactctcttcttcaatctccctctcttatctctccaagctaattctccaaaccgtcttttctcaaaccctaacgtacggattagggtttttgttcgttgattccaaaggttacgactttcaatttctccaccaaattctctgtaaaggttaaagatttctactttcttttgagttcttagcctgattctttaaccttttcgttgtcattcgtcggaattttggagtggtcaaagtaataatctttatcacaattcaagctttttgagagttgattggttaaaattgtttctttttgtttttgcgagtttaatttagtttgagatttgtcttcactggtttctggttttgattagaagttgtttctccattgtttaaaaagtaaggagtaatgtgtagttgcagtagttttttttttttttataattgagaattgtggattatgttctgattctaatgattgtttaataatttgtttaattaaaatatatgattaggtgacgatg

SEQ ID NO: 30357 - DNA, 3003 bp, Unknown; identical to SEQ ID NO: 26441
  misc_feature (1)..( 3003): 2750-1469P.txt file - cDNA_ID_3030271; gDNA_ID_2214629; Annot_ID_187910

SEQ ID NO: 30358 - DNA, 3000 bp, Unknown; identical to SEQ ID NO: 13463
  misc_feature (1)..( 3000): 2750-1469P.txt file - cDNA_ID_3030283; gDNA_ID_2214629; Annot_ID_187901

SEQ ID NO: 30359 - DNA, 531 bp, Unknown
  misc_feature (1)..( 531): 2750-1469P.txt file - cDNA_ID_3030287; gDNA_ID_2214629; Annot_ID_187900
ctatgaagattcctaaaattgcatggaatacgagtttctatgttttttgttttcattatttttagagttaaggaagattcctaaaattggaatagattaagaagtctgatctgatctcgttgactttaaatttggacagcctgtaagcttaagattgtctaacgattgtctgtactaattgtatagaacattgttgttttaaatactaattgtatagtatattactattagtagtaatatatcctccattagagacattaactagtgtttttttttttaataatgagagcagtaagttttacattaattagtgctttaaatttggacagcctgtaagcttggagattgtcggtattacttgtatatacattagatgtaatattaccgatgtagagagcagcactaagtttacattcatattcaaaaagtcaaaatctatcatctactcgttacgcagataatctttctctcgacatctctatggattcgaagacagagtcgaagctcctatcgctcacatctcaaataatg

SEQ ID NO: 30360 - DNA, 3003 bp, Unknown
  misc_feature (1)..( 3003): 2750-1469P.txt file - cDNA_ID_3030296; gDNA_ID_2214630; Annot_ID_136032
aatgtggtaacatctcagaagctctcagtgtttttcacggaattcaaacaagaaactcgcttacatacacagcgataatcggaggtttagcccttcatggagatgcatccactgctatatcatacttcaacgaaatgattgatgcagggattgccccagacgagatcactttcataggactattatcagcatgttgccatggtggaatgatccaaacaggccgtgattatttctctcagatgaagtctagattcaacctaaaccctcaattgaaacattactctataatggtagatctgctagggagagccgggctattagaagaagcagacaggctcatggaaagtatgccaatggaggcagatgctgcggtttggggagcattattattcggttgcaggatgcacggtaatgttgagctgggagagaaagcggctaagaaacttctcgaacttgatcccagtgatagcgggatctatgtgttgttggatggcatgtatggagaggctaatatgtgggaagatgcaaagagagcgaggaggatgatgaacgagagaggtgtagagaagattcctggttgtagttccattgaggttaatggaattgtctgtgagttcatcgttagggataaatcgagaccggaatctgagaaaatttatgatcgcttacattgtcttggaaggcatatgaggagctcgttgagtgtactattttcggaatatgagattactaataactaatgggactgaatgaaactgctgagttttgtattaaggcatctttggtctaaactagtatagaaatgggtttgagggcaaaaaaaaactcaaatgacatctcctgtgtattaattggccagtttaataaaaacatagtaacattaagagtgtcattttacatttttcaacatgatttatacactgagtttttttgatttaacattaacctaaaactaataaattatttattatttgttaaacagaaacaaatatatacataattaaaaaaaattgtgtgaatatgtcaaaatgatactctttattaaacggaaggaatattaaaaaacccatatttaatgaattaaaatgtgggtcaatatttattgatatcctctcttcttttggtaaggattggtttggtgaacctcaaatacaatgacctccatgtgcgtcccatttcctgatttcgaattctataaatttcttaggaaactagataccttccgagtcctatgtattaattaattgtgaccgtttctccgaagtgtaataaatttgcatacgaaaattgacaacctctttttttggttcaaccaaaaattgacaactaaagatggggacaacataatctcttaaaaacggcaacgtatcagtaccttttagagtttcagaacgcaaggtcatgatgatgacgacttccgtagtgtcagtcacttttcgagtttcagataatttcttgtttgattgctaaaaaatatgaaccaatggcctgaaattgttgcctccctttctcacaacaattctcttatctcaagacaccaactcactataatattttatccactaaagtgttgttatataacaaaatacaaaaaatcaaaacaaaaattgacatctaaattttaagtaaattatgcataatttagaattatattgctaatctttttatcttaatttattaattttatccttaaattattagccgtagagtaactatagcattgagcactacgacgacactgatcacattaaagtattaaacaataaatgaataaaagatgcatgcttttttgtaaaaaaaaatatagtatgaattatttggccaaccaacgtgaatgtgaagataaggttttgtatgctttttacaaagtcaaaaagtgccttgaccatacgttaggtttaaaatcaagagttgaataattcactcacaaattcatcgtgacctttaaaagcctatcaataaatgtgtgttagttacactatttgattatgaacattgaccaggattaatgtttggttctagctagatcattcgcatttcataaatagtacaattttttcattattgttatcaatagtattaattatagcattatttcttgtatacgttacataaacaaaattcttgtataaatatttaactagttgttgaatacaataacaaaaatctaactattcatattatacaaaaataatcactattagtattaatgtatcttattaatatggagtagtaattatttttgtatgttatgaatatatatttagatttttcttaagatgtttttaatagtaattatttttcataagatgtttcttattaatgtatttttaggattttcacacatcttaaaaaacatattaaaagttgattagaaatatattattcttcttgaagtttacacatcaataataactagtaataaatattgcatagaaattttaaaaatgactatcttttcgaatcaaaaaaatttcctacaaaatacaataataaacaaagagagtagtactgttcatctaaatactgtataatggatgttttaccaattttaacaattacgtacaaaagtttcacacctttataaaaaaaatttgatcaattatccttttatcttctttatttttgccagctaatatacactgcaataatccaaacttaacaaacatttaacattacttcagattcatcattcaataatttcacaaacccataattttaccaaattactacactaatcccccattggcaccaattctataattagaaaatttatttctttatttatttatttatttatttctatttattaaagaaataaattatagaaattggaatgcccaccaccaccagagaccacacttgcacaaattccatctataaacacaaaagcctttagtatcattctcgaaaaccaccaaaaacctctttataacccaacaaacaaagtctctacttcttcttcaatcactgaaacacaacaccaaaaaagaaaaaagtatg

SEQ ID NO: 30361 - DNA, 3003 bp, Unknown
  misc_feature (1)..( 3003): 2750-1469P.txt file - cDNA_ID_3030296; gDNA_ID_2214630; Annot_ID_187929
ttgatgcagggattgccccagacgagatcactttcataggactattatcagcatgttgccatggtggaatgatccaaacaggccgtgattatttctctcagatgaagtctagattcaacctaaaccctcaattgaaacattactctataatggtagatctgctagggagagccgggctattagaagaagcagacaggctcatggaaagtatgccaatggaggcagatgctgcggtttggggagcattattattcggttgcaggatgcacggtaatgttgagctgggagagaaagcggctaagaaacttctcgaacttgatcccagtgatagcgggatctatgtgttgttggatggcatgtatggagaggctaatatgtgggaagatgcaaagagagcgaggaggatgatgaacgagagaggtgtagagaagattcctggttgtagttccattgaggttaatggaattgtctgtgagttcatcgttagggataaatcgagaccggaatctgagaaaatttatgatcgcttacattgtcttggaaggcatatgaggagctcgttgagtgtactattttcggaatatgagattactaataactaatgggactgaatgaaactgctgagttttgtattaaggcatctttggtctaaactagtatagaaatgggtttgagggcaaaaaaaaactcaaatgacatctcctgtgtattaattggccagtttaataaaaacatagtaacattaagagtgtcattttacatttttcaacatgatttatacactgagtttttttgatttaacattaacctaaaactaataaattatttattatttgttaaacagaaacaaatatatacataattaaaaaaaattgtgtgaatatgtcaaaatgatactctttattaaacggaaggaatattaaaaaacccatatttaatgaattaaaatgtgggtcaatatttattgatatcctctcttcttttggtaaggattggtttggtgaacctcaaatacaatgacctccatgtgcgtcccatttcctgatttcgaattctataaatttcttaggaaactagataccttccgagtcctatgtattaattaattgtgaccgtttctccgaagtgtaataaatttgcatacgaaaattgacaacctctttttttggttcaaccaaaaattgacaactaaagatggggacaacataatctcttaaaaacggcaacgtatcagtaccttttagagtttcagaacgcaaggtcatgatgatgacgacttccgtagtgtcagtcacttttcgagtttcagataatttcttgtttgattgctaaaaaatatgaaccaatggcctgaaattgttgcctccctttctcacaacaattctcttatctcaagacaccaactcactataatattttatccactaaagtgttgttatataacaaaatacaaaaaatcaaaacaaaaattgacatctaaattttaagtaaattatgcataatttagaattatattgctaatctttttatcttaatttattaattttatccttaaattattagccgtagagtaactatagcattgagcactacgacgacactgatcacattaaagtattaaacaataaatgaataaaagatgcatgcttttttgtaaaaaaaaatatagtatgaattatttggccaaccaacgtgaatgtgaagataaggttttgtatgctttttacaaagtcaaaaagtgccttgaccatacgttaggtttaaaatcaagagttgaataattcactcacaaattcatcgtgacctttaaaagcctatcaataaatgtgtgttagttacactatttgattatgaacattgaccaggattaatgtttggttctagctagatcattcgcatttcataaatagtacaattttttcattattgttatcaatagtattaattatagcattatttcttgtatacgttacataaacaaaattcttgtataaatatttaactagttgttgaatacaataacaaaaatctaactattcatattatacaaaaataatcactattagtattaatgtatcttattaatatggagtagtaattatttttgtatgttatgaatatatatttagatttttcttaagatgtttttaatagtaattatttttcataagatgtttcttattaatgtatttttaggattttcacacatcttaaaaaacatattaaaagttgattagaaatatattattcttcttgaagtttacacatcaataataactagtaataaatattgcatagaaattttaaaaatgactatcttttcgaatcaaaaaaatttcctacaaaatacaataataaacaaagagagtagtactgttcatctaaatactgtataatggatgttttaccaattttaacaattacgtacaaaagtttcacacctttataaaaaaaatttgatcaattatccttttatcttctttatttttgccagctaatatacactgcaataatccaaacttaacaaacatttaacattacttcagattcatcattcaataatttcacaaacccataattttaccaaattactacactaatcccccattggcaccaattctataattagaaaatttatttctttatttatttatttatttatttctatttattaaagaaataaattatagaaattggaatgcccaccaccaccagagaccacacttgcacaaattccatctataaacacaaaagcctttagtatcattctcgaaaaccaccaaaaacctctttataacccaacaaacaaagtctctacttcttcttcaatcactgaaacacaacaccaaaaaagaaaaaagtatgtctcttcttccccatctcatcctctacctaacacttttgacggtggttgttactggagaaactctccgaccaagattctacagcgagacatgccctgaagctgaatccatagtaagaagagaaatgaagaaagcaatg

SEQ ID NO: 30362 - DNA, 3003 bp, Unknown
  misc_feature (1)..( 3003): 2750-1469P.txt file - cDNA_ID_3030308; gDNA_ID_2214630; Annot_ID_187947
atttttgcagggaacgcaactaacggaagagaacgagcgacttggcatgcaagtacgtggatatatatatagtcttgattattttgaattttgtatgtttgttatcagtttaatgttaaatttggaatatttttttttggttacgtgtagatatgtaacaatgtgcatgcacacggtggtgctgaatcggagaacgctgctgtgtacgaggaaggacagtcgtcggagtctattactaacgccggaaactctaccggagcgcctgttgactccgagagctccgacacttcccttaggctcgggtaaccaattaatcaccctttctttttacattcttttgagttgatagctttacatgattttttttttgtttttaaattgagacaaagaatataaaaatatatactttaaacgaccatatacatgtatgttgtccatatttattggcattgcaagatatggatgacacagaatcgtaaataaatttggtttatttgttgtatatttgtaattctaacaaataacatgttattttgtatattttacatgatatcatgctatttgttaaaattacctgtcataaaaaacaccacttatttatggtttgttttttgaaaattctggcacaaatctaatcatctacaaaatcactctaaaaaataagttattgatttaatgtatggtgttgtgcagcttaccgtatggtggttagagatggaacaattcaaagaagttgatggagtgaggagagtaatgtaaatctttttaactcggtagtaacaagagacaatgtctaagtagtgaattctcaaatgtttgtgtaagtttctgcctatggaagaggctttcatttttatgattttcactatgtatgatctctcttcactgcatttctggttagtaacgcttgtcaccgataaactttctcgttatggaaagttagaatataaaatattgtagaattttgattatcgatatactcttggttagggatcaaaaatatattttagtgatgcctcaaataactaataatcatcataggactcagtctcattagaaattttagtgtaacaaaagtgtgattcgaattcatcttgttgttttgttgaatttgttgcaaagttttacaagttttctcagaccagagatttcaagtgtcttcattggtgatgattctggtgaattgatgatcttacttgtgtgtgtgacacttgcaatgtgtcttgtttgagaaacacatttgtagtttagttggagctgtgcggttggatgagactgagttctatgataataaattagaagcaaagtttcaaaccatattcatacgattcattatgttagcaacaagaaatatgaatatggtttgaaactttgcttctaattcatcattcgttacacaacgtccaaaatctaaaaaagtttcagattttctcaaaattcagtaaatgggcctctatataatgaggtttgacgttttagagatactttgcacaagaaagaaggttctggtcggatcgttacacaccgacctttgaccggttcatcaaaacgtgtccggttttatgtttaaaccgtcacaaaggggaaaaaagttctttaagattcaattacttaatgattaaattctttgcttgcttcaacatctttacaacttttttattaaacaaaacgacattttcacattcctttatccactaaaattctttgtcagattaatctatatatacatttttgcagctattttagcaaataaatcttagagttagatttatttacaactcaatgccattaacattaaattttttttccaaaataattaattttacattaaatttttaatttaaattgtcaatcacattatcaatcaaatttaatccaaacaaacttcacatcaatcccttaaaattagcataaacttcacattaattatttagacatgaaaatatttatttaaagatttaaatcttctaaatttttgcttttagagttattatatcattacctaaaaggcaaaaaatattaattttttaaatattattatttatatatttaaacttcataaaacattattaatatttgaatttataaaaagtttaatctatcaaaactaattaacattattatataatatataaaattaaaaaaatctcaaaaaaaatttcgtcatattttgtgattcgaaattttaagaatgaacatatatattaaccaattggcgaaaaatgtgtgggttcaacgtcccgcaacgactaaaatattttgacaatgattcataaacatattataaataagatcaatattaataaaataaatagtttttttttgtggacgggtttggaaggacgggtttggcaggacgttacttagtaacaatagtaaactataaaataatttacaaaattttatatatattaattttaaaaaatgaattgtctccgcggtataccgcgggttaaaatctagtttaatttaataaaatcatacatttctgacatgttctgtaacgtttgatgattcataagaatcatcggaagagaatccttccgacttctcctaccacgacgctggcactataacattcgtgtaaacaccattcgtacatataaatcaaatattgaaaattttgtaacaattttttttttaatagtctttaaaatatttttaccaaaatactattaaggtagagagagagaaagaagagcgaagtttgctcccacccatgatcgctcttctctaagaaagaaagaaaaaaaaaagagattcaattgttgcacgttctttcctcaattctgattttgatttacaaccaaaaaagacctttaagtttccttgtgggtctctctaaaaaccgaaacttttctctttctttttcttttcttattaagatctagactctacagagagagattgttggttcacacacatatcaaagttacaatctttctgggaatttgaatgaatacgatcaaaaagagttgaaaaaacgaaaactttacgacgatg

SEQ ID NO: 30363 - DNA, 3000 bp, Unknown; identical to SEQ ID NO: 13479
  misc_feature (1)..( 3000): 2750-1469P.txt file - cDNA_ID_3030312; gDNA_ID_2214630; Annot_ID_187945

SEQ ID NO: 30364 - DNA, 3003 bp, Unknown
  misc_feature (1)..( 3003): 2750-1469P.txt file - cDNA_ID_3030325; gDNA_ID_2214630; Annot_ID_187937
tggagttaatccagcggaaggaccgggagcaggagcatcggtctgaggaggagaagcaaccggggatgttgttggagaagtggtaggagctggagttggctcgttaactggaacaggcggtgaagcaattggtgaaggtgtttctgctgtcactggaggaagcgccgttggtggaggagtaacggtggttggtgctggtgcaggagcttgagcgagacatgaagtggccaagaaaccaagaaagatcaaagcttgcattgccttagaattcatttttagattatctcttctttgtctgaatcttgaaactctctctgtttaatgttataaactcttctttatttttgttgatggtgtagaacaatgagagaagagagctctatatatacgcgatggttgggaaatagttaataattaattattggtgtgacactaatcatgcgaaccacatacaaaaatacaacatggcttagcttttcaatggcggtttaaaataattgttgtcttttttctttcttaaacttgacgtgtttgagtttttgaagttttcttgaagaatcatctacatgaaggagcaccaaacggatacacagatctctgccacgtgttttctcttaacgatgttaattctgagatcagttaagtattgacacgtgttatgtttatattggtttttagatatgatttgactctgcgtaatttgctttttggttaaccgcgttacaatgccaggcgtaaattaacttgagttttgcctaatgtttcgtggaaataacgcgtttacgagtaaataattaacattatacgaaaaatgggtcattatttaagttcatattcatatatagtatgtctatcaaaattttcaactgttaattattttagatgtatattataatcgtttctgttgaaaaaagttattttatatgtttcgttgtaatgtgttatctggactgattatacgagcaagggctggcaaaagctgtcatattttcatgttaattaaattaataaattagtagatcattatagttatatttatggtttttattttgttgcaatattctagtgacagattacttggtggccattattgttacaaacttacaacgaaacagtcaagcaaacgcgcattgttcatattctacagctatatcattattacggtgtgaaatgcttcatttcaataagaacctacctaacaattatttatattccttgaataataaattgttagactcttgctttgaccttaatatgcattgtatcagtatcttcttcataagaaaattataagttgaaaacttttttcctgccagctttgaccaaatgaatatattaaaaagttaccaataaagaaattttaattaatttgattagtagtacaagtttggacgaggccttggcaggcctctctttctagcttttcgtggatgtggcctaacctcgtaacttttcgtattttatcaagcccaaagtagctttccgttatcacttatatgaaaaaatctaagatctaaggggagttattgattagtattttaatttataatctatatacattaaagaaaatagaacatcttgaaacctctaaataaatacaccgtgcttaaaaaacttcacgagatattcaattgatttttttttgtttagaatattaaataatcaatactccattagatgtcatttacccaaaaaaaaaaaaaaaaaactccattagatgttattattgtagattgtaccaataaactctgatatataagtccaacaaaactccattagcagtagtgttggtaagctccccatattcttgggctttagtttcagaagatttcatgttatccgtcggcttagtttatggaattatcttgttaatcgccacttttatataatttcatatataatctatcttttagtgcaaaaaaagtaaaaaaaataatttcaacgaaactcaagtttggaaccgcaatccaattattttaatcaaatcattgactaccgaaatatttttccaccttcaaacaatctaaaaagaaaaataatttttttgatcaattcaccaacgttatttagtttataaaacatgataaaagatcctccaaaaatataaaacctagactttccttaaattttaagaagtgtacttttgttcactcaatttattatttctctgccaaattctctatattcttcacacgtaattactatctagttctcgtccatttcctttatcattttctcattgtcttgtaaattgaccactctaatgatctctattatttcctctagaatagagtatgatttatctccaatctatcactctatatatagagtaatcctacaattttctctattttaaagtaacatatagaatgaggatggagagaatgtactatatcatagagttttagaggacaaaattaaagtgggattggagatgctaagtatgtaaatttggttcggttagctatcataagggaccgagtgctatatgacaatgtattataggtaaaagaagtgatattgtctcctgtagatttagtgtccttaaccgttcatcaaatctatgtgaatctcagtagtaggtagttgggtgaagaacgtgtgaagtctatacaactcatattactcctcaaacattttctgataatatattgcatacattgaacctctttttaaattcaaaacatcaaaggtattgatcttacatagaaaaaaacatagactcttatgttcatgtccctattgatcttagtcatacctcataattgtctaacaaagaaaatcaaaggtatcataattatcatcatatgtaatgtagggaacaaatctgtatttactggtatatatatataacacaaaaaaaattaccaaagaaaaaaaaagagcaaagggaacgataccattagtcccaataccaatccttgcaaaattcaaactcaaacaaaccgtttatctcacgcgccgccgtactcgccacgatccgtctttggagaccaatttatg

SEQ ID NO: 30365 - DNA, 3000 bp, Unknown; identical to SEQ ID NO: 13478
  misc_feature (1)..( 3000): 2750-1469P.txt file - cDNA_ID_3030346; gDNA_ID_2214630; Annot_ID_187926

SEQ ID NO: 30366 - DNA, 1295 bp, Unknown; identical to SEQ ID NO: 13501
  misc_feature (1)..( 1295): 2750-1469P.txt file - cDNA_ID_3030371; gDNA_ID_2214631; Annot_ID_187974

SEQ ID NO: 30367 - DNA, 3003 bp, Unknown; identical to SEQ ID NO: 25122
  misc_feature (1)..( 3003): 2750-1469P.txt file - cDNA_ID_3030375; gDNA_ID_2214631; Annot_ID_187970

SEQ ID NO: 30368 - DNA, 420 bp, Unknown; identical to SEQ ID NO: 306
  misc_feature (1)..( 420): 2750-1469P.txt file - cDNA_ID_3030375; gDNA_ID_1563583; Annot_ID_147943
  misc_feature (197)..(197): n is a, c, g, or t
  misc_feature (258)..(258): n is a, c, g, or t
  misc_feature (264)..(264): n is a, c, g, or t
  misc_feature (268)..(268): n is a, c, g, or t
  misc_feature (275)..(275): n is a, c, g, or t
  misc_feature (286)..(286): n is a, c, g, or t
  misc_feature (304)..(304): n is a, c, g, or t
  misc_feature (307)..(307): n is a, c, g, or t

SEQ ID NO: 30369 - DNA, 3000 bp, Unknown
  misc_feature (1)..( 3000): 2750-1469P.txt file - cDNA_ID_3030379; gDNA_ID_2214631; Annot_ID_187968
cttttggcagatgaagcaaccggatcttcagatctgcgacgagatccagcggcttgacgaatttctttcactgataaagccacagatcggtttctcgatctactaagcatgttctcaagtggtttttccggcgtaggcaatgctacagaagacggatttggattcccggtttgagatttcgaagacggcgaatccatcaccaatcgtttcttcgatttgaatggaatggatctagaagagcctggtgtactcatttttatcaacaatgtctatagagtgtcagatgcagagaggagatagtggaggagatagatgaagacgatgaagacgacggaagaagaagaagggtttagatttatttaggtctttggcgcgcaatcctacgtgtaccaaagccacgtatacctcccgcgcctattaacccgttgcttcccgcgaaaacacttatctacgaagaagcccattaattaggcccattatgaattgctgtctctgaacgaatctaatagatgcaaaccaaagagaccagatttctttttttcaacttgtgattttttttatatgaacatgatttatataaggtcgtcgtgcaatgtttatgctgcttgttcagtatttatagtttttttgaaaaatcaaagataatctcatcataaggaatcttatcaacagtaaaatattaagataaaacagttagcccagcaaatcaaatataatcaatggtttagtttatgttttctatgtttctctttctaaactttgaatatatttaccacatccttattttaaatcatagaattaaacagtttttaaatgattatgatattttttctattgtcatttctaatattttactaacaaaactttaattttatttgtctattaaatgttatatttttccggtattgttatttctgtatatacttgaactttttcttattaaggttcgtcgtttccattttattttatattatatttgctaatgaggaaatctatataaaatcatgaaataaatattgattattaaaagaaaacacataaatattaaacattgaatattaccacatccctattctaaatcaaagaattcaataaattttcaatgattatgagattcttttcaattgtcattactactattttcttactaacaaaacttcaacttttctttttattaaatgttatactttccgatattattatttctctatatactcttatttaaatttgttgttttatgtcaatatatgaagttttgatgattataataataaataccaatttttatttcttttatcggtttatcgtctagttgacaaaaaaaaatataatgccgttataaaataattataactttcatgagtttttatttttgattaacatttaaaaaattaaaggagctagatgtatcaatttgtattatattatgctctgagactaaatattgatcttgataccaagaatctgatctagatccaaaatttatgtcaactgactcactatcatattttcaaaactcaattttaaagttagtaatataatgtacatcttaactattgtttttttgggtctgtttagaatctgggccggtgcccactcaaaacaatcggcccattatacaagttgttaaaataaaattcaatatatcacattaaagaaaaattacaattttttggcttcaagacttttttttttgtgtgtgcaaagacttttttggattcaagctaataaatgttagattacctttttaaccaaagatcaaagtaaaaccaaaatcatagaagaggaagagaactcgtgatcacgtttctttggttaagtaatgttgtatagaagagaagagaagagaagaggaagaagaaaagcccaaatcgaaaattgaaaactagtactccaaactccaaagcatcaatattttatcactcctcttttcttccacgcaaacccaattctcttcgtcttcttcttttgcttttctcccctaaattcgtcgatcaaattcttgtcttttcaacttcttcatcgaattttccattgcccatagcctctgtatttgattcctccttctctaaagcttcggatattaagacaattatatcttcctagctgcttatagaccttcgctttctaattgctgttcctttcgtgggtctctggtaagttttgattttctcatctgctgttatcgagaaaggttgattttttttgattaatcgcactgtgatttaaggttggaggagattatagtgttagcttaagggtttttgaggtttcaatttagaatcgtattgctcctgatcatttccctgttaaaagtagataaaccccttgttctattgggaaggaattcgccgtttttgcttcgtcttcttgtgaaaaatagagttggttttaggtaattgactttgatcaaggtctattggttgtgcaaaggttgcgtgaatcttgtgtcagcctcttgattgagtatagattacttcgtcttcgctttctctgcaccatcaattgtcatcagagtgctaggcatttagtgcattgtccaaagattctgcttgtgcatgaatgctattgttgaaaaagaaaggaagtgtttgaaatcgaatagtcttttgagtgtcaagcaaaggataggtgggtctggtttatatccatcatggtggaaaacagatatagaaacatttctttagcaggttatgccacgagttccgtatccttggtttgtctttctgcgtttaaggatttgatttgccttagtgtctcattggttagtatattcattgtatgtgcttctagcttgaacattttagtggcacttttttgtttgcatacataaattatctctgtcattaggtgatttgcattgtggatgctttatgttattcatgtttgatgcaggatttgtagttgcattctcattgcgcactacactttcttcaaatttccgcgtggtaagcagggaatggaccggctgttttggccaatcgtctgtgtttacaaatg

SEQ ID NO: 30370 - DNA, 3000 bp, Unknown; identical to SEQ ID NO: 13496
  misc_feature (1)..( 3000): 2750-1469P.txt file - cDNA_ID_3030387; gDNA_ID_2214631; Annot_ID_187965

SEQ ID NO: 30371 - DNA, 3000 bp, Unknown
  misc_feature (1)..( 3000): 2750-1469P.txt file - cDNA_ID_3030397; gDNA_ID_2214631; Annot_ID_187960
gtatcaataccaagcaagtaccctgagtagtcattagaagggatcaatggaggttgtggaggaaggtttaagtgaaagagcgggtcatacgtgaagcaagaacccgccattatatcagagcttggtaatgacatagagcatctaggcaaatgcaagaggctgagaagatcagggattggagttgttgttgtgtttggatgtgaagtgttcatgaagaaattagagttgtcttcagaaacaccccaattcgattcttgaatcatttggttgatcaaatggttgttgttgctgatgttttggttctgagtttctgagtttgggagagagataacagaagggaaaacagagaactcatccattgttgggagcttaagatcgtcatcaaagctgtttgttgtgcttccaagcggtggttgaaactggtggcttaccgtaaaagttgtttccgccgcacagaagccgccgttgttgtccaccatcgaattaggatcaaaacatgaactttcctcatacattttcaactgatttttttctgcaaccaaaactaattttcacaaccataattaatctttaagacaaaagccaatctaagttaatttcattaaataaagaaagtttgtataaactcagttaaaacctaatctcaaactaattcccttaagcacctttcttttagattggaaaagaaaaatcctctgtttttgtgttttgatagcttctcttctatcacttttttagtattgattcaaaaatcagactttgtttagagaatgaaattatctaattaccaaaagttagaagatgatgatctttttccttctttgtcgtctttgaaggttaccaccagctatatttcagcttcacaatgtcaaatcaaagatcatttcaacatttagagcttaaatcaaatgtaggaaaaaagagagaagcttttttggtttgctttatttctgtttgatggagtttgggtgtgtgtttgtgtcttttgggtctttcttgttcccataggagagggttttttggacgtgtttgtattgttttggacagctctctactaaatacttcaagacagaggaaacaatttttcttttcttttttttcttctcccttttatgaatgagaacaaaatggttccaacctttaatttctgacacaaacaaagctttaattctttactaagacatgttctaatatttggagaattattagaaagtttagttattttcttttaaacgtaattcaagccgtgtatttataaactactagagtttggagcaagaaaaattaaaactaatgaaatatgttggaactaatagatatattttactttccagttccacttcttattctaaaatgttccccaatgtcaaacaaatagtggatacatgatgataatagactgaaggaaatggaccttaatatgagatatgataaataaacatataaaaataatgcaatctccttcctaattgagatttcagttgggtcatgcaatctcgcttttggccacaacggcaatggaccccacttgcaacctcctaattccttacattttttctcaaatggtcaagggtatttatgtcattttgactccagtttggtaacatttttctttttgacatcacagtttggtaacagttaagcaattaggaattaggaatggtaggttaagtatacaacctcataaaatggttttgctctcaatggaatcggaaggggatatgcggaaacaagaaagaggttttttttgttttgttttagaaagcaggtatatgatagaactattatacatacaacttaaattttactacaccgaagaaagtgagaaaaagaaaccacaaatgatgagggaaactttacacactaccactttctatattgttcgcaaggattagactcgaattcaagatggctacaacaagagcttatacagaatttgctagactagtttaagaactctctcatcatgctcatcaacattctcgttatctactaaagagaagtttcttctccctcttaacattactaatatatcaaccttttacgatcttaaaccatattcagtttacctaagctttaggttgtgcaatctgaaacaccagaggttatacagtttgacatagaacatgaaactgtgtttacacaaatcaatccacagagaatacgaattattcattacattaccataagttttgaatagacatagcaatcttgcttgctctcagttcgctcgttcgcgtaacacttcaagatcaacctcagtaggatcagtagcttgaatctcatagtgaatcccttgaagctccctacttaactggtctttagaagtcgagtaaagcaccttggctcgaattccagaggtcgaaggagacctacaacatcagtagtcccaaatcaaaatgttttagtctcaacacatcaaaacccttatagacttactaatggtaaaaatcaaactaaccaagcaaagaagaagattttgctcttttgacaattctcagaagtaacgaaatcaaagtcataaacagcgtatctgcagtcattatcaggaagtgaagctaagaaatcatcgtagctctctgtaggatttccagttttctcaacaacaacttcttttttggattcatcaatcttgaagaccacatagcgatgagtttttttcctttgaagctctagaaatgtggttttgctctcatctgcaacacccattccagatattgcatttggctacagatataaaaccaaaacacatatcaaaaccataccaaaagattcgatttttaatccaaaattcatcgaattgacttcatctagtgatcttaaaccctcaataagagtaaaaatggagatgggtttagttttttttaacatcgacttcataaaaatcaaatttttaacattgaagatgcttgcgacatagacaagagtacatcgattttaagcaagaagagaaaagtttttttttgtaattttaccctgctaagtcctctgaaagacatg

SEQ ID NO: 30372 - DNA, 3000 bp, Unknown; identical to SEQ ID NO: 13514
  misc_feature (1)..( 3000): 2750-1469P.txt file - cDNA_ID_3030426; gDNA_ID_2214632; Annot_ID_188001

SEQ ID NO: 30373 - DNA, 3000 bp, Unknown
  misc_feature (1)..( 3000): 2750-1469P.txt file - cDNA_ID_3030430; gDNA_ID_2214632; Annot_ID_136077
aatatatttataatcagttttaatatgttttcttaatctatgtgtgttttttctagaaaatcaattaaaaagaaacagatggaatattaacatataactatgccatctagaccttttccaattctattttcattttatgtttcatcagtttggcttttaactcatatatatatataattttattcttcctacaatgtcacattaaaaagttcaaaccaaaattctctctattgtttttgcaagttttagtattgtcatctcattaaatcagtagatgatgattaggactcttggaaagtttaacccttttagattattctatattctattcttaaaaggacgtttgtgttattacaaaaagaactaagagatatgtatcatattagtattaaaagaagaagagaatgagcaatgaagagccacatgcggccggcatggtccctccttatacgcatttctctttctcccaaaacatttgaccttagagaaacagcatgtttttccaccttcttttgtattttattataatttcatattccattaagttgttgtttaatataaatataaacactaatcaaactcaaccagagttttctgatgttaattatatattaaactttgttttatcacaagcatgtcaacgggatttgtgtgcggcggattctcttatatatctatctctgttatccaaattccttttacatacaaattttcactttaatctcgttgcttttgataacttaattactatacgaatatcttactcttatcatactgactactgagtgtataaatattactagttgacatttttagaaaatactgaactagttaatttttgtatcgattaatctatccacgttaagtgttgtgtacaaacaacttctacatgtacacagaataacacatggttaaaagtttaaaagttgaagacttgacaataatatagagacttgttggtaaaaagatatggaaagttcaccattattgatggaaaattaagcgtgacatgtgaaacattttcccttagattctggtccttgttaactgcataaatgttcatgttctttgttttgccgctttggttggattccactaaagtctaatcatccaaaatctttggagtgtattaatacatgacatattcggccaattcaagaaaacctgggaaaacagttaaaaataaattatttacataccgaaaatcgtaaacatggtaggtaaaaaacaatcaaattacttaaaatatttcttaaaattttaattgatttaagattttaaaattattttttcatagattaatagtaattttcaaattaccacatatattccatgttccaaaactataccaaaatcataaaattcaagatattcagatttgtgaacttctctcaaactttagtttgcgatattttgagaaaccatttcacaattgtgagatttttaagcaattttgttttttgggtgataatatctcaaggttttttttttcttctttagatttggtaaaagaacttttgcacacaaacaaaaaaaaagatttggtaaaagaacttttgatatttgtctattactgttggtggacaaaaccgttttgcaaagtatacaagaaatcttggtgtattaatttttcatcggattgatataattagggcttaattagatccaagcatgtactttgtgaagttaaattcgggcaatgaaacaaccacacaatattatcataaaccactatggaaagaaattctttaagattggttaagtacttaagtttaatatgaacatttgtttagtcttcttttagttctcaaatctcttaatttacatgactgattctttggaatgtatagactatgaaattatgtttatatatttgctaggtattagcatctctggtttggcatgacactactatatatcctaaactatatatattatgagaaaaagttagaattcaaagatttaattttaataattacctattttttgtcatgacaattattgtattttctaatatttttctatctatattccccaaaaaaataacatttgaaatcccagtgaatctccatgaataggagaaaaatattgagtcaaaacaccatcaaatttgtttctaattattgtctgtaatttcctaccaattaaagataaatctcataaacagaagaatctataatagtgctgtctataatctactacctaattgagatgaatctcctaaaccgggataaaaccggtttataatagtgctgtctataatctactacttaattaagatgaatctcctaaaccgggataaaaccggttcaataaccctgataaaaagaagagggcggctgctaacgtgcgcatcgggtatttatgagtagaatcctcctcattcctcatcacaaatacaacaacaaaaaattgtgtgtggactctttctctcttctttgctggttttgaggagaatcgtgtcggctaaatttgtgtcagacacaccacactctgagtaatttttctcatttcttcgatctctctctctctctcactctgtttttctcaatttaataatctcttctcttctctttcttcttcgttatatatataaattaacaaactttcttcttctctggcaatttcagttgcaaagtcttcctcttcttcttccaccagagacaattccatcatcatcatcaaatagacaagggaagaattcaatttcccctttctttattggcgcgaagatctttcacagaatcaatcaccaacgaaaaatcgagaatgggttcgttacttttctctctgttttccgatgattgaatccaaatttgtatcttatgatttgttttcgtaactgggttttgttcaattttgagtcttttgttgttttgatcgttttagggtttactctctgtttttttcccaaaaggggtcttcgttgttattgaatctaatggaattggttttttttttttgtggacagatgtttgcttgagctattcatataatatg

SEQ ID NO: 30374 - DNA, 3000 bp, Unknown
  misc_feature (1)..( 3000): 2750-1469P.txt file - cDNA_ID_3030430; gDNA_ID_2214632; Annot_ID_187996
gcaatgtagaaaaaaaatgctatgttttcaatgaattattttctaattgtatactctctatgttctttattaattgatttttaagagaaaataaattgtttcaaaaagattgaatttataggttttctatgcaccatttattcgttcttattgatgaattttaaacttaagacaaataattgaatattattggtttagaactatagaaaaatgtaaatcacaaaaattaatatatttataatcagttttaatatgttttcttaatctatgtgtgttttttctagaaaatcaattaaaaagaaacagatggaatattaacatataactatgccatctagaccttttccaattctattttcattttatgtttcatcagtttggcttttaactcatatatatatataattttattcttcctacaatgtcacattaaaaagttcaaaccaaaattctctctattgtttttgcaagttttagtattgtcatctcattaaatcagtagatgatgattaggactcttggaaagtttaacccttttagattattctatattctattcttaaaaggacgtttgtgttattacaaaaagaactaagagatatgtatcatattagtattaaaagaagaagagaatgagcaatgaagagccacatgcggccggcatggtccctccttatacgcatttctctttctcccaaaacatttgaccttagagaaacagcatgtttttccaccttcttttgtattttattataatttcatattccattaagttgttgtttaatataaatataaacactaatcaaactcaaccagagttttctgatgttaattatatattaaactttgttttatcacaagcatgtcaacgggatttgtgtgcggcggattctcttatatatctatctctgttatccaaattccttttacatacaaattttcactttaatctcgttgcttttgataacttaattactatacgaatatcttactcttatcatactgactactgagtgtataaatattactagttgacatttttagaaaatactgaactagttaatttttgtatcgattaatctatccacgttaagtgttgtgtacaaacaacttctacatgtacacagaataacacatggttaaaagtttaaaagttgaagacttgacaataatatagagacttgttggtaaaaagatatggaaagttcaccattattgatggaaaattaagcgtgacatgtgaaacattttcccttagattctggtccttgttaactgcataaatgttcatgttctttgttttgccgctttggttggattccactaaagtctaatcatccaaaatctttggagtgtattaatacatgacatattcggccaattcaagaaaacctgggaaaacagttaaaaataaattatttacataccgaaaatcgtaaacatggtaggtaaaaaacaatcaaattacttaaaatatttcttaaaattttaattgatttaagattttaaaattattttttcatagattaatagtaattttcaaattaccacatatattccatgttccaaaactataccaaaatcataaaattcaagatattcagatttgtgaacttctctcaaactttagtttgcgatattttgagaaaccatttcacaattgtgagatttttaagcaattttgttttttgggtgataatatctcaaggttttttttttcttctttagatttggtaaaagaacttttgcacacaaacaaaaaaaaagatttggtaaaagaacttttgatatttgtctattactgttggtggacaaaaccgttttgcaaagtatacaagaaatcttggtgtattaatttttcatcggattgatataattagggcttaattagatccaagcatgtactttgtgaagttaaattcgggcaatgaaacaaccacacaatattatcataaaccactatggaaagaaattctttaagattggttaagtacttaagtttaatatgaacatttgtttagtcttcttttagttctcaaatctcttaatttacatgactgattctttggaatgtatagactatgaaattatgtttatatatttgctaggtattagcatctctggtttggcatgacactactatatatcctaaactatatatattatgagaaaaagttagaattcaaagatttaattttaataattacctattttttgtcatgacaattattgtattttctaatatttttctatctatattccccaaaaaaataacatttgaaatcccagtgaatctccatgaataggagaaaaatattgagtcaaaacaccatcaaatttgtttctaattattgtctgtaatttcctaccaattaaagataaatctcataaacagaagaatctataatagtgctgtctataatctactacctaattgagatgaatctcctaaaccgggataaaaccggtttataatagtgctgtctataatctactacttaattaagatgaatctcctaaaccgggataaaaccggttcaataaccctgataaaaagaagagggcggctgctaacgtgcgcatcgggtatttatgagtagaatcctcctcattcctcatcacaaatacaacaacaaaaaattgtgtgtggactctttctctcttctttgctggttttgaggagaatcgtgtcggctaaatttgtgtcagacacaccacactctgagtaatttttctcatttcttcgatctctctctctctctcactctgtttttctcaatttaataatctcttctcttctctttcttcttcgttatatatataaattaacaaactttcttcttctctggcaatttcagttgcaaagtcttcctcttcttcttccaccagagacaattccatcatcatcatcaaatagacaagggaagaattcaatttcccctttctttattggcgcgaagatctttcacagaatcaatcaccaacgaaaaatcgagaatg

SEQ ID NO: 30375 - DNA, 3003 bp, Unknown
  misc_feature (1)..( 3003): 2750-1469P.txt file - cDNA_ID_3030481; gDNA_ID_2214633; Annot_ID_188035
catcagatataagattaaaaaaaaagcaaatttcatttctttttaaagaaaatattacgtgattagacagttatttggaaatgatataattgtcctttttacctccaaaaacaaagaaaagtgcctcatccctgaaaagtgcctcaaaaagaataagattttgtaaaagtgtctaaacgtgtcacattcccaaaataaaatataagttgtcaattcaaaaagttccttattacactgatatactaagtattttcttatagtagaaagagtgttttatatgaaagcaacattgtttcttagaaaatattaaatttttattttgttgatccaaaatagtttatttatatttgagaaatttaatatatgagaactgtaaaatacaacgtttggagagaacgtaacactagaaaataccataaagaacacaacccgtgcactcacctcattaccgtcatcgacaagaccattcgagatcgcatcaccagtctttattatcaaggcaccagcaaatatgcaaaccttcagaacggtgcaggcttcactaacgtgataatttgtaatgttctgttttgagatcatctccaggcctagctaactttatgctaggttattcagctgtgtatgtttaaatgcggcatgcgttactgttttgataaagtagctttagaagaatgtagtgtgttgggaataagagtaattttgttttgtgtttaccaaattacagcacaacacagacatattcattcttcatgctcgtgatagtgcctagagaattaacgacttgtgatcacattattagaggaaactcctaactaataaggattaggataaacaacactacatgtggtacactcaacaactcaaagattatctcctgaaaccttatccaactgttcttcggccccaagcagtgatgtagatggctggtcaaaggcgaggacatggtctgactgatggtaagaagtgttcaagcctgattctagtattgggtgacccactacaatatcaggtgtataaccagctgcacctctcaccaatcgaggcttctttgataatctctcctctcctgtgctctcatctggagacccaatgttacaccctgagtctggtgttaaaggctcccggtaagatgagagagactcgtcaactgagagacttttgtctggtccacagtccttgccagacttgtcttgaagaggagactcagatgttggggcaggggttgcaggatctgaatcgcccgttactggggctgagggttcgccgagtactccactgagtcgttgttgctcttcaattatcttcttcaagtactttccttgtgcttctatccgtagttgcagctgtctttgcacctaagaaaaaatcacatcaaagaataatgtcatatgtaatgcaaaattcagtgctacactgaaaatcctactaattgtttcgttgttgcttgtctttcttaagtaggaatggtgaagcatacttctagttgctcgtgtaatcgtttctgaacttccatctgcaacttgagggcttcagttatctgcattcccctgtaatctcgaaacgatattgatcacttaatctgcggcgcgaggtaatatatatatagcatcacaaatcaagctcaaagagggaaatttcacgtacgacgagccgtccaacccagagagcatatctccagattctttcttatcagtttttttccctgaaaattgaaaaaaccagttttcaggtatataggaaactggtagaatgagaaagaagatgaagaaaatcaatgtccacactaccttcagaagacgaatctggaagatactttgcaagtcgatatttctgactcaaaatacacaaatgcaaaaatcagcaagggtaagagaaagagagacgagacaagatgccacacagtttgagaatacctgtaagtgactcttgacatgatatatagttaagccttgtacacccatcactctaagaacgcctttgggtgtagctcctttggaaatcaaaggaagaaaaatgtttaggaaccctaagcaaacagacgataggctttccctctcatggatagtagtaaagcatacaagaagagcaatttgattatattggtgtgcatattattaccacagatattgatgaggaaaacatgagttactaaatttaccatagactatacaagaaaaaaggaaacttactatcagggccaccaagttgagcaacggcatcaacgaagcgttcatgtagctcatgcgtccaacgcagacgttgtttggatgcatgactagaattggggcctccgttgtctgcttccatcagggctaagatataaacacgataaagggaaagtaatgagtagtggcaaagctaggaaatgataacatatgaggactggccagagagaaagagatagaaatggaaacaaggaagacgaaatagcgcccagaattagctagtaaaaacagtccaagtcaagtttaagacttgctccggcagatccaccacaggacaccaaaatcagagacatgttcactaaaatcggaggaatttgtcgccgagaaagcaaaaagaaaacacaatccaaggttatggaatctacgaacctgtgggtggtggatctatacacgacgcccctccattttcggaacttgctcttctccaagctaaatcttatctgaaatagaagatattgtgttacagactagtttactgagtccggtgggttacagggcgggcggcgatggagcagagtcctcctcaaaaaaattccagtcttcttcttatcgctcgatcgacgaattccaggcagtggcattgactattgctgcatttctttctgggtaagccgggcctctcggtataggcccaaaccattctaaggcccaaaccattatattaagttggttggtccaccaaagtcagcagcagctagaacaagagcgactctgcagctgctcttctcccgcttccttcctgttagttagcctcagagatcctcgttccccgataatg

SEQ ID NO: 30376 - DNA, 3000 bp, Unknown
  misc_feature (1)..( 3000): 2750-1469P.txt file - cDNA_ID_3030542; gDNA_ID_2214633; Annot_ID_188016
cacttagtggcttgggtcgagagaactcgcccggactttaggcagtccggatcggggcctttcatgcgtactgatgcaaaaggggagtgttatcgcatacgcatcaaggcaattgcggaaacatgagaagaattaccctacgcatgatttggaaatggccgcggtagtatttgccttgaaaatttggcgatcatacttgtatggtgctaaagttcaaatctatactgaccacaaaagcctaaagtacatattcacccagccggagttgaatctaaggcaaagaaggtggatggagcttgtggcggattacgacttggatatagcgtaccatccgggcaaggccaaccaagtcgccgacgccctgagtaggaggcgctcggaagttgaggcggaacggagccaagtggacttggttaacatgatcgggacattgcatgtgaatgccttgtctaaagaagttgaacccttagggttgggagccgccgatcaggccgacctgcttagtaggatccggctggctcaggaacgggacgaggagataaaaggatgggcactaaacaataagaccgagtaccaaacctcgaacaatggtacaatcatggtgaacggtcgagtatgtgtgccgaacgatagggcattaaaggaggagatcctaagagaggcccatcaatcgaggttctcaatccatcctgggtcaaacaagatgtactgcgaccttaaaaggtactaccattgggtagcaatgaagaaagacgtggccagatgggtggccaagtgcccgacttgtcaactggtcaaagcggagcatcaagtaccaagtgggttgttacaaaacctacctataccggaatggaagtgggaccacataacgatggacttcgtcaccggactgccaacggggatcaagtccaaacacaatgcggtatgggttgtggtagaccgattgactaagtctgcgcacttcatggcgatctcggataaggatggagcagaaatcattgccgagaagtatatagacgagatcgtgcggttacatgggattccggttagtatagtgtcagaccgagacacaaggttcacgtcaaagttttggaaggctttccaaaaggccttaggaactcgagtaaacctaagtactgcctaccacccacagacggacggacagtccgaacgaacgattcaaaccctcgaggacatgttgagggcatgcgtcttggattggggaggaaactgggagaaatatctaaggttagtagagtttgcatacaataatagttttcaagctagtattggtatgtctccctatgaggcgttgtatggacgagcttgtagaacaccgttgtgttggacgcccgtgggcaaacgtcggttgtttggacctacgatcgtggatgaaaccacggagagaatgaagttcttaaaaatcaagttaaaggaagcccaagatcgacagaaaagctacgccaacaaacgtcgaaaggaattggaattccaagtacgagatttggtgtacttaaaggcgatgacctacaaaggggcagggcgattcacctcaaggaaaaagttaagcccaaggtatgttggcccgtacaaggtgatcgaacgagtaggggcggtggcatacaaacttgaccttcctccaaaattaaatgcgtttcacaacgtcttccatgtgtcacaattacggaagtgtttaagtgatcaagaagaaagcgtggaagatatacctcccgggttaaaggagaatatgacggtggaagcatggccggtacggatcatggaccgaatgacgaaagcgactcggggaaaatcaagggatttgttaaaagtcttgtggaattgtggaggccgtgaggaatacacttgggaaaccgagaataagatgaaggccaattttccggagtggttcaaggagatgggtaaagatcaacttgatgcggattcgaggacgaatccaattcaagggggggagacttgtaacgcccgcgatcctcaataggatcgttggctaggacttggtccgagagaagaaggtggagtctcggacaagtgagaaggagctggctataagctcggacaaaggggaaatcatgcaggctaagctaggatcgtaaagaaatcacttgggtcagctcgcccaaagctcaagctcagctggaaggagtgacagttactcaggtcgagtgacagtccagctcgggcagctggacgagtgacggttgagctcgaggcagctggacgagtgacggttgagctcgaggtagctggacgagtgacggacgagctcgaggtagctggacgagtgacggacgagctcgaggtagctggacgagtgacggacgaactgggcggttatgggcgaagagatacaactcttcggaaaggtgcaactcttcggaagggcgcaactcttcggaaaggtgcaactcttcggaaaggtgcaaggaacggatgtgttgattcgggagcatccattcgccccctatataaggaagggcgcccaggaccattctactcaccacaacacaccgaaaacacaagaaaactcaccattaaaactctctccctcttgggagaataaatagtcttaggattcggtagccgggctgtggccggcaataaagaaggagggtcggatcgacctaacctcgagaaggaaggtaagggatcctagactttgagtctaagggttctaggatgtgagttagtagtcggatccttgaaaggaccgactagagggctgagtagtatccgggtcatgtgcatcctacacaagactcggtccgggtaggggtcggctgaggcggggacgcggctcggcggaggaccggcgggtcttaactgacctgccgagaatcggccggactgatgcgcgatcttcccctctctgaattctctccactgatccgagtagtgtatggcatatagagcattgcatggacttgcatatgattaagtaaataagattacttatggctctatgactttcaggaacgaatg

SEQ ID NO: 30377 - DNA, 3000 bp, Unknown; identical to SEQ ID NO: 13517
  misc_feature (1)..( 3000): 2750-1469P.txt file - cDNA_ID_3030546; gDNA_ID_2214633; Annot_ID_188015

SEQ ID NO: 30378 - DNA, 3000 bp, Unknown; identical to SEQ ID NO: 13522
  misc_feature (1)..( 3000): 2750-1469P.txt file - cDNA_ID_3030550; gDNA_ID_2214633; Annot_ID_188014

SEQ ID NO: 30379 - DNA, 3000 bp, Unknown; identical to SEQ ID NO: 13527
  misc_feature (1)..( 3000): 2750-1469P.txt file - cDNA_ID_3030579; gDNA_ID_2214634; Annot_ID_188061

SEQ ID NO: 30380 - DNA, 3000 bp, Unknown; identical to SEQ ID NO: 13530
  misc_feature (1)..( 3000): 2750-1469P.txt file - cDNA_ID_3030609; gDNA_ID_2214634; Annot_ID_188049

SEQ ID NO: 30381 - DNA, 3000 bp, Unknown; identical to SEQ ID NO: 13539
  misc_feature (1)..( 3000): 2750-1469P.txt file - cDNA_ID_3030617; gDNA_ID_2214635; Annot_ID_188093

SEQ ID NO: 30382 - DNA, 3003 bp, Unknown
  misc_feature (1)..( 3003): 2750-1469P.txt file - cDNA_ID_3030697; gDNA_ID_2214635; Annot_ID_188095
agaaaactatatttgttcctatgtatatgtatgttagtctaatttaaaaactctatagagtcttgttgtaaacaaagcaattttctacaacttatatttagaaaaaaaaaatcacatgaagactaagatttatgaaccattaaattataatctagtgataaagaaactagtcagcttgacaaagatatggataaatgcaactttgtatcaacagtgatatataaaataacttatcaaaaattggaaataaaaaacaaatatcatccaattttgggcaaaatattaatagtttttgtgcccatatggtgacatcgaaagggtatgtgaagttgtgaacacaaaactatataaaatagagagagtgaggataagattactagtggatggacttcaaatttggctcctcttccaacctgtctttttctttgctacacaatatacatttttgtaaccccccatacacatttcaacataaaactatatagtcatccaattgaatgattttttttttcttttaaccaaggtatcattatcaaacactgtttcaaaaatcaataatagaatttggcaccaccaaacaaacattttttttgtaaaaatagacctctcaaaaatatcatagaattaaagaatactttttattttatttgtttgtccatcatcatcttcatcatcatcatttcgccgttaagtttctctctctctctgtttccacccattatagaattcagtgaatcaacaacaacaaggtaacacatctctctctctctctctctctttctctctttttatatttttgtgtcccaatctcttcttcatttctgtttggttgccgagaaaacgcaggaaacttttctgcaaaaaaactcggtgaccatattcaaaactttcccacgttaattctctcttctttgttttgtttcagattcattacttttctccaaaaaactttcttcaagatctgttcttttaaataattatggcggaagaacatcgatgcgagacgcctgaaggtcaccgtctctgcgttaacaactgcggtttcttcggaagctcagcgacaatgaatctatgttcaaactgttacggcgatctctgtctcaaacaacaacaacaagcttccatgaaatcaaccgtcgaatcatctctctctccggtgatcgcacctgttctcgaaaactacgcggcggagttagagatcccgacgacgaagaagacagaggagaaaaaaccgattcaaattccgacggagcaaccgtctccgccgcaacggccgaatcgatgcaccgtatgtaggaaacgggtcgggttaaccgggtttatgtgtcggtgtgggacgactttttgtgggagtcataggtatccggaggttcatggttgtacgtttgatttcaaatcggcgggacgtgaagagatcgcgaaagctaatccgttggttattgcggcgaagcttcagaaaatatgaatcggagccgttgaccgatttctatctttaccctgagaaaatttcgattgtctcggtggatctcagccgttcattatgttattgtattacggacacgtgtcgcaagattaaggttgagatggtttcgtaactttttaattattttctttgtttatttccgaagaaattaaagtttttatgattgtgtggcttttgcttgtaaaaaaaaaaagggtttctctttgggaaaaagaaaagaaaatatatgaaattgtgtctcgcgttttggataatgttttataccgacagaaacagtacaaagacgttttgatcatttcaaaacgttagatcattgaagaaaatgaagctcatgtccttattgacgtttgtttgctgattttaattcttagatttgtgaggaaaatggaatataagttttaggtcagttgatttagacttttatctgaatcagtttacctaatcatctctaaagcatttagctaaggttgtttgttcttaatgctttatggtcaaatgtttgtaagctttttaggcataatataaggccggattcattttggtaaagacgaggatacaatagcttcgaatgtgtggccatgtttcgctaagcgatcatcaacttgatttgtcttttggtatgtgaaagaaaaggaggttccatcaaacatctttcagctcacttgaaaattatttgaaatgtctttcatacatttatgatctatcaatgaatacaaatgaactactatttttctcttcaaataattattctctttctgttgacattatgaaatttagaagttttcacaataatcaaaagtaatataaaacgtcgaaaatatatttatctttatatgaccacttgatgatgaagactcaaaccaacaaaaaactagtgtttgttttatttccgtggtcaaatgtaataatatatttctgtgtgtattaggtgatatttagaatttttgtataatttccaaaacaagaaaatacttcaaataaatttcatattaatcttatcaaaacatatctttcatattttatatgaccattattggatgaagaagagtcaaaccaaatatgaactagagtagtagagttcaatttttttttttgacaacaatgttttctttttctggtcaaataaataaaccttttttgttcatattaaggtgaaagaaaattagaaattatgaacaaatgttttaaaaataatataaatatctagatcatattgcatatatttcatttaccaatgttaaagatttgtgtatatatagaaaagaaatcttcaacaaaattaaactgctaagaaattattaaaaaaatgtaaaagaaggaaaaatatctaaaacatgaagccagagaaacgaaataggagtattaattaattaaagaaacaaactcaattaattaattcaatggaaaccgctaaattattaaccgttcgccataattaaaatttaagagacacacaccttaaacctcacctatatattttccatgcaaaaaaaaaaaagacaacaatttcaaccatcatg

SEQ ID NO: 30383 - DNA, 3000 bp, Unknown
  misc_feature (1)..( 3000): 2750-1469P.txt file - cDNA_ID_3030734; gDNA_ID_2214602; Annot_ID_187081
gaaacaattaaacttttaaaatgttagtatattcttaggtagaatacgtggctgttattagttggatgcagtatacatatggaaataggaaaaaatgtacggagttagtttgtttaatatttttccttttctagatttttttctctaattgtgattttttctttatcatccaattaattgaatttttcaaaattattattcaaaaaaaaaattacgatggtaaaaaaaacaatgaattttaaagttattaaaatcacggaaaacaattctataaaagttatgacgttgcatgggaaatatacgggttcgggtcaatttaagtggatcgggtcatattttcttgagtaattaaaagttaatgatttaatttaatgaaaaaattaataactaatcaacacgaaatttgaatgtttttgttcgttacagattccttaacgccggaatattcggaagcacgaaagaaacaagccacacattgccacactccgccacaagagccgccatgcttgtacgaatcaacactctcctccaaggattttccggtatccgatttgagattctcgaagcaattaccagtttcctcaacaacaacatcactccatctctccccctccgtggtacaatcaccgcctccggagatctcgttcctctctcctacatcgccggacttctcaccggtcgtcccaattccaaagctactggtcccaacggtgaagctttaacagcagaggaagctttcaaattagcaggaatcagctccggattctttgatctccagcctaaggaaggtctcgcgctagtcaatggcacggcggttggatctggaatggcgtcaatggtgttattcgaaacgaatgttctctctgttttggctgagattttgtcggcggttttcgcagaggtgatgagtggtaagcctgagttcaccgatcatctcactcacagacttaaacatcatcccggtcaaatcgaagcggcggcgataatggagcatatcctcgacggaagctcgtacatgaaattagctcagaagcttcacgagatggatccgttacagaaacctaaacaagatcgttacgctcttcgtacttctcctcaatggttaggtcctcaaatcgaagtgatccgttacgcaacgaaatcgatcgagcgtgagattaactccgtcaacgataatccgttgatcgatgtttcgaggaacaaggcgattcacggtggtaacttccaaggaacaccaatcggagtttcaatggataacacgagattggcgatagcagcgattggtaaactcatgtttgctcaattctcagagcttgtgaatgatttctacaacaatggtttaccctcgaatctaaccgcttcgaggaatccaagtttggattatggattcaagggagctgagattgcaatggcttcttattgttcagagcttcaatacttagctaatcctgtgactagccatgttcaatcagcagagcaacataaccaagatgtcaactctttgggactaatctcgtctcgcaaaacttctgaagctgttgatattctcaagcttatgtcaacaacgttcctcgttgcgatttgtcaagctgtggatttgagacatttggaggagaatttgagacagactgtgaagaacactgtctctcaagtggcgaagaaagttcttactactggagtcaatggtgagcttcatccttctcgcttctgcgaaaaggatttactcaaagttgtagaccgtgaacaagtctacacatacgcggatgatccttgtagcgcaacgtacccgttgattcagaagctgagacaagttattgttgaccatgctttgatcaatggtgagagtgagaagaatgcagtgacttcaatcttccataagattggagctttcgaggaggagcttaaggcagtgctaccgaaagaagtggaagcagcaagagcagcctacgataacggaacatcggctatcccgaacaggatcaaggaatgtaggtcgtatccattgtatagattcgtgagggaagagcttggaacagagcttttgaccggagagaaagtgacgtcgcctggagaagagttcgacaaggttttcacggcgatttgtgaaggtaaaatcattgatccgatgatggaatgtctcaacgagtggaacggagctcccattccaatatgttaagagtatagtcctctgtttttttcttaccataaagtctttttttttttacatgtctgaataattttaccaaatgattgtctgtgaagtggttttatgtctgtctaatttaaatttgtgtgtaaaactcattgtaagttctcaaatgaacaatttttcttttacaaattaatgtgtgaatcataccttcttctttttatctcaatatccataacaaacatcggataagaaaatgttatcaactctaactcaatcatctaaacttaattagtcttactctaatggagttatttttcaaaatactagtaagtcacacactttagccatctagggttatagaattctttactaaattatgaaattaaaagtttaaaactattgttatgatagaaaaacataaatacaagttacaaccgaaatcatacattttgttgttattgtttggtagcacttttaggagtttacataaaaatcacctaaaatcactcaaggttagtaaatgaactgaaacaactcgaaatatatttgaactcgaatctaaactctattttcatctaatatgaaattgaaaagtgaaagatcacacaactatagttctgtagtaccagagtagtgagtgcaaccagccaaccagaaaaaaaagaaaaagaaaagagaatgagagagtacacaataaaggcccaaattaaagcccataaagcccataagagtaaatacaaacaatacaggttcttcaatacgttaagacaaaatagaattgatctctcttcttcattctctctcttctcgatctacccaaagtagcgggagcgaatagtaaaacaatg

SEQ ID NO: 30384 - DNA, 3003 bp, Unknown
  misc_feature (1)..( 3003): 2750-1469P.txt file - cDNA_ID_3030745; gDNA_ID_2214636; Annot_ID_188137
cagggacaagaaggaagtccaaggacacatgaataaggaaagcatgaacctgtatatgtgatatcagctcagcttcttctttagcagtcagaagttgttttgtctcaggtccccacaagaagagctgaagcgcatcatcattatcagccccttgtttatactttttcttcgcactagttttctgaggaacataaccctcatcgtccacatcgtttgattttggagcccgtctgttctttgctcgtctctctagctgccgcttcgatcttactatgtttcccttttccggtaaggacatagaagagctaaaaccaaacatccagaaatacaaatcttttcacattacagcccacaagtagcagattgataagatacacaaacaaggttaaaaaaagcaacctagtggagagagaatccttgatgttgtcagatggatttgcttcagtgtcatcaactaacaatgcagcttgttttgaagctgataaagccttctgagctagtgcaaccacatcacaaagctctgcatcagctaaaggagacacaactgccggcaatttcgtttcagatgttaaaggagatattaatctgcaaacaaaagaaaggctacatcattcagaaaactcaaaaggttgtatgaaaactgaaactggtgggtttaagagaggaagagacattacaaattccataaaccagtagagtgaagaagttgctgttcaaatttctcatcttctcgagatgaaaccaattcatcaaactgcctcctctccagagtcaactaaaaatgcaaggaacccaatcgcattaaacaagaggactagaaagttgacaactttatgattgattcaatctcttaggacaatattgctgctaataaaacacacctgggatgttctatcgtctcttaacgcatgtgacagaggcctagactcttcccgtggctcctgtgagagaaccgacgcaggaaaatgtcgagatagagaattgagatgacgtgagttaacaacaggagttgttgtttgatcatgaagcatcactactacagaaataccaacaaacgaacaaaaacaaatcagaaaatgctaacacaaactcgtatacatacactaatttcaaattgaaatccatgaacttcaaattccagtaactaacagagacaaatccagcaaagacacaatatttctatatgaagagtagctgaataagaagtaccagaggaaggagaagagtagctgctcttgagatgagtctttgtctgaaacgaaggagatgaagaaaccaagttcctcgtagcttccatttcacagaatcaccaaagaataaaagactctgtttttgcttccacgaatggctaaggaagaagaagaataagaacatgaggctactctacagagccatgacgaacagataaggcgacacacacactcccaattttttttttgtaaaaattaaaacttgtttgttgccatggaagtcagattttgttctctctccctttttttttttcctacagagtggatcatgttgggccttatattgggcttaaaagcccaaattatccaaaagttaattcgaatcatcttcttctccctcctttagtaaccctaagattctctctgtgaatccttgttcatcgtcactgaaattagtttacaaaatcgacgaattcggagatgatttttcagaatgtgtgcagaaatgagtccaacttcaacgctatagcttccgaatcgcgttcccaaacgcagttcggtgtttcgaaatcctcctcgagcggcggcggatgtatctccgccaggactaaagaccgtcacacgaaggttaacggacgaagccgtcgagttacgatgccggctctcgccgccgctaggattttccagttaacgcgtgagctcggtcacaaaactgaaggagaaaccatcgaatggcttcttagtcaagctgaaccgtcgattattgccgccactggctacgggactaagctcatttcgaattgggttgatgttgcggcggacgattcctcgtcgtcgtcgtcgatgacgtcgccgcaaacgcaaacgcaaacgccacaatcgccgagttgtaggttggatctttgtcagccaatcggaattcagtatccggtgaatggttacagtcatatgccgttcacagcgatgcttttagagccgatgaccacgacggcggaatctgaggttgagatcgcggaggaggaggaacgtagacgccgtcaccattagtaaaattaggcttttgatttagagtgttaaaattaggattttaaaagtttaggaggtaacagataaggataatttagtcaaatcatgttgtttagtttggtaatgttattttgccactaaacaactaataatattgtttgataatcttattatttggttttggaaacaaattgattaaaaaataatgccatatgtttataatgtttatattgtttttctcactattgatttgtgattttttagtaatgcttgaaatcattaagcaacactatttaaataaacaaaaatttctcatgaaatccaaagaatcatcatttgtcatgctcctccaatatagttatttctatttttggaaataagttataattaagaaaccaatcatttttctcacccattttttttttcatttgctagaaatctggacctccttccatgatgacccttctcaactctcttctttcacgcaagtctctcatttttcaactttccaacttttgatctcaacgtcaacatttcaagattttctaaaagagaacaaaaaaaatctacaacaagctcgttagctttcttttaatccttcatctccatttttcaagaatatactcattggttttctcaagacatgatagaaaaacacaagacatctctacggatatttctattggtagcttccaatgtatctattctattgttaggtcagagggttcagatatttcgattcggaaggttctgattttaaggcaagacttttgatataagaacaatg

SEQ ID NO: 30385 - DNA, 3000 bp, Unknown
  misc_feature (1)..( 3000): 2750-1469P.txt file - cDNA_ID_3030749; gDNA_ID_2214636; Annot_ID_188135
gtgttttagaaacttacgtttctgtgacgtagaaccttgtctgcagtaatgtctaagtaatacataaaaacattaattacatccttaatgatgaatatttcatatatgaaacaaattttcaaaaagtaacaagagttgtgagataaaagaatcaatacccactactacaagtgacttttcgaatcgttgttgggcaatatgaacctggtgaacaaaacatatcaccactactctcagcatcaacccaactatctgcagaaccacatgtatgattcaactttcccggaggaatttggtagttatatctgcaatgtaaaaactctttaaatcatccactaataagatttttcattaacttactcaatctagaaagctaacaacttacggctcacaaaatcctgttgttttattaagcttggcaagcgggcaatatgcgcctaacggacacgcttcgtttacataaatcagagaataaacaacaatgaatatgttagattaaagttttagtacttataatgttgatataacatatatgtatgtaaatggatatcttacgtatcatgcaagcaagaccttgtggacaaaagaaaccctcacaacaaggttgacatttacgagttctagatggaagaatttttccattgttgagatcaaatcttttttcatcatctgcattgcaactccatccaggctcacatccggaaacccatttagctaaattgcagttgatgttaggctttacatgaaccgttgttgcttcatctcttctaacaaaactactaaagtagaactttatctccgcagctgaacatagtctaagtgtgaggtcacctgcatatcacaagaccattaaatctcaatgttcaagtatttgaatataaaaacataaccctttttatgttgtttaccatcatttttcttgacacaattgcttaagaagtccagatttttatcaaaattaaatgcttcattccaatcgcccttcctgaattatcaacaaacgatatgagaaaaatgtaaaattcaaacatgggactacattagctgattttgaaaagacttacaaattcttgatgcaataacctaaatctcgatcaacgtcagcctttaaaacagtctttagattctgaagtcgagtatagataaggtttgtaaccgaaacaagagcttttgggttccctgttttgctgtaatcatctccatccagagatagtgcaaatgacataaaactcaagccaaaaacaaagaacaagaagatgtgttgtgtccaacaaacatcaaccctaactctcattgttcttatatcaaaagtcttgccttaaaatcagaaccttccgaatcgaaatatctgaaccctctgacctaacaatagaatagatacattggaagctaccaatagaaatatccgtagagatgtcttgtgtttttctatcatgtcttgagaaaaccaatgagtatattcttgaaaaatggagatgaaggattaaaagaaagctaacgagcttgttgtagattttttttgttctcttttagaaaatcttgaaatgttgacgttgagatcaaaagttggaaagttgaaaaatgagagacttgcgtgaaagaagagagttgagaagggtcatcatggaaggaggtccagatttctagcaaatgaaaaaaaaaatgggtgagaaaaatgattggtttcttaattataacttatttccaaaaatagaaataactatattggaggagcatgacaaatgatgattctttggatttcatgagaaatttttgtttatttaaatagtgttgcttaatgatttcaagcattactaaaaaatcacaaatcaatagtgagaaaaacaatataaacattataaacatatggcattattttttaatcaatttgtttccaaaaccaaataataagattatcaaacaatattattagttgtttagtggcaaaataacattaccaaactaaacaacatgatttgactaaattatccttatctgttacctcctaaacttttaaaatcctaattttaacactctaaatcaaaagcctaattttactaatggtgacggcgtctacgttcctcctcctccgcgatctcaacctcagattccgccgtcgtggtcatcggctctaaaagcatcgctgtgaacggcatatgactgtaaccattcaccggatactgaattccgattggctgacaaagatccaacctacaactcggcgattgtggcgtttgcgtttgcgtttgcggcgacgtcatcgacgacgacgacgaggaatcgtccgccgcaacatcaacccaattcgaaatgagcttagtcccgtagccagtggcggcaataatcgacggttcagcttgactaagaagccattcgatggtttctccttcagttttgtgaccgagctcacgcgttaactggaaaatcctagcggcggcgagagccggcatcgtaactcgacggcttcgtccgttaaccttcgtgtgacggtctttagtcctggcggagatacatccgccgccgctcgaggaggatttcgaaacaccgaactgcgtttgggaacgcgattcggaagctatagcgttgaagttggactcatttctgcacacattctgaaaaatcatctccgaattcgtcgattttgtaaactaatttcagtgacgatgaacaaggattcacagagagaatcttagggttactaaaggagggagaagaagatgattcgaattaacttttggataatttgggcttttaagcccaatataaggcccaacatgatccactctgtaggaaaaaaaaaaagggagagagaacaaaatctgacttccatggcaacaaacaagttttaatttttacaaaaaaaaaattgggagtgtgtgtgtcgccttatctgttcgtcatggctctgtagagtagcctcatgttcttattcttcttcttccttagccattcgtggaagcaaaaacagagtcttttattctttggtgattctgtgaaatg

SEQ ID NO: 30386 - DNA, 3003 bp, Unknown; identical to SEQ ID NO: 26447
  misc_feature (1)..( 3003): 2750-1469P.txt file - cDNA_ID_3030755; gDNA_ID_2214636; Annot_ID_188133

SEQ ID NO: 30387 - DNA, 3003 bp, Unknown; identical to SEQ ID NO: 26448
  misc_feature (1)..( 3003): 2750-1469P.txt file - cDNA_ID_3030759; gDNA_ID_2214636; Annot_ID_188132

SEQ ID NO: 30388 - DNA, 3003 bp, Unknown
  misc_feature (1)..( 3003): 2750-1469P.txt file - cDNA_ID_3030767; gDNA_ID_2214636; Annot_ID_136131
attatgttaacatcagtgacttttgtgtaagtgaagataaaagtatgcatcaaagtcagaggacatgtgttgatctcgtggataaatagactgatttccttgaaattacgacaccattattacaagacaccaaatataacttctatttacaaagtcaggtttttcgttgtgctctattcaacgggacaaggtcatggaaggtgtagtagctaagttaaccctaatgtcaggatcgtagtagcttctctgcagtctgcgaatattgtctccattcactgtttaggaaaaaccaagtgggccaatgactgtagtaactttttaaaacaaaggatttttaaccaaatccatttcgtttagttggacaaaatgattaattaggataataaaaagtagggtaggttttgttttcaacaaacgggcaaaatcaccgacgtgactttcggttaacaaacagattcgattcttgaaattagtttaggtgaaaataattcagaaataaattttcttctacgcatgagtaaaaaaaatatatattacatttccaaaataaacgtttttagtccaaaaaaaaaaatgtcagagtgatagaaaacaggaaagatgactatgaaaatccaccttcattgttagtgttacatggttatttcaagggttttgatcaacgacataatccattgtttttaggctttttcaggtgaaaccatagttaaaagttttttttttcactattatgatgagagtggagttctttttttgcatacgtattacacataattaaaaagattatatgacaatattgttaagccgttataatcaatcagctactatatgccctttattttgctaattatctcaaaaaaaatcatagagaagttgcactcgtcattgtactcttgacatttactaattaaaagatttcttctgcataagaaaatgaggagacaatttaaatttggatctctagaggcgtgattaaagcagttctttcccacaaaagatggctttcattatattatactactatttaatttccgtaccacagtgtcttactctgactctgattttatttctttttaattaaataatcacataaataattcactatcacgactttcgtttttccatttaaattaaactaaaccggttagattcgtttttcttcaccaggttaatgtgaaccccaatttttctattttgttaatgatgttttataattgtgattaatacaattagaaaatatctaataattaaagttgagaccataattaaaggaaagggaactattgtgtgaacatatatatattcttacacactcgcagagcaacccttcttcacttgggctcattggaatgtgatatcccaaaaagaaaaggcaaaacaaactactactaaaaaagttgagatagtaaaaatacaattgtactttatcatataataattcaatgtacaacaaaactcaactaccaaagtttgcttattactctcaaagaaaaaaacactgattaaaaatagcaaaagagatttgtttatctatatgaaaaataaacttatatagaaattcttatatgattagttgcaattgtaggtgtaacatttaatcgttgatttgtttttttttttggggtgcatttctcttgtagttgtaacaatatttcacacttaagactttcagacaatagtttaaaaacaaccgaacagaagttgcaggtacctataacttgtgtatgaatccatccacagttttgtaaacgttgactgtttgacattttgaatgtaattttatttaattagatcctacacaacaataatcacatctataatttgccaatacattttaataaaaccacttaacaaaatggttttaacttttaatccagtaattttctgtagttggtgtcatgatttataactactgtacacatttccaagatctaacgaacaatcataatcgataataattgtacctaccaaatttggtctaaaaaaatagaagaagtgattatatatatattcttttttgtttttgatgctaaatattttttttttaatgtgattatcgtttatcattgcacctcacggtaattattattgtttttccctgattttataaaaaagatatatagagagattattgagaccaatgaagagcagaaactgttgggagtcaaaaaaaacttatctccaatttctaacagtgttctatgtcggattccatcaatctctctctcttccatcatctgtcactttctttgttttctacgcaacaagaaaccgaagaaaaaaaaataacaatttactaaagtattaattcctttttttgtgtgacaaaataaaaacccactaaaaagcaaacgattccaagaacatggaaacaaatgtgtaaaaaggaaataaaaacatcaagcgtgggctgaaaatcactacacgaaaatccaaattttggtaattctattaaattttttaagttggtaataaagagaataaatacacaaattgactggccagtacacaagttgactgattaatcgcaaattatacataattaataattaaaaaacggtaaaaaacgttaataaataaggaaataaatcaaaacaaatgaagagtgggattagtaaagtattaaagaaagcatatagagcggaagaaaactgaagatggaagattataaaaataagtgttgtgaagaagaagctattcgatttttatagtcttgagttttattttattttaataagaaaacaaaataagatttttaaaaaatagtatattatttatttattaattttcttcagggctgttgtggtttttgaggttctctataaagcaaagtaagaaaacatctacacaaatgtcccaacaatctgatcagaaaaaagtagacgaagaagaagaaattaagtcacttgaacaatggcgttggtccgaaatgcaaggccttgagcttctccctcataacaccaacaacaactcacgaagctccagagaaactcaccggaaatg

SEQ ID NO: 30389 - DNA, 3003 bp, Unknown; identical to SEQ ID NO: 30388
  misc_feature (1)..( 3003): 2750-1469P.txt file - cDNA_ID_3030767; gDNA_ID_2214636; Annot_ID_188125

SEQ ID NO: 30390 - DNA, 3000 bp, Unknown; identical to SEQ ID NO: 13556
  misc_feature (1)..( 3000): 2750-1469P.txt file - cDNA_ID_3030782; gDNA_ID_2214636; Annot_ID_188118

SEQ ID NO: 30391 - DNA, 1066 bp, Unknown
  misc_feature (1)..( 1066): 2750-1469P.txt file - cDNA_ID_3030798; gDNA_ID_2214637; Annot_ID_188172
acgttttttcagctcatcgaactcacttatatattcgagaggatactccacaatggtcatccatcaatgcaagagttgatcaatttgttttttgtttttggagcaaacaatcaaatttattttcaaattgattttagatatttattttatttttgttaaataatttgatagtataaatattactccctctgttcctttttttttattgtttagaaaaatacacatattaaaaaaacatattaaagttaattttaaatgtattgttttttgtgtgtttacaattttctataactttaaaccaataatattcaaccatctttgttaaagtttacaattcattaataataactaataaatattacattgaaaacctaaaaaatcaatcttttgaaacatatattttttttagaaaatcaaacaaaaatgaacagatggagtattattcagattaatagataatgactatttataattttgaatttaattttcgtaattaatatattattgaaagcaatttaattatatacatttttaattaattagagattcataggaaacaattagtaagaaatatttttctacgaatatcttggtagaaaatcggtcaaaattttctttccattgttttaccaaattttcaatgaattttctaccaatttattttcgtaggaaattttctaccactttcgattttgtacagaacatttgctaggaataattttggtaggaaaatgataagaaacagccgtttcctacgaaattggtaagaaacagttgttttctacaattttcttacgaaattggtcataaaaaattataatttccattaatacaaaaagtaaatctaaaagaatgtaaaacctggaaagaaaaataaaacttagtagtatcaaaatgtaaaattcccccaagttagaagacgtaatggaaataacaaaaattggacgaagttgataaattggaaaattaacaattatgacaaaagctctaacatgtataaatatgtgcatgaatgaagaacattgcattgtgtctgaaaacccaaaaatattattcgatagcaatg

SEQ ID NO: 30392 - DNA, 3003 bp, Unknown; identical to SEQ ID NO: 25146
  misc_feature (1)..( 3003): 2750-1469P.txt file - cDNA_ID_3030802; gDNA_ID_2214637; Annot_ID_188171

SEQ ID NO: 30393 - DNA, 3000 bp, Unknown; identical to SEQ ID NO: 13576
  misc_feature (1)..( 3000): 2750-1469P.txt file - cDNA_ID_3030806; gDNA_ID_2214637; Annot_ID_188170

SEQ ID NO: 30394 - DNA, 3000 bp, Unknown; identical to SEQ ID NO: 13575
  misc_feature (1)..( 3000): 2750-1469P.txt file - cDNA_ID_3030810; gDNA_ID_2214637; Annot_ID_188169

SEQ ID NO: 30395 - DNA, 3000 bp, Unknown; identical to SEQ ID NO: 13569
  misc_feature (1)..( 3000): 2750-1469P.txt file - cDNA_ID_3030821; gDNA_ID_2214637; Annot_ID_188162

SEQ ID NO: 30396 - DNA, 3003 bp, Unknown
  misc_feature (1)..( 3003): 2750-1469P.txt file - cDNA_ID_3030824; gDNA_ID_2214637; Annot_ID_136148
ttatacattgtcagcatccttaagatttttttctgtatgttgtcaatgttaatttgtttaaattatctctaatgggttctaacttctaagggctaagcttctgaactggaacaggcagaaattttggtctcacccagtcttgcaacaactcaaatggttgattcagtgaccggaagttcatgtgacccacaggatggtggtctattgccgggaagcatacctccttgtaccatttccgctgaagagtcggatggaagtggaacatccagttcagtgcagctggcgtctaatattgcaatagatgagtctaggaattctgaagatagagtatcaagtagcgagtcaccatggtactatttacgaaaagaaagtgcagcttttgtttcagaaactcttcagagaggacgcagaaatctttggcaacttacaacaagccgtgtgtcagttttgctctcttccccaggtgcttcttcaacaagtatacatcagttcctaaaaaattatgaagacctgagcatctttatccttgctggggaagcgttctgtggatttgaagttgttgattttagggagaagctaaagggtgtatgcgaaaattatttcactgcatttcataggcaaagcatgcatgtaagttccgttttacaatgcctattgggctgacattgccaataccacatagctagttaatttcatgcatcacctctcctacatgataacgtgaaaataaagtctttgtttggtttttctcccttacaggcgcttaaaatggtcctggagaaggagacatggacgaaattgtcaccagatactgtgcaagctattaattttgctggtcttgtgggggatggggctcccctaattatttcttcccgcagtgcctcaggttcttccagattccctcactctgataagccaagtaactcaattgatccaagtggcaacaggagtggattttcatattggctgaaaagtgggaacccgttctcagcaaagttaactcactatagagaagatcaagactactcctcgatcaatggagaagatcatgaagggaatgatagtattcatgatgatgttgtgaatcccaagataagagacataaaacgcatcaacggaggtagtcctgtttcagaagatgaaaacgaagaccttcttgctgactttattgatgaggatagccagcttccaagacgaagttttacacgtagtcaatcaaggacttcttcttcacattttagtactaatgatgatttgacagctcaaacaggatcatccctttgtcttctaaggtaatatatgcggtttaggaaatgtttgaaattataatgacagccttccgatcgcatattttccctggcacttttatgacatggaattgcattaattgtgttcgatgtcttagatctatggataagtacgcgaggcttatgcagaagctagaaattgttaatgctgaattctttaaggtacaaatcctaatacttggaaattcgtagatttctctactctgctccctcgatttcatttctaacttttctcttacgtctgtttgaaattttgtagggaatatgccaattgtttggagtctttttctatttcgtgtttcaagtatttggtcaagaaaatactaattcaggtggaaaaggagtttccgactctttcaatcgtgagttactgattcgtttgcttttgatgctcttctttgtttgtaatgttactccccaccagtgtcagtatgagtcgtgttatgacttttaaggctacaatatctgcggaaagccattttgctcaacataagtatattttgaaatgcagatcgtttgaaaagctgcttatcacggatatcacaagagtgtgagcaatggataaaacctcacgtttcatcatcaccatcttcttcacttgcctttcccaacactgttcatagtcttgcggatgtgactccagcaagtcccttaaatacttctggtcacttatcaggcgtatcttttagtctcaaggtatataacttggggctaggttttcatcaatttgaactacagttaatactgttttatgttcattagttaccctaaatataactatcctaatcatttatactctagtatttgatatattgtgtgagaagaagagcagctgccttgctttcttcttatcatctcaaggttgtataataaaaggattatcgcttgcaggaaagatgtgctgctgtggacacagtatctcttgtggctcgggtattgcataaatcaaaggctcatctccaatcaatgcttatgtcaagaaatgggtctctggttgaagacttctttggtcaactggtatgcacctcttcagatcttattttttaagaaaaaccctggttggacgtattgcctcgcttggatttgctgttgacaacatgcatacaatcttattatacagacacttctgtagcatccaatagtcttttgcctctaaaaaatattgaattatacaggacatgattagtaccttcattgtgttacgttgctaaactaatttctcctatataaaatgaagaactatctatatacaatatgtggtatcaaatacatttgaagtagtttgattaaaaggagtgattcatcaggttggttccgtacctgatctgacagagcacttacataggacaactgcgaggatactgctgcatgttaatgggtaaattgccgatcttcttatgagcttgtgttttcgaaagaagtgattagataaattgcacctctctcttcccttgcgccttctgttcgattcttactaacctcaggagttttaaaactgttacattgaatgtatgcatgttcattcagcttaaactaattttacagatatgtcgatcggatagctaattctaaatgggaaatcaaggagcttggaatggagcataatgggtttgtttaccggatgacccctaactgaatcatgaaatatacttaaatgtaataaactctttgaactaacaggtatgttgatttgatg

SEQ ID NO: 30397 - DNA, 3003 bp, Unknown
  misc_feature (1)..( 3003): 2750-1469P.txt file - cDNA_ID_3030824; gDNA_ID_2214637; Annot_ID_188161
ttttggctgtgatatggtccagaaaatggttaatggagcaaaagtcacttcttggacttgcgtaagtttctctactcggattgaccgtggtttaccccaagagttctgcaaacagttgattgggatgtgtgtcagcaaaggaatggtctgtcttgtctcatgcttattgatacttgtcacaatttcataccaaaaaatttactaactcttttttttgttttaattctttgtgccaggaatttaagcctcaacctgctattccgttcatctcttgtccccctgaacatattgaggaagctcttctcgatatccacaaaagggcacctggtctccaactgttgattgtaatattgcctgatgtgactggatcatatggtaagtctgtgctaatgattggtaatatttggtgcaaagtttattccgacaatctgttcatgaagtactctttctgtctgcaggaaaaataaaaaggatctgtgaaacagaattggggattgtctctcagtgttgccaacctagacaagttaataaactcaacaagcagtacatggaaaatgttgccttgaagatcaatgtcaaggtctagtcatctgtgcttcttattgttttttatgatggtgtaaaacgggtatttgtattacagactgggggaaggaacactgttcttaatgatgctattagaagaaacatacctcttattactgatcgtccaaccatcatcatgggtgctgatgtgactcacccacagcctggagaggactcaagtccttctattgctgctgtatgtatatcttattttacttgtatctcattatactactgtttcatcataaaaggtaattctcttatttcaactacaggttgtggcctctatggactggcctgagataaacaaataccgaggattggtttctgctcaagctcatagggaagaaattattcaggacctgtataagctggttcaggatccacaacgtgggctagtccactctggtttgataaggtaagagcaaaacatctacaacttcttgtgttctttgatttttcacaagaataaatataatggacactgtttgtgattgcagggaacatttcatagcattcaggagagctacaggccagatacctcaaaggatcatcttctatcggtaagtggttctcacattccatgcttaaacatttcatagcatgagcaggtttggctaattgctttctctttatacagtgacggagtaagcgaagggcagtttagtcaggttctgctacatgagatgactgctatccgcaaggcttgtaactctctccaagagaattatgttcctcgtgttactttcgtgattgtccagaaacgtcaccacacacgtttgttccctgagcaacacgggaatcgtgatatgactgataagagtggcaatattcaaccaggtttctcactctctgctcttctctatcaacttaattcctttaatgatccagatttcaagtaacatatttgtatttccttatcaggtactgtcgtggacactaaaatctgtcaccctaatgaattcgacttctatttgaacagccatgctggtattcaggtattgcttccagaatctagaccaatttatgacctgttttgtctcagcagaattacaacttcctttgaatgtttgaatggtaatagggaacaagcaggccggcacattaccatgtacttctcgatgagaacggtttcaccgctgatcagttgcaaatgctcacaaacaacctctgctacacgtaagagacaacaacattgtacattttccttatgacatgttttaactctctgaaactaacaaaacatataataaaatgcatatgcaggtatgcgaggtgtacaaaatctgtgtcaattgtgccaccagcctactacgctcacttggctgcattccgtgcccgctactacatggagagtgagatgtctgatggaggttcgagcaggtccaggagctcaacaacaggtgtgggtcaagtcatttcgcagctcccagcaataaaagataacgtcaaggaggttatgttttattgctaatgattcacttcttctcttgccagttttaaaagccgttaataattatgaaaactatattcggctctcggttatctcttttgggtttggctgttaatattttgaaggatctggccaacttttgcgccttaggacttatgttatgcgttttggtttcagatgatgactacttttatcgtttgtgaaaagacaaagggttaattatgatttttttggacgatgatttggctcagttctttttacttatggtattttgtgctaatttcttgttacaatttattttcttcgacaatttcttttatcctcttaattgtcggcctctgcttcaactttccatggtttatcgtaatcttcacaatgaatcaaagtaatgttttcagtagaaactggttgtttttgaaaggagtcttattgggagtgatttagagagaatgagaatccatagaacaaaatcagttagttgataaagatttgattccacaacaacaacatttgctcaagttcttcatataaagagaaacaaaaaagacaattctgagatatttgcaaaggttgatcttataccgttcttttggatggatcaatttcacaaaaatcaggtttgatgattcaagagctttacccggttcaatcaccggtccggttttaaaaaacatttaacactacacagaaaatttggaagaagagtgttaaataaacactggctttaatcattttgttgggtaaaacaaaacaaaaacaaaaccaaagagagcgagtttaatcacaccattgtcgaaacaaatcaaaaggctcaacaaaagtcttcttcttcttctagatctctcttcccgatccgatttgtgactcgccggaaagaaataacacacagacagacattttctccgatcgtgaaattagatggatcaataattgatcttactggtataaagaagagatgagagatg

SEQ ID NO: 30398 - DNA, 3003 bp, Unknown
  misc_feature (1)..( 3003): 2750-1469P.txt file - cDNA_ID_3030886; gDNA_ID_2214638; Annot_ID_188209
ctacgggcctatttatatagtatatttatttgagtgtcagtgtcacactaatcaaggtttaattttaaaattgcagtattaaatattaatgaaggtttttatgcgagctgatagcggcctcaaataaatatattctcgattggatttctttaaaaaaaaaatcactttaaagttgacaaaaaaactcagtttaaagaaaattaaggtggaattatctagttaagtgttactctttaatatttggctaattgcgttggttcatgcctgtttaagaaggaaatataaaaagttttgacttaggaaaatgaaaatgaaaatgaaaatgatgcagcttcccagcttttttacagattccagatattgatcagatttttgataccgagatttctcttctctattgatttgatagagtttgggaaggttttcaaatatcaaagaatggaaataatgacaacattaatggaaatacattcagtaaacagtacctaaagttttatttttatttgaaattaaaataaagataaacgtatcatttacagatttggggtacagaaataaagtgcaaggaatcaaaattgtcagccgaacaacaaaaaaaacaagggcttttcagaaaaataaaaaacctttaaaccctttttttgtgtatccgattccgtcgcaagtacattcggactctttcacggcgtcaatgtctgagaacgcagccaacaacatcatggagaccaagatttgtacagacgccatcgtgtctgaattacagaagaagaaagttcatctcttttactgcttagagtgcgaagaacttgctcgcaacatcgccgctgaatctgatcacatcactctccaatccatcaactggaggtttttccctctttccccattttctgggttctctttttgtgtttctggatgatgtttattgggtttatgtgagtttaggttaagtaaaaatcatatctttattctgaaacaaaattcccttgtgttggttttcctccagaatctgtgtgtttgcatgtgtggttgtttgatttgaagcttatgtattcaaaaatcttatcttttgagcaagtttcagttttctatgtaagaatatagcagtttaagtgttttaagttctcttctctcttactgttaaatgaatctctggttggatagtttttggtgattcatagatggcattgaggatatgtgaattgatgtggtcatttgttatgctttcaggagttttgctgatggattcccgaatctatttatcaacaacgcacatgatatccgaggccagcacgttgcgttccttgcttcattcagttcccctgctgtcatctttgagcagatctctgtcatttacttgctccctcgattgtttgttgcgtccttcactttggtgttgcctttcttccccactggctcctttgagagaatggaagaggaaggagatgtagcaactgcttttaccatggcaaggattgtctctaatatccccatttcacgcggtggtccgactagtgttgtcatctatgacattcacgctttgcaggtttgtttatttatttctgatatccccgggggtttgctacatttatttgtggaattattcaagttcatcactctctctatatatgttcatgtgttgcaggaaaggttttactttgccgatcaggttcttcctttgtttgagactggaatcccgttgttgactaaacgccttcaacagcttcctgaaactgagaaagttagttcatgaaaaactgttactgatagcatccacttgtgttttcagtggctgttcttttttgtttttgctcaataatctaaatttgattccatttgtttgcaggtcatagttgcatttcctgatgatggagcctggaagcgtttccataagctgttggatcattatcccacggtttgtagctatctaaaactgatattttataacgcttcatttgaacatctttatgacctgcacaatatctaatggaactcaattttgattcataataggttgtgtgtacaaaggttcgtgaaggcgataagagaatagtcaggctgaaggaaggaaaccctgctggttgtcacgttgttatcgtggatgatcttgtgcagtctgggggtacactcattgaatgccaggtatcaaaattctcatatccctgcattttgtatcttcatataggttatagcaatcttgaataaattctgaatcacaagtgttgtgtcaaaactcaagagaggcttttgatcagaatctttgttatttctgatgttatatgagatttgttgagaatctagtttgaaattactcatcttaactgtttcactttctttttgtcacaacagaaagtattggcagcgcatggagctgtgaaggtgagtgcttatgtaactcatggtgtcttcccaaagagctcgtgggagcgtttcacccacaagaagaacggtaattatctgtgaaaatgaaagaaaaagtaactaactttgttcattgttctataaatatcttgcttgttgcatctttaaactgaagtcaatgttattgtttcttcgaattaggattagaagaagcgtttgcttacttctggatcacggattcttgtccacagacggttaaggccatcggaaacaaggctcctttcgaagtcttgagcctcgctggatccattgctgatgctctgcagatttgaagcagtagagataaagcctggttctttgctcgttttggacttttggtggttttatactcttaagagatgtgctttggatgatcatttatgaaataatcatatcacttttgctgaaataactagacagattgttgaaaccttgtactctgttcttgttgattgatcttcttttgcaatgaattgaatcgttaagttcagaaagaagaaaaactacacacgtgtggttgtcttgttcattatcaatggcgataatgtcacacgtgtgtaatctcctataaattatccaacctttaaacttaaatcgacaaaaatg

SEQ ID NO: 30399 - DNA, 3003 bp, Unknown; identical to SEQ ID NO: 15743
  misc_feature (1)..( 3003): 2750-1469P.txt file - cDNA_ID_3030890; gDNA_ID_2214638; Annot_ID_188208

SEQ ID NO: 30400 - DNA, 3003 bp, Unknown
  misc_feature (1)..( 3003): 2750-1469P.txt file - cDNA_ID_3030894; gDNA_ID_2214638; Annot_ID_188207
attcgagctgctcatgccgcaatgcgtgcactacagaacacacttttaagaaaaaggacactggacattcacttttccattcctaaagtatggactacgagagatattcttgatttgaagtttcagcttttctttagtacttttctcatcatcagcttatgccacatgataggaaaatccatcagagaaggatatgaatcaaggaactcttgtgatttttaatgtggacacaacagtatcgaatgatgagctccttcagctgtttggtgcctatggtgaaataagagaggtaatttaacttgtgcgttcaaatgtgcatatgctatgtctaagagattcttctctttgtttggtacataatgtaacatatcacctgcttattgattcttgacttgtaaatgcagattagagaaaccccaaacaggcgattccacaggttcattgagtactatgatgttagagatgcagagacagccttgaaagcactgaatagaagcgagataggtggaaaatgtataaagctcgaacttagtcgtcctggaggggctcgtcgactgtgagttttctgcactttgtatatgtcaaagaattgagttatcttgcatacactgtgaacggaaactttttgtatgcaggtcggtcccgtcacaaagtcaagatttggagagaaccgaagttacaaatttctacaatcaagtaggttcacatgttgctaattctccaccaggtaatctcatattgatcatttcttttatcaactttttctctcgattggttagcatgccttttccgtaattcattcaatctacttaataggtaactggccaattggtagcccagtgaagggctctccttcgcatgcctttacgaggccacatggtctaggaatggtcaggccagttaactcagacaatatgccaggactggcttcaattcttcctgctcatccttctagctttcatggattttcaccagtcagtaatgaccaagggctattgaatcattcaaaccaaactattctgaataagggattgatgcacaacatttcctatgggcaacctcattctttgccagagcatataacagggggaatttccaactccatgaggtttatagctccacactcctcaggattcgggacttcatctgatcaccgctatcgctggggaagccctcctcagcatatgaattatcctggttacactggagtgtcgtcgtcatcgtcatctactgaacgtcctttcactgtcaggcatggttttccatttgctgagaggcaggcttcattgcttggaaaataccagcatcatgtgggctctgctccctcaagcattcattttaatacacaaatgaattgctacacgggatcaccagagataccccttggatttagtgatatgggaatcaacagaaactataacagtgctcatggaaaagcaaaccttggtgttagtctaccggggaacagtagtgaacaggatttcactggctttggcatgtcttcaatgcctacagttcctttcggtgggagtagaggattacaatcagtaaggcctgaaccttttgctgagcagggtaggatacataaccacgagagtcacaatcagaatcagttcatagatggtgggagatatcatatcgacttggataggattgctagtggagatgaaatccgaactacattaatcatcaaaaacatcccaaacaagtaagcgttttattgatctcaatctaagatattcgagcaatgtttaaatttcaaatgctttgttttgtaaggtacacttacaagatgctggtggctgaaatcgacgaaaagcacaagggagactatgactttctatgcttgccgacagactttaaggtattatactataagagagagtgaactcatgatgcacttgtatgacctgagaacttactaacaatctagcttttttctggatacagaataaatgcaacatgggtcacgcttttatcaacatggtctctccattgcacatcgttcccttccaacaggtttctttaccttttctcttcagtattgtctttaaaacttctcttcactagtcatgaagttgactatgtattgtggatatggtaattatccgattcaatggcttgagattgttatagctaaaagatattcataatgtgtgtttctgcagactttcaatggtaaaatatgggagaaattcaacagtgggaaagttgcttcattggcatatgcagagatccaaggaaagtctgcccttgcgtcatacatgcagactccaagttctatgaaggaacaaaagcaattgtttccagaagtctcctaccatgatgatggtcaagacgccaatgatcacgtatgtttatccgatacaaaatctcatttttgtttttgtttttgatacatgatttcaaaatgcatatgcagtatcttcagatttttccaccgatttcaccttgtatctatgaatcatacaggagcaactgttttcaagcatttggaacataaccgcgcctgattcagattggtcttacacaatggatcttatcgaaaatccgagggagaacggtaactccaagaatgctgcagaagagtcctcttgaatccccactaaaactagtagttgggaactctaactcaccatcaaaggtaaactaagtgtacaggtctggcgcggttatggaagaaacagaatgtacagtattaaggcttgttttctccacggaacaaagtaaccagtttttagggattacttcactcgaagcaaccgattaaagaaacatccctattagtacattacgttgtatactttatattcggaaacttctctctatatcagtcatgtgtatataacatcctcttgcgtgtacattatcctttccatgtgaaagacatgatcagtatttagttgtacaacaggttcgttataagtttctgtctcaattagttatcattacaaaaccgttacacgtctctctctatgtagacatctatccatggtttcaatg

SEQ ID NO: 30401 - DNA, 3003 bp, Unknown
  misc_feature (1)..( 3003): 2750-1469P.txt file - cDNA_ID_3030898; gDNA_ID_2214638; Annot_ID_188206
atcggatggaataattggaaaaaaggaagagtttttgtttcacctttttgcgattatcttgctgcatcgtgactcaattgaaacacagactaaaaacccaggaattagaagaaccctagaattcgatctgaattggggggagggaaatagaaattcagatcagccgcattggccccatcgaccactactccaaatggcgaagctagaatccgacctggttctgctccggcaatcgatcaccgacagagacagaatcgcaggcgaatttctcattcacctctctaattcacccaattacccccaacgaaatcgaaacaacaacaaacaatcgcagttcaagataaatcgaggaattgaagatagcagagtgcgaacagcattgctttagacgcacgttttcgtcggcacgagatctgatcaccgacacacaagggatacagagagagagagagagagagagagagagagacgaagaagtagtgaaaatgaaaggagagagagagataaggaaggaatctagacggagatttatatatagaggttaaagtgtcgcgtttggtaagctgctttggtcactgtgatccaaaaaaacaacccattagtaaaacgaaaaaataaattatttgatcaagtgttaataaattaattaggacattattgatctggtcattattagtgtatgatctatttttgatctttattgccattcattcatgtcttctttatccaattctttcgttttgtcacgtacttatctcatagatataatgttaatagaatgttatcatctttatccttaaaagcttttttgctaattttagttgctaaaactttgttttattcactttatcatttgctatattgtatatactgctaaattatattttcaatctatatttcatcatcttcatttttgtaaggaatttttagcttattttttgtattaagtttctggtaatatgattctcaattattttgctgtaaaaaaaaatatatattattttgtttttttccattaatattgtatatcaaataaccttcaattaaaaacaacaatattaatttagcttttggttgtggcatgagtgtaatatagtaatattaggggtagaaaaaaaaacaaactctcacttaactagcccaatgggccatgccatttttttaaaacacgcagggcttttcatatccgaatagttaacgccacgtcatctctgacgcgtgagagatttgttgtcaaatgtaataaaccagctaatcattagtctgtcttactgtctccttcttgtggttaaaatcaaaagtcaaaccagctcacattagtgtaattatttaactaaattataaaaaagataatcatattttgattagctaataactaaactacttgacgattgagcgaatcttatatttagtcttacgggattaaacaaaaaatatcaatcagaccttgttacgtaagcacaaatcatagtgtttggttgaaaaacgaagaataatacatttttttttatagtgtgttagtactgttttactttatacttccatattcttttttcaatagacatgttttttctaatcttctttttggtgttaatttgatttaaattaagttaaatttttgttgttttatgtatttggccaaaatgatatttgcatcataaggttcatgtagaagaaaacatatcttcatttttttttactttctagtctttttcaatctagtggacctaatcctttttcaaaatgatcttcaaagaatttttgtacctagtcttgaataaatgtgaggaaatctttctttctttttatgtgaaaaaatgtgaggaaatctaatttacgtctttcatttttctgcgaacataaaatgggtaaggagatatggaaaatgtaagattcggtttgcaatttttctgcaaacacaagatctctgttttctgcaagaacagaaccaatttcccaccagggtaactcattttgaccacttacaagcgccaggcaataatccttcttcaaggcctttcaccactccccaagttctctgctttggatcatataagctctcaaaaatcataatccaataccaaaattcatgataagttatatgttttattcattatcaagaaattgaaaaacaacaattcaaaaagttcatcttttagaatcatatactagaaaacacataaatcaagctccattcaccaattattgatgaagtcatgaagataaatcgattattatcctctgatgcaacaacagcgtggaggatttccaacacaatgtccagtccggtaaatagctacattagtacagtcatagaagcatgcatgatcatcccgtctagcatcacatagaaaaaggcaagcaccatattttgctggctcgatcactgcacatatatacaactccacattaaaactataaatctgtagatacatgtccaaataacagttttagtttcttcaaggttcttaacaacatatacatatacacagatacatgtaatattgtattactaattctatatttttaagaattttttgtttcctgaattattgttttggtagtgatcaaagatagttgaaaataacaaaaaaaaataaacatcttcgcaaagaaacaacatacctgactcggcctcaacatcgtaataagaaaacgaaattgtcaatataattacaagaaaaacagttgcagaggtttttttgatacccataggttctattatcttttaggttttcgtgaaagtcttatttataggactatttttcttggaaagtttcaagtttttatcctctgtttttattttacagtaagtagatcttccataaataaatttgttattttggtaaagagagattttcatttctttttattatcttctttaagtagaaagaatcttaaaactactatacttgaatacttataaaaaaaattactatacttgaatatatcaaatttaatgcaaagttcatgttggagaaattaaatactaatatcaaaatg

SEQ ID NO: 30402 - DNA, 3000 bp, Unknown; identical to SEQ ID NO: 13586
  misc_feature (1)..( 3000): 2750-1469P.txt file - cDNA_ID_3030920; gDNA_ID_2214638; Annot_ID_188195

SEQ ID NO: 30403 - DNA, 3000 bp, Unknown; identical to SEQ ID NO: 13585
  misc_feature (1)..( 3000): 2750-1469P.txt file - cDNA_ID_3030924; gDNA_ID_2214638; Annot_ID_188193

SEQ ID NO: 30404 - DNA, 3003 bp, Unknown
  misc_feature (1)..( 3003): 2750-1469P.txt file - cDNA_ID_3030936; gDNA_ID_2214638; Annot_ID_188187
tgtggcatataaaattcattatttagtaatataaatacatcacacaaaagtataggcaagcttgggtggcaagaaaccagaaggcggcggtacagaatttttgcatataaacacatcagattttaatgcccaaatttctctcattttcttgcttcgaaaccaaatattcaaagagagcgagagagagagatagatcaagaaagaaagagtgatgcagaagcaagagttcttggaattgttcaaggccgcacaacgagcggctaagtatgcgagtgatgagaattctccagaggtctcgaggtgtatccaattcatgaagcgtttgaaagaagctcctgcatctcttgattgtgacgtggtcgttaacacaaactccattggaaacggaatccgttttctccgagatcacaaaaaccccctaattcgatctgaggcagaacttctttcagatctttggctcaagtatctttacgccaccggtagaaaacagaagtcgacagattctgtttagttaaacagattcagagaaattcagattcaggttttgaatgtaactgtattaatgtgttagagacttgggtttgaatgtatatgacattatattactgcttcttaatatggcagattttgaataaagaaaaggtttcacgagagaagattagaacactaatatgtatgacaaaagctttcttcttgattcaatgaagtcacactcatttcaaatccataaataataaagcttacttaagtactatagttggttaaactcacaataatatgacaatgttttgctactaatcacatcacttggatcagttattttttgttaaaaccttgacttggatcttacactttgatgacgctcttggaagcatcataagattcctcatttccatggtggtttgcaagttattactgttgtttaccacgcaaattttcactagctcaagacacggtaacttctccaagaaatgcttcatttgattcagctctcttgtcgttccttgatagctcaatatctccagcaccttcacttgagatgatgataggcaagaggttatgctctcgtcggtatcatagcaaacacatacatccccacatctgtttgttatgtagtgatcgagaccctgaagcataacaaagaaaaagagtaatgttaacgacctaccaatatatatatggtgtttaggatgtgtttgtgacatgagataccatgaagatgagggtttctaggtttggagagttcttgatcagaagtggcagcatttgccatcctcttgccttgtcattcccaatagatagactaacaaggctgtcgaacaatggcatttctttacatgagaaataaagcagcttcaacaaaacacaatgtgttagtctgttgtcactcaataacacaaaagttgaaataaatcatcaaaagccccaagtgaatctcattctcgataagcaaaaaaaaagaagaatgttatttataaggaaagaacaatatatagaggaggctgacctctagagtgtggctagataagtgaaggattctaacatttctgattccattgatgagatttctcatatcagcgggaatggaaccgagagatccatttcttactcccaccattcttgtttcatccatccgaagattgagtctagcttcgatgagggaatccaacttaacattaggatacttacccaaaacataaccagagtgtttgtagtagataagattaggagcatctaatgaaatactagtaaacttgcgatcaaatcggatgtgtagtctctttagagatggagaagacacggaacaagtccaatctacacatcgccgctcctcaacaaccagttcttcgagaacaggacagcgagatataagagttccaacaacattatgacctccaacaaaattaactgagtcaagacataatgtcctaagcaaaggaagagaaacatcttgagaaagcttgattgtaaaaccacgtcctactctcagcttaaccaatgtcttgctcttaaagatcattgcaggcactggtggagattttccttttaaagtaatgaacacatcaagatccataacaccatggtcaagaacgttgcaaatccaactttgaatgcgagatgaatcagtgccacctcgaacaccaacatgactctttagagtgagcttctttatagaagaaccacgttgcgtatctagcaatttgtcaacgaaagccatgtaatttctgtgaatctcaatccggttttgcttagtcttaggcacagattgacgatcatcaatatcaagattggaaaccaaaacaaacatgttcttccacctcttagagagtactgaggttgaaacagcttcttttgtggagataagagacagaatacgcccaagaacctcatctggtagacggctgattacatctttagcattcattgataccaaaaccttaaaaccacagcaattggattcagaaacagtaactagacagagttgatgagttcaaaggtctgttctttttcatacaatgcaaagtctaatacaaaagttatcatgtatctcttcaatcacattgattaccatagaaatgaaaaagacgaaacagagcagacaacataccttgctaaagtgctacttgctacagagtcgtgaaagctctccactttcaataccaatttaatcgtgagatcaaaagtgaaaacatcgaatactagggttttggaaagtttaagagaagagacgaagaaactgaaacaacttattataagcaatttcctccatttccacatgaggaaagagtaaagcagaaagactgatgaagaaaaggtaagtagtctgtttgggaaagaaagtcacgtgagagaagcgtgggcctttaagggtaaaactgtcatttaaatagtcgccgttctttacacttaggattagggcttctaacatttaaatagtcgtttcgttctccgtctctcctttcccgtcggccggtgataatttcgcaacccaaattccaaatg

SEQ ID NO: 30405 - DNA, 3000 bp, Unknown; identical to SEQ ID NO: 13594
  misc_feature (1)..( 3000): 2750-1469P.txt file - cDNA_ID_3030940; gDNA_ID_2214638; Annot_ID_188186

SEQ ID NO: 30406 - DNA, 3003 bp, Unknown
  misc_feature (1)..( 3003): 2750-1469P.txt file - cDNA_ID_3030947; gDNA_ID_2214638; Annot_ID_188183
actagtgatcgttatataatcaaattcaaagtgattgtaatgtattctctaacttaatttagcagttctgcttctctatgccttcttcaaaataattttccatctataagagactcttcagaatatttgtttcttttcttgcgtcattgaatattaatctgaacgttgtacaggggtctcactcagctatccctgattcacctctaggtccagacgcgtatcgagagtatgaaaccttacttgttcaggattacaatgaacatactaagaaaagcgacaaaatatctaaagacaaaggggtttctaagttctcttctgcacttgaatcccttactatggagcctattgaaagcgaaaatgtagatatttcatcaggtggtgcacaaggtttggttgtctcagttcaccacttccccttgattatttgtcctttcactcctcgagcgtttgtcttaccttcccaaggatcagtcgcagaagcgtccttgtcccgtcaacatgaggattctcttagttttggtttgcctcccataagtactggatctatgtctgacactgatgatgttcctcctggtgcaactcttaccgcacattttctttaccagctggcccttaaggtaaactaacactgcagtaaccgctttgaacttaattcacgatgttcatgaagtacgtgagctagaacactagaagatatctgtttcccttgtttgtcaataatttaatttcttctgtacgtttttcttaaatttgtgaccatgtcgtcacttttttaaaattgtagatggagttgaagttggaaatattttcacttggtgaccaatcgaagaatgttgggaagattctaacagacatgtcaagtgtttatgatgtagcgcgtcgtaagcgatctgctggcttgttacttgttgaccgcacacttgatcttatcactccctgctgtcacggggattcacttttcgatcgtatcttttcatctttgcctcgggcagaaagattttcttcacaagcacagcttaaacaaggggtcccaagcatcaatcgtccttctcttgatgttcaagtgccgcttggggaactgcttaatgaagaaccaagcaagattcgggattctggtcttcctgaaggaattgaagcttttttacgtggctgggattcatatacctctgctccacaaaatgtaggtttgtttaatgaatgtgacaagaaatctaccaccaactggactgaactactaaatggatctcttgtcgctactgaatgttttagaggaacaccttacttagaggccatgattgataggaaaacgaaggatggaagtgtactggtgaagaaatggcttcaagaggctttgcgtcgcgaaaatatctctgttaacgtgagagctcgtcctggttatgctacaaaaccggagctccaggccatgatcaaagcattgtcccaaagccagtcgtctttgttgaaaaataaagggattattcagttaggggcagctacagccgctgctcttgatgaatctcaaagtgccaaatgggatacttttagcagtgcggagatgatgttaaacgtaagtgctggtgatacgagtcagggtttggctgctcaaattagtgacctgatcaacaaaagcgctgtggcagaacttcaagcgaagaaaaacgagaaaccagattcctcatcacgagggctgctatcttttcgtgatgccctgcttcttacaatagttggttacattcttgctggcgaaaatttccctacatctggctcaggtgggcctttctcttggcaagaagagcattttctaaaagaagccattgtcgatgctgttctggagaatccatcagcaggaaatctcaagtttcttaatgggttgacagaagagcttgagggcagattgaatcgtctcaagtctgaggaaaccaaagaaattccctctgatgatcaattagacattgatgctcttgatgatgatccatgggggaaatggggtgacgaggaagaagaagaagttgacaatagtaaagcagacgagtcctatgacgatatgcagctgaaactggatttgcgtgatagagtagacagcttatttaggttcctccacaagttatcgagtctaagaacaaggaatctaccattaagagaaggctcattggcttcagagagcagctttcctggcgagccttctggaaacaaagggctagtctacaggcttataacaaaagtgttgagcaaacaagagatacccggtttagaataccattcttcaactgttggaagatttattaaaagcggatttggaaggtttggtcttggtcaggttagttagacctttctctctacccatgactttcattttcctacacaagatatacattaatgtttggcaatgctattgcaggcaaaaccaagcctggcagaccagagtgtcattcttgtctttgtcattggaggtatcaacggtatagaggtgagtttcttcatcacaaaagtcacctcgcattcacgttgtagggctatattttttataactgtctatgtttcctccattgttaaggttttggaagctcaagaggctgtgtcagagagcggaagaccagacattaacttggttattggaggaacgacacttctaacccccgacgacatgtttgagttattgttgggacaattcagccatttttgatatcttgcaaactgacctcactctcataatctctgttgttagcttgtaacattagaagaaacagaaatacccatgaataaattaatgatcgaatgttaaaatctacaaaacaatagttccattttcaagagataagaaaagattggttattaattgtgaataagagatttttcaaaaaaaaatctcaaattatttatatctttggtccctaaagttttataacatttacagaaaagcttttaagttaaaaatcagaaatctccttaaacccccaaaatcacatttcacacgaaaaacctcgagtgagtgaagaaacaatg

SEQ ID NO: 30407 - DNA, 3003 bp, Unknown; identical to SEQ ID NO: 25156
  misc_feature (1)..( 3003): 2750-1469P.txt file - cDNA_ID_3030951; gDNA_ID_2214638; Annot_ID_188182

SEQ ID NO: 30408 - DNA, 3003 bp, Unknown
  misc_feature (1)..( 3003): 2750-1469P.txt file - cDNA_ID_3030991; gDNA_ID_2214639; Annot_ID_136217
tctaaggttcctatttctctactttttcaacttctactacagaaaacaaaatcaaggacatcatcctagagattagtgtcaaattacgcaaaaacatgttcctactggagaagaagcttccatacataaatcttggtactattcaagaaaactgtgcttttcgaaaaccacaatgaagctttgaatttagtatgtcttagtcgttaagcgacactgtttagcaagcattctattcactaaagctcaatgattctctcgtacaagtttgatgaaacaagttttgtgttgtttacctcgtaactccttaagtaaacggaaagagaagccctttgaatcaacagtcacaacaacatgtggcttaaacttaaccgcagcatcaatagtctccttcaacttcacctagtatctcaaaaactagactagtcaatcaaaagaatctagagtagctttatatcaaaccattcaaaaggttactcacacggaatttatacaaatgtggcaaaagctcccatacacccattacagccaaatcctccattggaaacaacgaattcaatcctttcttgcacatcaaggatctatcaatttgtaagaagcaaagatacaaatgttccaactttatgaaattttcaattgagaatcaaaacttttcataagaaacttctaaattgggggaaacccaagtgcttaccctccaactccattgaaacggatgggtaaaggagagagctttttaagcgaggacataagacgagaaccgatgttatcgccggaaacttcgccggagacgatgaaaactctgagctccccatcgattgcagccttgtcaatcaccgatttagcagcttgaaatgatgagtatctcttagtgaatgttgagagagggaaacgaagtttgctctttgtaatctgaaacatcatttcggagaagagagagaatcaaaaactctgaaagagtgaaagtgacgttgttaaacaatgaactgcgatgaaagcaagatttctcatggggactttaatgggcctcttaagcccacttcttatcagcatgttattgaggcccatcagtcatagtgatacttgtttaggagacagtgatagttatagacttacagtgagtgattgtagatgttgaatggcctatgtttattgtttttggatctaaaacttatcaagtaagagtttttttcttctgttaaattagtactccatctgttcttttttgtttgattgtttagaaaaaaaaattgtttaaaaaagattattttttaggttttcaatgcaataattgttagttataattgataaattgtaaacttcgatacaaattattaaatattattggtttagagttattgaaaattgtaaatcacgaaaaacagtaaatttaaaagcaacatttcatatgttttcttaatatttgtgtttttcctaaaggatcaaacaaaaaggaacagattgagtattacttaggataagtttggggtttatagcaaaaagtttgatatttggggcttatagcaaaaagttggactgacaattataaaaatagtaaccaagactatcaaaatatttgataaatttagcttatctttttattaacctttaggattctgattttcttaaactaacttttttttaaggttggtcatatggataaaaaagattaaactgttcaattttgggttgtctgaaatctatataaaagaaaagctacaaacacaaaagcttattattccaaaaactctttaaatttattttctctttaagggaaaaatagataattgacttattcatcacaccatttctgcttttagatatttgtgaaatcctctctatgtttcttaatcgtctcatttaatcccggcgatagtaaatattgtaataaaagagatacacttccaatcatactttggaggaatgacatggtctcataattaagtcatgttgttggatgtttcgtgtttttcgtcctaatttatttgttatgtttcttgttgtgggctttagtttaaagagctatgttcatgtacttcagttctcattttggctataaaacatatacttcatgatcactaaaaatgcaaaaagggtgaacttatatcacatcacatcaaattcttgcatttaacaacgttaaggcgatggaatttgataaaactatgaaaatgttacttacatcaaactttaaaagcaaaaatatcatttatttttccaaagttaatcttaatattttgatggagataggattaaatctaaggtccttcagaatatttggcggattttaagagcaatagagaagaattctccactttttttttattattaatttctcgcagatgtaaaagcggataatttggcacgaaaactccgtatcgaaccacatcatatcacatttataaacaacatactccacaaatagctcgtttgagttgttgtttttttagtaaatcggttgacaaaaaaaaaaagaggattaaatctaaggtccttcatgtaatcaagatcctaatttcagaaagtttaactattttgagaccatatcgtttaaaacccaaaacattattccaacttgaattgatgatgagataagatatgtagaccctactcaactaaatatatcatttagtctctcgacagataattcctttcataaactgaaacctaactgaagaattaatacacaaatatttccctttttagtcatatccctaatcatataactacaaaaatttagagagtacacacatagcaaagtcaatccaacggtaaaagagagcagtattgatggagcggcaaacgaccaaacaacaaatcgtgctgaaaataataatgtctcaccagaatttttcagcattaattgaaacacacaacaaacctctccttattcaatgaaaccacatttcaaacactcatgttttcttataaagagaggcctctattcttttatacagctcatggaatcacactatcacaatcataaccacaaaaacaaacactatg

SEQ ID NO: 30409 - DNA, 3003 bp, Unknown; identical to SEQ ID NO: 30408
  misc_feature (1)..( 3003): 2750-1469P.txt file - cDNA_ID_3030991; gDNA_ID_2214639; Annot_ID_188266

SEQ ID NO: 30410 - DNA, 3000 bp, Unknown; identical to SEQ ID NO: 13609
  misc_feature (1)..( 3000): 2750-1469P.txt file - cDNA_ID_3030995; gDNA_ID_2214639; Annot_ID_188265

SEQ ID NO: 30411 - DNA, 3003 bp, Unknown; identical to SEQ ID NO: 25161
  misc_feature (1)..( 3003): 2750-1469P.txt file - cDNA_ID_3030999; gDNA_ID_2214639; Annot_ID_188264

SEQ ID NO: 30412 - DNA, 3003 bp, Unknown; identical to SEQ ID NO: 26455
  misc_feature (1)..( 3003): 2750-1469P.txt file - cDNA_ID_3031035; gDNA_ID_2214639; Annot_ID_188249

SEQ ID NO: 30413 - DNA, 3000 bp, Unknown
  misc_feature (1)..( 3000): 2750-1469P.txt file - cDNA_ID_3031039; gDNA_ID_2214639; Annot_ID_188248
ctctctcatcatgtacctaattgaaagtcaaatatattaagagtgaaacaaaaaaatactaaatttcaacttgcataatttgtcatctaattgaaagagacctcaacaagggcagccaagctaagcttcttgcaaatcttaagcaagaaggttatttctaggtcagccaatacagcagcaataagcagtactgcatctgcgcctttagtccgagcatagtagatctgccatggatctacaacaaactctttgcataatagtggacactgcaataatttgaaaaacatggattacacaaagtgttttgataataacgcaccaaaagcaccagaatttgttaagaaaataccttcacaccagcgctccttattgcttccaagttttcaaagcctccctgttgaacaacatcaagataagaactacaaatgttaaaaacttgttgaaaatgtgagtaagatatctgcaactgaatacacaagtgaacctggaaatacttctggtctgtcaaaacgctgaggcatgctgctccgcctttttcataagcttgagcaatctcgacctgtaagacgataagcattaacatcacagccagaggaatcatgaacaccttgcgggtttagataaaagaacaatagcaaatcatattggaaactgttcacaataaaaagaaaaatgttgatctatttcccaaggccaaagactacaatgctcaatgttccaatcttttatccattgaagaatcaacctttactcgcttaatcagagtccactaactcaattcgagaacacgatctaaagtcataaaggaaagaaacagaaaccagtataacataccgggtcaaaattctcttttaagattcctctacttggagaagccttcttaacctcagctatcaagccagggaagccagttcttttatgagccatcctaagagccccaacaaaatccctagtaggaggagcatcctctacagctttcttcagcacgtcaagcggatttagctccttcatctgaagaaccaaaagacaaccaccattaagaaaaactcacacaaagctctgaaaagaaaagtcttgtaaaaagaaagtctttacccgggaaacttctacgtctttgtaccatgtgatctcctccaagatattacgaggagaatcagcatcattgttatgcaatctcaactcaaatggtccagagtatcccaaaggagccttacttggtggttttctccttatcctaataccttgactaatagctaattcctcctgatacatctctacttcccattccttgattctaagaacatttcctttatcctctactgatgaagaagacacagctaagctttccttcaaatccgacttatccaaaacaaaaaggcaaacactttcagcaacagattgataacattataatcagaaacccccaattttgttccagatagggttttagactcaaggcaatcacaaagttcaatctaacaaccgtggacaacataaatcacacagaatcaaacgaaagactcgaactttaatggagggtgttcatagaatccaaaaaaggagaaaaatttggtcgcacctgttgagctcggatcgagaattgcgacggagccctaaagtttatcttcctgtccatggcaaaacctgaaattgaacgtctgattgagacagaattgttacaccgatacagagaaggtgaagccactttaattggaagtctctgtaccggaactagtccctccattgccggaaaaaaaaaagtttcgaacttttgaagaagaaagaaaattcaaatggtttttgtaatttatggtcaaacaaaagtttatatagaagttggattatgaatatttttggtagttggtgtgattaacacgtgggttaatagtaagacggcgatttttttttgcaatggttggtgaaaaatacagttgagcagagactggtctagtctttacctttgatttgtcacattttgattgtttttcgtttactacactactttggttaggaagtcttctatactttggttaggaagagttcaaattccttcaaaagttcattccttagttcattccttcaaaagttctcccttcaaaacttcttgtatagtaccttatgcacggttcatccacttaaatgcactccagttcctcgaagccaacctttttcttaaccttacttctaaactccatatataccaagttcctgacactcatctagggaacatgtaataattttgctcaatttcttttgttctataaatcttcaaagacattcgattacaaaagtattctaattttgctttctccaaacctaatttacgtagttaattcaaacttgaaaaaaacaaaaattaatggaacaattttacgagattgaaaaagctaagaaaacaattaataactaaatgtaattcggtgcatttagttatatttagctataattttataacaaataacatattttaaataacatatcttaaataatttgatatcaagaaaaatttagttatatttattaaaattatatataatttgttttttgcaaattttagacaaaatttagtaaggttaaactaatttttatttatgactatttttttttgttttttttttctttgaaaaccgaaggaaaatgatcaaaattcgtcacctttcctaaccaaaaacaaatagaataatcataaaatccgaaaattctccaacccgaattattctaattcaaataaatccaaatgtttatacctagatagtgatatgtcttttctgcacattctcatgtttcaaatcattagttaacatttagttcatatatataaataaccatacgttaagttgatgtataaaacatctttaaagttaagttatgaaatgacatatattgacaaaaaaaaataatgacatgtttcccgaaatcaaatggtcattttcaccatattatcactgtctaatgacgtcaggataatacttgaaaacgttgtagcaaagccgggagatg

SEQ ID NO: 30414 - DNA, 3003 bp, Unknown
  misc_feature (1)..( 3003): 2750-1469P.txt file - cDNA_ID_3031051; gDNA_ID_2214639; Annot_ID_136197
cggcgcttctatctcctttcttttcccttgacctcctccacgcgtcttaggcggcatgactgatttcgaatcggaaatagaacggaaatactggtgaaagcaagaagaacgctcgattgaatttaaagaaatagggaatgttgtggttaatttcagcggttactaaggagaagaagtcaaaaaatcgaaaacggttgtaatgagaacaagaaacaatttcgaattggaaaatccctggaaatattaaggttttttttatttgattttcaaataaagagtaaaagtggttcgggtggtttggttcggaaacgaaccatgatttttctggtaattaataggttcggataaggatatactagtaatatccatctatttcgaattaagaaaaaataaataaattatttctgttttttacaatgattttttggcttcctctttgcaaaaaggactgccagacgatttttcgattttggaagaccgtggagatcaaaacagtctcttttgtctactcagtcccctcttgatctggtacgtttacatctgcaatctcctcatctctttaacccattttcatctcttcccttagagtttcaatcatcgaacaaaattattctgatttggtcattgatttgcttaaagaatgatctttctagttcaaagccaagttttttcagtacccatctcgatatctctttgtcccttgttgcaaaaatgtcgaatctttcatatgtctcatgttgagtaaaagctgcatacaaagtgttcgtaaaaatgccgcaacgaaagttacttgacattccagatcagattattatttttacatatagtatgcctatagaattatttcttgaaaatttgggcatgtcaataaattcttgttgcatagcgcattagcagattctaagtatagcacagtaagtaagttgcaatttggtttgcatatcgatttagttttagtatggtcagcttcttattaggattatcaaggaacttaggacttgcggtctatgtggtgaagcttctgtgatgatctctgaagtgtttttgttgaggacattatgagagagagaggtatagtctccaccatgtccaggataggtgtgttcttgtaatagggcttctggtaaaagaaaaagagagacttttccacatgagcttaaatctgtcgcattttactttctgtgattgaactttatatgcaaaactgtccattaaaagttaatttctgcttgatgcttgtgttggagtagggcttatggttccagtttggctaaactgtgtttttctttatctttggcatagaaagaagatccctgtttctggttatgatgtctcgacagagtcagttatttacattgcttaggagaaggtttcattcaccgtctaatgatgccccaacggagaccttaagaaagaagatagccgatttgcaaaagagtaagaagcgaaggaacccaataaagaaccagtttctagttgaggttccagaatcaagatcatatttagacacagcaacgatgcctatgttcctcgctgttgtaggtatcgcattatttgcaaaggtgctaatgatggtaagccttcctctgtcatctctttgaatgcgtctttcttgtcagtgactttagcagctgttaagtagaagttgtttcgtaattgagctgttagattgctttatacttttttgtgcaattgaattaggaaggatctgtggaaattgctgattctcagtattggtttgttgttagatcgatgattcgaaatcgcaagaaatgattgaacgcaagataaagaatgcaccacaggggcaaggcacggtacgaatgatcgatcgtgaggagtgggatgagtttagagaagtaaggccaagaacaccttttgagtcaaagcttgctcgcccaaatgcacaaataagaactggagaacctgtgcgcaaggtaaaccgctctattaaatcaccaatccttgcagtatcttaccaaatcatatcgtcactcgatgaccaaaccttttgcttgtttcctttttaatcaggatgacttgaaaaactggacaatagacgtgctaacaaatgctcttgaacgaaccgaagaaagtgttcgccgtggttccagttagattttctttcctcaattcaattggagcttcctagttaatagacatatatatatcttgagaatttggtactcaagaacactctcggtcatctcctaagcgaacataggcatcatttaggacagttgagagaaggaacagaagctgtcttgtaacggagaaatctttgaaatggagatatgaatattcttactttgttttggaactgctttgtgtattcatatgtgtttgactcacacatttcatcaaaatgcttataaagggtttgattgataactcggactcggttatgggtgtaacgttttaatatttaaaatcgcaaaattggaaccgcttttttaaactgagtgaaatatagcgttttgaaaaaagacgtttctggtggcttctgaattgaaaaatcagcgtttttacttttcacaatattcaattggagaatctttagaacttcaacgaagtagcgtctccggaatttcaggtaaacgtggcaagaaaaagccaaacggagaagcatccacgtgtccctccattagccatctcccacgtgtccattaccgtaccgacgaaacattccttaaccaaaggcttcccgaaaaaggacagagtccacaagcttcggattgttcacaacttcaaagcatcgaaaaggtttaaactttacgtttttctctggaacccgattcgaagaaatcatcaagaagtttcctttcactgatttctcaatctattcgtaggtaacccaattccaaaaaacgtttcttttttctcgatgccttagcttctttggattctgttgtgatctaccgattttgaatttgcttgatcgatcatcggatcactgtgattagtgttattgttcctttcctttgtgtagctttcgcgcttatg

SEQ ID NO: 30415 - DNA, 3003 bp, Unknown
  misc_feature (1)..( 3003): 2750-1469P.txt file - cDNA_ID_3031051; gDNA_ID_2214639; Annot_ID_188243
ccgccatccgcaacctatcctttgatctagccggttccatctccattagcttggtttttacgtcttcacgtctaattaccccggttttgaagtacctgttggcgaagttcatattaccagcactctaataattagctggataggccttgcagttgaaaccagagatcaaagcatgctccctaataccatagcggatgggaactccattaacaacgaaccaaacctccttcttcttctcaatagatgtcgttcgaagaaaaagcatccacatcctcattaacttgtgggtatatccggaaggtaggtgatagatgtgcttgaaactcggatgctccataaaataattattttcaacattcgttagaggatgttccaagtcagcgaaggtcttcaacacctccgagatataacacctcgttgctaacttcatcttcttggtatactccgacgccgggaagtacataccaagtggctgcattgccatcgcttcctccatatcctgaaagaaacaaacattcattcatatatcactcaattgtaaatagtatgccacattattactctgtatttccaaaaagtattccccgaaattaccagtattacacaaatcgtactattcatatatcactcaattgtaaatagtactgccacattattactctgtatttccaaaaagtattccccgtaattaccagtattacacaaatcctactgttcatatttcactcaattgtaaatagtactgccacattattactctgtatttcctacaagtattccccgtaattaccagtataacacagatactcctattttactatatagtatttctcaaagttactagtactaactactgataaatcacaattgtagtattactctaaggtattacccacatccgccaatattacctaaatatcaacatagcatttcccaatgttactagtactgtccacagttcacaattgcattattacccaattagatcggtattacgaaatggaatacttaccacatttgcgatgtcctcgtctatggtcctctcctccacgggtttttccactatcacgtcctcgtctctctcgtcctcgtctccctcatcctccacggacttttccacattgacgtcctcgtcgctcgcggagctcctctcctcctcctcctcgataacggctaggccgtcatcttgtctctccgcctcttccacgggattagcacacgcgagttctttgtttgtctccgtctcctctgaatcggaatcggagcccaaggtttggctactactccctgattattcttcttcacttccttcttctttttcattttcatcttccacctcatcagtttgcatattctcttgagtttcttcagccggaatatgcttcagagcatcataaaacgtagaatcatcaagcatcgggctctccgtcgttggagccgtcgttggagccgttgtcgttagagccgctgtcgttggagccgcattggttgccatcgccgtcgcaatcgtttgtgccgtcgcagtcgtcttcgccggcgcctgaaccttcgctttcttcgccggcgcctgaaccttctctttcttcgccggcgcctgaaccttcgctttcttcgccggcaccttctccttcactttctccgccggcgccttaactttctctgtcttcgtcggcgccggcgcttctatctcctttcttttcccttgacctcctccacgcgtcttaggcggcatgactgatttcgaatcggaaatagaacggaaatactggtgaaagcaagaagaacgctcgattgaatttaaagaaatagggaatgttgtggttaatttcagcggttactaaggagaagaagtcaaaaaatcgaaaacggttgtaatgagaacaagaaacaatttcgaattggaaaatccctggaaatattaaggttttttttatttgattttcaaataaagagtaaaagtggttcgggtggtttggttcggaaacgaaccatgatttttctggtaattaataggttcggataaggatatactagtaatatccatctatttcgaattaagaaaaaataaataaattatttctgttttttacaatgattttttggcttcctctttgcaaaaaggactgccagacgatttttcgattttggaagaccgtggagatcaaaacagtctcttttgtctactcagtcccctcttgatctggtacgtttacatctgcaatctcctcatctctttaacccattttcatctcttcccttagagtttcaatcatcgaacaaaattattctgatttggtcattgatttgcttaaagaatgatctttctagttcaaagccaagttttttcagtacccatctcgatatctctttgtcccttgttgcaaaaatgtcgaatctttcatatgtctcatgttgagtaaaagctgcatacaaagtgttcgtaaaaatgccgcaacgaaagttacttgacattccagatcagattattatttttacatatagtatgcctatagaattatttcttgaaaatttgggcatgtcaataaattcttgttgcatagcgcattagcagattctaagtatagcacagtaagtaagttgcaatttggtttgcatatcgatttagttttagtatggtcagcttcttattaggattatcaaggaacttaggacttgcggtctatgtggtgaagcttctgtgatgatctctgaagtgtttttgttgaggacattatgagagagagaggtatagtctccaccatgtccaggataggtgtgttcttgtaatagggcttctggtaaaagaaaaagagagacttttccacatgagcttaaatctgtcgcattttactttctgtgattgaactttatatgcaaaactgtccattaaaagttaatttctgcttgatgcttgtgttggagtagggcttatggttccagtttggctaaactgtgtttttctttatctttggcatagaaagaagatccctgtttctggttatg

SEQ ID NO: 30416 - DNA, 3000 bp, Unknown; identical to SEQ ID NO: 13624
  misc_feature (1)..( 3000): 2750-1469P.txt file - cDNA_ID_3031082; gDNA_ID_2214640; Annot_ID_188300

SEQ ID NO: 30417 - DNA, 3003 bp, Unknown
  misc_feature (1)..( 3003): 2750-1469P.txt file - cDNA_ID_3031093; gDNA_ID_2214640; Annot_ID_136227
caacaaaactagaacaaaagtaagaaaattcttaaatcttgggagtggttagactacaagggttgttagcatcttgacgttttggcttcttggtctttctttttcatttaacactggttgttgttgggtatatatgaagtgtgtagtgtgatgtttttttaatttttttttgttttatacaatgtagtttaattttcttggccagaagactttgaccctatatagtcaacactcaacagcttacagttacagacaaaaaaagacgcgtttataattgaataaaataaaaaacaaaaggcttggccatgccactggttcctctctctttctttgacgcgcaattaaagctaatgtcagtctcaagcacaacccttatgacttggtctttgagtactaaaagattaaaaagttctcatgttctgagttctgacttacctatcttctccaagattgctcctagttacaataagtgagctatggagagaaaggggtaagatgattcaatttaatgtagtacaaacttcatgccattgatgacaccatgaggaacatagcttccgtattccgttgatgggttcaacttgtacattcacattccatagactcatcctatcccccgttgtaagacgattgtgcattgcgagccacactaggaaggagtacttgggagttgagtggaacaacttgtacattaatacgcattattaaaataaaactcgagttagaaaagtttagcgataacgatatggtttgtaatagcgtatcccctcctattaatgagatattctctcatatcaatcatcttaatgggagaggatacaatcagaatcaatttacatcaacatgattgatatgagagaatatctcattaataggagaggatatactattagttagcaaatgatcgtattcaaaataatgaacatttttagtttccacagtcatcgtactctctttgatgtgatagtggtgttcgtcctgttcaagtcatttaatcttgctatttgatcgttctcaagaatagcatgcaagcctaatgagtctgaaataacagagtgggcatcacattgtaagtattatattatacttttattacatattttatttagcaaaaaataaattttaataagagtagaattgaatggtggcatatttgtcttacaaaataaaaagacttgaaatggcccacttcaagaaattgggcgtggggatgtgtcttttaatcacaaatctataaagtacgatgaaattattttgttcaaccataaaacagctgattttggcactgaaacactcgattatatataggagtaccgtttggggttttgttgtgtgtgtgtgtgtgaaattgtacacattttccgcaaactgatcccacaaggccacaagagagatgattacacgaacatctctaaaattaataacacaagagcaaaccatccaatatacttcctccgtatttttatagttgatgtttagatttttttttttttttctaaattaaagaaacattgataatctatttagacacaaatcaaccaataataaaataattctatgatataaatagtcaaaaataattaatttagtattaaaattgaaatcatcatctaatttgaaacattttattttcttctaaaacatcaactataaagatacagtccatcagaattgttaggggtaaaaatttgagaagtcattttattttttttcacagatttctcataaattaatatactcatatgtaactaaaagaaaagacatgttaattaatttaagcaaatgtaacaaacttattcatgattacgaagttcaattgcaattttgttattgtctttatcatgtccggataatgtttcaatacgtccagcacttgattcctcatcctagcagtctagccaagaaaacttcaccgaccggactaatgcaaacaacccttgctccaagacacaactttacaaacaattaagactatctagttttagtgagaaactcccacattacctaaataatattacttctgcttaatttattggatattagatactattcaaccgtccgattagcgtctagcgaaattttaaacattagtattttctcaattctaattgataactttttttactcaatatatagaatacagtataagagtttttctttttgtaagtttgtgatggtattaaatgtagacatattatatacttccacaagtcatatataaaaatgtaaaatacagaatcttgtacgcaacacacgggagatagtatgagactcgagagagaaagagtcatcatcatcatcatcatctccttcaaaacaaaaattttatatacaaatttggctttaatggaacccacgttctcttctctgtctctctttctttacaatttccaagagaacattaaaataaaaacaacaacaacaacaacaaaagttttgttagtattactctttcactcgtttttaccctctcttagctgcattacattagctgtttctacttattctctctctctcttcatcttttgttgtttcacgtaaagtcaaacccatctctctctctgtctctgccattttctgaacatgaataatatcttctcatgctctgattcgtttctcattgcctaaacaagaagaacaatctattcttgttttagcttaaagtttttattgctacaaacaatggagttcaagagagacaatactgtcaggttctagatttttcatcttctttagaacattcatttttgggttctctcaatgatggaaaataaagttggctttttgcatttacgatcccaataaagttatgatcgttatacattgcattagtacattctttttggaatgattcgtttcttgatcttattttttaaacacaaactctatttttttttttggttggttgatgggtgtgacagattctatggagacgagaaacaaaccatagaagtaggagagaagcgagtaccattgttcaaatcaacaacggctccatttatg

SEQ ID NO: 30418 - DNA, 3003 bp, Unknown
  misc_feature (1)..( 3003): 2750-1469P.txt file - cDNA_ID_3031093; gDNA_ID_2214640; Annot_ID_188296
tgttattgcgtgcggaatatagttccaatccagtgtctaacatctgcataactatgtttacgtctccaagaagagcagcaagatgcaaaggtgtgtctccgtacgcgttacgggaagagagaagggaaggtcggagctcaataatcttggcgaccagttctcggtgaccgagctttgcagctacgtgcaaaaccgtgttgttggtgttctgttcctcgcttctctcctccagggaagattctctcgcttccaccaaaccaagaaaagctggaaggtcattttgaaggatggcatcgaagatcggatgcatctttttctcaacaaaactagaacaaaagtaagaaaattcttaaatcttgggagtggttagactacaagggttgttagcatcttgacgttttggcttcttggtctttctttttcatttaacactggttgttgttgggtatatatgaagtgtgtagtgtgatgtttttttaatttttttttgttttatacaatgtagtttaattttcttggccagaagactttgaccctatatagtcaacactcaacagcttacagttacagacaaaaaaagacgcgtttataattgaataaaataaaaaacaaaaggcttggccatgccactggttcctctctctttctttgacgcgcaattaaagctaatgtcagtctcaagcacaacccttatgacttggtctttgagtactaaaagattaaaaagttctcatgttctgagttctgacttacctatcttctccaagattgctcctagttacaataagtgagctatggagagaaaggggtaagatgattcaatttaatgtagtacaaacttcatgccattgatgacaccatgaggaacatagcttccgtattccgttgatgggttcaacttgtacattcacattccatagactcatcctatcccccgttgtaagacgattgtgcattgcgagccacactaggaaggagtacttgggagttgagtggaacaacttgtacattaatacgcattattaaaataaaactcgagttagaaaagtttagcgataacgatatggtttgtaatagcgtatcccctcctattaatgagatattctctcatatcaatcatcttaatgggagaggatacaatcagaatcaatttacatcaacatgattgatatgagagaatatctcattaataggagaggatatactattagttagcaaatgatcgtattcaaaataatgaacatttttagtttccacagtcatcgtactctctttgatgtgatagtggtgttcgtcctgttcaagtcatttaatcttgctatttgatcgttctcaagaatagcatgcaagcctaatgagtctgaaataacagagtgggcatcacattgtaagtattatattatacttttattacatattttatttagcaaaaaataaattttaataagagtagaattgaatggtggcatatttgtcttacaaaataaaaagacttgaaatggcccacttcaagaaattgggcgtggggatgtgtcttttaatcacaaatctataaagtacgatgaaattattttgttcaaccataaaacagctgattttggcactgaaacactcgattatatataggagtaccgtttggggttttgttgtgtgtgtgtgtgtgaaattgtacacattttccgcaaactgatcccacaaggccacaagagagatgattacacgaacatctctaaaattaataacacaagagcaaaccatccaatatacttcctccgtatttttatagttgatgtttagatttttttttttttttctaaattaaagaaacattgataatctatttagacacaaatcaaccaataataaaataattctatgatataaatagtcaaaaataattaatttagtattaaaattgaaatcatcatctaatttgaaacattttattttcttctaaaacatcaactataaagatacagtccatcagaattgttaggggtaaaaatttgagaagtcattttattttttttcacagatttctcataaattaatatactcatatgtaactaaaagaaaagacatgttaattaatttaagcaaatgtaacaaacttattcatgattacgaagttcaattgcaattttgttattgtctttatcatgtccggataatgtttcaatacgtccagcacttgattcctcatcctagcagtctagccaagaaaacttcaccgaccggactaatgcaaacaacccttgctccaagacacaactttacaaacaattaagactatctagttttagtgagaaactcccacattacctaaataatattacttctgcttaatttattggatattagatactattcaaccgtccgattagcgtctagcgaaattttaaacattagtattttctcaattctaattgataactttttttactcaatatatagaatacagtataagagtttttctttttgtaagtttgtgatggtattaaatgtagacatattatatacttccacaagtcatatataaaaatgtaaaatacagaatcttgtacgcaacacacgggagatagtatgagactcgagagagaaagagtcatcatcatcatcatcatctccttcaaaacaaaaattttatatacaaatttggctttaatggaacccacgttctcttctctgtctctctttctttacaatttccaagagaacattaaaataaaaacaacaacaacaacaacaaaagttttgttagtattactctttcactcgtttttaccctctcttagctgcattacattagctgtttctacttattctctctctctcttcatcttttgttgtttcacgtaaagtcaaacccatctctctctctgtctctgccattttctgaacatgaataatatcttctcatgctctgattcgtttctcattgcctaaacaagaagaacaatctattcttgttttagcttaaagtttttattgctacaaacaatg

SEQ ID NO: 30419 - DNA, 3000 bp, Unknown; identical to SEQ ID NO: 13626
  misc_feature (1)..( 3000): 2750-1469P.txt file - cDNA_ID_3031100; gDNA_ID_2214640; Annot_ID_188294

SEQ ID NO: 30420 - DNA, 3000 bp, Unknown; identical to SEQ ID NO: 13620
  misc_feature (1)..( 3000): 2750-1469P.txt file - cDNA_ID_3031107; gDNA_ID_2214640; Annot_ID_188291

SEQ ID NO: 30421 - DNA, 3003 bp, Unknown; identical to SEQ ID NO: 25165
  misc_feature (1)..( 3003): 2750-1469P.txt file - cDNA_ID_3031113; gDNA_ID_2214640; Annot_ID_188289

SEQ ID NO: 30422 - DNA, 3000 bp, Unknown
  misc_feature (1)..( 3000): 2750-1469P.txt file - cDNA_ID_3031148; gDNA_ID_2214641; Annot_ID_188334
agcgcgtgcattattcacagagagttggaggttggggaatatgtagctaggaaaatgtttatgctggattacaagaatggagggctgtatgtattgatgtcaaacctatatgcaacagaagcaatgtgggacgacgtagttagagtcaggaatatgatgaaagataatggatacgatggttatttgggagttagccaaatataataatttgaatctgtgaaacaacagaacaggttacttatacgttctgttaatacctcagtatttttacctgattgctttgcgatggtgaggagagttaactggagtgttcgaacataatatttgttgttcaagcttcattgatgaaggtttcttagaatccttgataaagccttgaagaatttattatagatcatcgaccatatctctatccggctgaaaacgagtatagaaactagttgtgattgatttttagatgacttcttgtgggagctgcaaatacatagaacatgcaggactacttagagctattcactggaattggtgaccaaggcgctccagttagtgtcctactgtccttgagcataatgtgagttttcttactgtcctcttgagttcttatcttcgaagcttgaattgtatgtattctaaaagacctcaagcattgacaaaagcaagtatatgttagccctttaaagatattagaatgatttttcatgttctagttttgttttcctggctagaaaaaacattgttgcaactggtgaagaactctctcagcatatgcagactcaaaaatgttgtatttgcatatctgttgggttcaacattcgaatttgatggctaggttagttacataggtcattctcagaatgttgcattcatatttagttttatggttgccatttatttgacatcagtctctctattgtgacactaatgggcttggagtttcttgagttgtcatgaattttctttatcagtcaataaggtagtagtaggtaatactgatattaagcacaatcttcatgactcagccgcttagtacatgcttttgagtgtttattctgaatccaaatgatctttctcaagttcaaacaatatttatgccgatttcctgacgtcatttgtttagatcattgtcttgatgtttttgttgtagttatcttaaaatgtgttcatgtaaatctttcgaattgccatttcaaaggggatggttatctgtattaattggctgatatctccttcgtctgagctctacatatgatgcaaatgatggatccacaactttaggtaagtcaactttgaaccaacaagttacattgtacatgagggtactaagcaaagatatataaatgatattgtgtctctttttctgtcttataattaggacccaagacctaactatgactcccactgcatctatcgacaccggtcaaaccatctctcttcatcttctcctctttagcctttcgacaaaacacaacccacgagttaacttccatggccacgcagacaccaaccagcgtcgacagacatagacagtaaccgagctttgcgtacgaccttccttcccttaaaacctcaaacccttggaacacattcaccacgcccatcaccacacacgcgtacccgacaaaatgatggtaagacttccagtacctccggaacttattggtcgtctttggtctgaacagcaaagccagtgtttgcagcgccgctgctgtgaaagtagctatcccgaggctccgatgtaacccataggtcactccaggggaattatggccgagcacgattccaatggagaagccaatggttcctaggaggaaaccggttagctgtattgctgcgtggatgtagaaccaagtgggtcctattgattgcatttggcggaggtatctagctgttactgctcccgccgggaggagaaaaccccacgatatcgcgttgactactccgtgagtcacttttaaagctcgggaaccgctgttttgattaacagttgcaaatcctatagaaagaaacagtgtaagatcaaaccttgctgaagtgagaaagaatttggtggtagtatgagagatcaaaggttgagaaagaatttggatacctgaagtgacatcaaaggtggagaaggaggagagatcggtggaagtagtaggatgaatggtgggagagtaaccttggacataaagacctctgttccaaacatggtggatcttagtattgttcgaggagagcttaacagaggcataaatctgaacggaagcaccattacggatagtggccattttaccaccgtagagagaagcagaggaggaagagagacggacaaggtcaagcggacgggaaagcagaggacctttctgaagcttgactgaagagtcaagaacgtaaggaaggaggatgagctgaccagaattcggatctggaaaggcgatgaggacacgagaaccagtcatctgcgccggggaatccgggttaatcccccatccaacccacccggaaggtgagatgaaagttccaaagaaacaaaggtcgagagtagcgttgtgtggatggtatgtccacgcgattgacgcttgttgtgttggaagagagatacatttctcgaagcttttcgtcgccgtcgtggtggtgcagtgaccagctagtgattcaggaagctttgttgctagaagaagaagcaagaatgatagaatcaaagtcgccattgtttgatcatctctgttttttttgttaatagagtcgagactttttatatgtgtagtgaaacttaagaaatatgattgtgattgtaaaagttgatattatgatttttcattgaagtctttgctttgaagctaagtgaaactcaaacactctccacaacacagttggttggttgtgtaatatttggacatctttttaattatgataaaatatgacgtggataaaatatgccagctcggataacagtaaacgacgtcgtttcttatttctgattgattctctgtagagaagaggaagagaagaagaatg

SEQ ID NO: 30423 - DNA, 3000 bp, Unknown; identical to SEQ ID NO: 13637
  misc_feature (1)..( 3000): 2750-1469P.txt file - cDNA_ID_3031152; gDNA_ID_2214641; Annot_ID_188333

SEQ ID NO: 30424 - DNA, 3003 bp, Unknown; identical to SEQ ID NO: 25168
  misc_feature (1)..( 3003): 2750-1469P.txt file - cDNA_ID_3031168; gDNA_ID_2214641; Annot_ID_188327

SEQ ID NO: 30425 - DNA, 3003 bp, Unknown; identical to SEQ ID NO: 25171
  misc_feature (1)..( 3003): 2750-1469P.txt file - cDNA_ID_3031196; gDNA_ID_2214641; Annot_ID_188316

SEQ ID NO: 30426 - DNA, 3000 bp, Unknown
  misc_feature (1)..( 3000): 2750-1469P.txt file - cDNA_ID_3031198; gDNA_ID_2214641; Annot_ID_188314
caacagtagcctccgtaaatgtaaccaacagacccacacacattacatttacaatgttcacgagaaaaacgagtaataggtaacaaaggatgtttgtgaattggtgatacctccactatttccatgatgattaaaatctctcttttgctctagtttttttttctctttttcgtttttcctctctcatttctcaaagctatacatacataaacaaaattaataccacctggccggccaacacaacgtgaagaccacgacacaacatgaaatcctcttaaagacaaatgacatcattaattaattaagatattgtatatgtaattaataccacaccacgtaaaactaaaatggttggatgtgctctaacagcaaccatgtgagagtctcgagacagctaaagtcaacgaaaggcgatgatactttcaaggttttattcattttaattagggttaggtacaagcacgacgaacgattccagaaacatatttattgagtggttgcgaattggtttcataaaattattgtcgacgaattaaaacttatataatacttccttttttctttaatgattgattttctagaaccaaaaaaattgtttcaatgattttttatatttcttatgcaaaattagttaaatatatattattattatgtctttattgcttctttttttaaaaatttattatcacaagattattaataaacacaaggtaaaaaatgtcattaatgtttttttatatgtatgtttttcaaaaaaaatcaatcattatgaaacaaagagtaataataatctcattacagagggaattggcctcatttcgtatatagtataattatcaaagaagtcatgaagtgaaacacattagttttgttagggatttttctctagaaagaatctacggggtatcgaatgagctattaatctatataatatatcaatggaggtgaatagtacgtaagaaactgagtcatcaacttttttaggtttccataatcccaacattatcatctacaaaattggtttatgatgaatgttgttaggaaaattactttaacagtaattgctcataacgaatgattagataactaaaattacatttatcaaaaaaaacaaaaaaaaaaaacaaaaaaaaactatggtatagcgtgggtgatcacctagtatatttaaaaatataataactaacacatgaaacagtgataaaaaaaagtttctaatcatgagtgatcataaaatacaattgtagcttttttggaaactgcttttttaatatcttccttctgacccgtattaaaaaatttcgatcgctcttccactttgtacttggttacataatttcatagaatataagtaagtatatatagtttataaatcctagaaggcacaaagaataattatccactattagtaattaaatattgtcaaatgaatttttcattattaatatttgtatatggtatttgtttaaatttagagaaataaaaattgaaattaaacatatatatataagaaacaacaaggaggaatatgtggcctagaaaatctctattttttttgtcctcactctcttataggaatacttatggactacattttctttactttcttctatttttggaaaataagttttttatatacaacaattagatgattgtgtcataagcattctaccaaaaacaaaggaaacaaaacaaaagaagaaacataaagtaaagcaaaaatgggtaaaagtgtaaatgtcactggtttcatcattcatatgatgattttcttgttgattttaacaggtaatatatatatacattgtgatatattaatctctttgaagtcttatatattcttactttttggatttatgactaatgtttaggcaactttaataaaaattcaatagctaatgtgaaaaaaaggaaccagaaaagtttcccttttcgtttggagtttctgtttgcatttatcataacgttattttatcaaacaaaaatgttctatttctcaaggatttatatttttgttttaaaaattgaaaacgtagtgtaattcatcatagtttaaaggattaaagtgcttcatgttttttttttaccattgtgtatcaatcccgacataaattttattgctcttgagatagctgagaaatggcatatatgttacgtgaaataaactttacactactaatcattttgtatgagatttaagtagtaatcctaaagttactgtacatcaagttagtagtcatgcaagtaatcatcatagctagagattattaatgtttttaagcatcatcacttttaaattgtggattaaccaaatttttgaggcaagagaatgtagatctaattgatcaaaaccaaatgattaataacttatgtataagagaatgatagatctaattgatttttttttgtataattagaattatttaaatgtatcttacatatcgatcactaatggattaggaatatatggacaaaagcataagaggagagtgcttcaagtaccgagccccttacacgcgtggatcttgtgacaattataaacacgtcaagtccgcagtatgcaaaaaagtttgccaacgtagaaaggattttgatggaagatgtgaactttttcaggacgaaagaggattgcaactaggttgcttatgtttttcttcggattgtaagtgacaattgcaaacttcaaatcctatgtgcaacaatattgtttattattaccaaccatcaataatatgtcattaggactttgtggtatacatatcatatgatatatccatcatatgctatcttcaaatcttatgtataagaatatttaattttttcgttattagtgtaacgcccgtgaaccggaaaatcggttaggatttgtttttaaatcatccggtttaattggttgggttaattggaaaccctagagtgtgcctataaaagaatgaaactcgaaattagggctttagttagccacttttcgttttataaaggagaaaaagagagaaaatg

SEQ ID NO: 30427 - DNA, 3003 bp, Unknown; identical to SEQ ID NO: 25169
  misc_feature (1)..( 3003): 2750-1469P.txt file - cDNA_ID_3031202; gDNA_ID_2214641; Annot_ID_188313

SEQ ID NO: 30428 - DNA, 3000 bp, Unknown; identical to SEQ ID NO: 26458
  misc_feature (1)..( 3000): 2750-1469P.txt file - cDNA_ID_3031210; gDNA_ID_2214641; Annot_ID_188310

SEQ ID NO: 30429 - DNA, 3003 bp, Unknown; identical to SEQ ID NO: 26463
  misc_feature (1)..( 3003): 2750-1469P.txt file - cDNA_ID_3031222; gDNA_ID_2214642; Annot_ID_188350

SEQ ID NO: 30430 - DNA, 3000 bp, Unknown
  misc_feature (1)..( 3000): 2750-1469P.txt file - cDNA_ID_3031250; gDNA_ID_2214642; Annot_ID_188372
gctattatattgctaatacatctttagctagcacatgaggttaaagacacaaacttaaagtcacatatttgaagatctgtacatacttcaagacatatattcaagtccaaaataagcattcttctaatggttggtccccataaactaccaaaacatttgttacatatcgctttctaattcgtcattgcaaaagtttttgtaccccaaaaattaatgcacaacggccaaacgaaaagaagttatctattggaaaaatatgtatgcaatatagtctataaatactgtccagtgtccacaaatattattatcaaagacctgtacagttcatatataaatatatatatatatatatatgaaaatattatatacctaacgttctataaagttttcggctatgaaaatattttcgtcgacggggtaaataatatgatttaaatgcccttttcgtacattttatatgtctatgaccacatattacttgcttcttttttttctttttcttaaaacacatattacttgctaaaatgcataatatgtgaatgtatatttgttaaatatcttaaaatccgcactgtgatcatgaattcatgataataaataaataaaaagatttcacgtggacttgtttccggaaccttcacgtcatcatcctaatgagagtcacgagtgtcacaagatctttaaaacttctattcttatcgattttggccgaatattactacaaaaatcaacattgaaacaagtagcaaccatattataattattctaccattgtcgttacacttggttaaaagacaaagaagaaaatcccaaagctaagataagaagttaaaaagcacaaacccaataatatattgacacgtcagtagtagtaaaatggatagttaacgtgtcaatacattattggtgacgtggcataattcgtagttaaaaaaggttacttcgagcggtggtagtggttacggtgtgacgcacgtgagccatgacggtggacgagtggagactcttggacgtctccacggcgtttggcagcggagaaaactccgtcccagatttcggagaaagcgcggatgatgatgccgtggtggtatggctcgttaagggagaggaagcagtggagaagctctctgagatcgtttttggagtaaatctcgttctcgagaatcatctgaagcatggactgtcggaaatctaggtaaggatcgtctgagtctttctcgacggcgacagcggcggcggagggtgttgccgaggaggaagaggtgtcagagaaccagtgggaggtggagggaacggcggaggaagaggaggccgtggtgggggtggaggagtggcagtggccgtaattagaggagtagaggcggggctttttgggggaagggttgaaaaaagaagacaagcttgggaacttacagttgccacagccgatgtctacgacagagactgccttaaggaccatcttcttcttcttgcttttgcctgtcgtcattgctttgctctttctttgtctctctgtctcttactccaagatgaaatagattttagagagagagtgtgtgagggagagtgagtctacttggattggtattaaagggtgcatgtggtgactgaggtggattaatgagaagtaaactcttagcaacaatatttaatttgatgttcaatgacagtttataatttcttttaaatttttgtgagcttttaaaaatatgttagtaaatgtctacattcatgagcattaatgtgacatatacttactccactgatctatgaaaattatgagatgtgaatataggattattatttaagttgactataatgaactataatggtatttcatatataattaagccttcccattacgatttaggttctagttggacgatctatatttttctttttgtcaaatctaaccttttttttcttcaaaaagtcagatgatctttagtatgtcatttgcattcaatagttatactatacggtcgttaattcatttcatacacaattattttaaactacgttttaaattttaattcgaatatattatttttttaggatttacacatggtgttaacaaatattacaagagaagttgtagaagtactcaataagagtttgttttacatggatttgtgttgggccttcatgagctttgtacagcgcctttacaacactcaaataaattgtcactcaagggatataaacccaaaggccgtagctcctccaacacaaatccagaccactctttgtttccagtattactattattcctctaagtacattagaaaggtgtataaactttgttttacaacatataatagaaaaataaacattactgttaaacaatacaaaactttacagaaaacgtacagtatgtttaattattgatagattaatatttagaggccgatgaaaggtggaagtttttttatgggaacctggtagacatagaatgttgtaataatattgtccatcaatctgattttcgatttgagattacctagtgtaaaatataagtaacataagtaacaactcacttatgatcactgcactattaagtacttcttcctcaattccttattactccaaattctacaaaaaaaagtttgttgcaaaaagatacaaattttaatttttctatacaaattttaagtgtggaaattgttaatcacaaaaaataatacatttaggatcaatttttttcatgtgtgaaaaacttagaatttggattaataaggaacggaattattttgagtttatgtttgtttggaaaaaaaaaagactaggtttgcttcaaattatccattgaataaaggatgtttagatgagattttaatggatttcaaaagatattctagtagtttatagaatttcgtatttagtattttttttgaaggacagcagaagaatatatatttattagtgtaaaatcagtcaaacttaattaatttgattcttcaaggactttttttgtaaattcatatgaagcgtcgaacaatg

SEQ ID NO: 30431 - DNA, 3003 bp, Unknown
  misc_feature (1)..( 3003): 2750-1469P.txt file - cDNA_ID_3031258; gDNA_ID_2214642; Annot_ID_188370
tctctttatttccacatttagtccttatttaaataactaactaattaaaattagtgcactattatgttagcagatttcggtttactagtatttagtattatatgctaagtcttttctatgttttttgcaatgcatttcaccattagctaaaaaagggctatacaaggtttttgtgtgatatgtatagaagtaggaactatatatacagctcatatatacataaaacgtatgtccatagtaataacgagcatatatgtataattaagtatcatatcatatcatatctattaaggttgaaatttagtaatttactttctcaatgtaacagaagcccaccatgcttaatgttgtgataaataatatgaataaatcaatgaactcctctaattaacaatttaacatgtatataataaaagtctatagaataaattgtacttgttatttagcagaaataaaaataaactgtacttgtttggtcactagtaacacacataaatgtgaaaggtggagagaaacatcgatttggtgtatggaggaggaagcgtggggctaatgggtctcatttctcaagctgttcatgatggtggtcgtcatgttcttgggtatctatctatctctatacattttttattattaaaaattattaaacaataaacaaactagaggtgttaatttatctatacattcaaagcgacaatgcatcattctttttttgttcttcccatgttcttgtcctgtctttcaaatgagtaacattatcataaatagcaattggactgcttcaaaatatatacttgtaaatgaataagataaaatacttttatcaaatatttcttggaaaatcaatatttgaaacaatgctctggactcgcttttcaatttgttagtttctttgccaaaatctaaggcctaaggggaacaaggcagctgtctttagttctacttaaacatagactttagtttcgaaagaaaggataagaatctttgaccattacaaattaagatgactcgaaattattgattccatatactatttataagtgataattatttacattagatgttgatattatgcgcaggatcattccgaagtctctagcaccaagagaggtatttacaaatctaccatacattctaactagcagtgtgaagagcttaacaaatgtatagtttattctgtatcgtccaaatatatattcagtaaaatatatgtgaattgaaacattttaattatgatgaatgtggggtttagataaccggtgaatcaataggagaagttataacagtatcgactatgcaccaaaggaaggctgaaatgggtcgccaagcggatgccttcatcgcacttcctggtttgtttgtttttattattctttttcaatctatgtattttgtaaagaataaaaaagatgtctatatatgatcatgaaggttaataaaattaatttgtttggtgttattggacaaacaaaataggtggatatgggacatttgaagagttgttggaagtcatcacctggtctcagcttgggattcacactaaaccggtaattaattaaattcgttggtgaaccccaaaaaaaaaaatatcgtttagatatgacttatgagtacacatacgttgagactcgagtcagtaaaaatacggttatctcggcaaaccattaaaaaaaataaaaaatagagatgttgtcatatactatgtattttatggagaaatagagattttcctgatgaacttacacaaataagaagaagcaaatttctttgttggctatatatgtgggcatgtggcatgggttgaagtctatattcacatggaataatgtcttaactcttacctcttgacaacaacaacaacaaaaaaatgtcttaactcttacctaagattttgtcccaaaaaaaaacactcctacctaagatcaaaaaaataaagagaatcatagttaaggttgtgaaaactactctaaaatcatatcgtacactaattaatgcatataaaaaagattagattaaaacatgtaatatacacacacgaagactttgtatacataatacatggtcaaaaaaatgcgaaacctgagaatatgaattaagtatataacataatgcgaagttaaaaaatgcaggtgggactattgaacgtggatggattctacgattcactattgacgtttatagataaggcagtggacgaaggcttcgtctcctccaccgctcgccgtatcattgtctcggctccaaacgctcctcaattacttcaacttcttgaggtttttttatttgcctttcattactttttgattattctatttaatactatagactaaatgaacgaatcccaaaataggataattaaattaatttgtaatcgcaggagtatgttccaaaacacgacgattttgtatccaaaatggtgtgggacaataccacggatgctttcactttggaaggcgactcgttttagatatagttcatttgtatcttagtctacttttattttattattaaaaatctcgttttttattggccatttcaaatttttgatttttgtataccatgtattgagcttatataacaatggaacttgccaaaatcaaattacttacaagccacatgattacataatggataaaaaaataacacaaaaccaagtccgtaaagtatcgacaactaattataagctaagaaaaaaccaatcattttccaagcattgagacttccattcttaaaataagaatatgaggcccaatgggcttggcaagaaagttaaacaaaaaaaagaagaagacaattttacaattttgtcaagttttcaattgaaataaaccggttaaatcccaatttaaaccggatcaatcaagatatggtaatccccttctccttctccaaaaatcacaactctgttccaagtcttatcctttcatcatcatcatcacttaccttcttcacagagagagagcttcatcatcatatgtaatgtgagatgtctcttgaacaatg

SEQ ID NO: 30432 - DNA, 3000 bp, Unknown; identical to SEQ ID NO: 13650
  misc_feature (1)..( 3000): 2750-1469P.txt file - cDNA_ID_3031275; gDNA_ID_2214642; Annot_ID_188361

SEQ ID NO: 30433 - DNA, 3003 bp, Unknown
  misc_feature (1)..( 3003): 2750-1469P.txt file - cDNA_ID_3031279; gDNA_ID_2214642; Annot_ID_188360
gagacaaaaacaatcgttttcaagtgttttttttcttcttgatttatatctcttaatcaacgttttatatcttttcttaaggtcctcataaaagtctttttctcatatcatcatatgtattggctaacggtttacccaataagacaaatacgctgttaaatatctggttttgtttaacaaaaaaaaaattgctaataaataaaccatatgattgagaaagattgtcagactgactatcaaaaacgcctaattgattcgatcccattatcttaagttccaacttgtcctcaaactcttttttttttctttgacgtctcaatatttaaaatgatctctcaaagttcaatacaagccaagaaacatatttgccaatattcaaaacgactttaattactctttcttggtacgtatgtatagataaactcgttcacattgcttaaagaaaaactaatccaacaaaattgtgaaaaattcatccttaacctcctttctcttacaaatcttcggcttcgaagagtgtatatacagtgatcagttagtgaccaaaaataacaaatttacaaggaattaaaagaagaattaataacgagtttaagccggagattagtcaagatttcgatttcttcggttataaaataaacaaatcactaggacattcttgtggcggccacggaggaggctaaagggacaacctcggcgaggggagtagacagaggagttggaagcggcgaagtccgacacacaggacacgtaggattgagtctaagccacgtgtcgatacatttaaggtggaagagatggttgcaatctggtagctgccgcagcagatgttttcccttgtagtctcctaaacaaatggcacaacacgacgccgttgttggtccctttgcttccgagtagagaatctttggatagctttgaatggtgtcctcgtcaagaccggggacaacgtcgatgatgacatggtggtgatggtgatggatacgtgttgaatcttggttggtttgtgaaggtgaagaagagagctggttacgtgtgcaatagtatgaggtgagggtgatggtggtgatgaggaggaggaccccgatggagacaccgattccgtatcgaaatcctcctatgtcgtccgtgccgaggaggccgttgtagtccggcatctcggacggtggcggtggttggaaattgttcatggcgggtttggtttgatggttttgtttaatgggtttgggaggaggaagaggagaaataatggagaggtttttggtcagcgatttgatataagacaatgtaaattgaagcatcttggggttatcaaaagtcaacgctaagagagagagagagacaaagggaggaaatgcatgtgaatgaggataagaaagcttgtcaaagcaaagcaagaattgtgtgacttgtggatggttaaaaaaatattcaatgtataaattttctaatattgtattggtaatactgtaatagtataacgcatatataaatatattgacccattaattcgttgtttatttcaaacataaaacacttagttgcacaattgaattggatacagggctaatgaatttaacgtgtgacatgtattaagatttgatttaggaatgtagggaggggccagtggctaagattagagaaggtttacgctgaattagtttgaagtcaacgttgtacttatatactaatcttgttgtttatgtacgtttagttatctcctttattcaggcttatttaagtccaatcatgtcacctaagcaacgtttagtttccttcacttgcttttaaagtcgcagtgttatcttattttagtattagaatatttaaaactttgaaatctctccatattagaagattaatataaagttttgtttttctcctaaaagtggcaagacaataaaataaaatataattgtaggtaaataatttgtatatactaggaaatccaaatttaaccaattgagtcgtgggcattaacatttgtattacataaaattatattttggcaaactaccataggataaaaatcattcacttaacggccaagttactaacacaaggcatctttgataatggaaaacaatctgttggacagttgttattaatgaagaaaatgcgtcattgcatgctcgcatgatgtatattttaatatacactagctatgatagtatataaacagatatacatgtaattaagaatggagataaatgaacgtatattatccaggggcggattcatttggtgaagaatgaatgtattcagtgaattttaattgatattcgaatacaccattgttattgaacacttaattattgccgccgctcttccaatttttcaattctttttttccccaatcagtagagtaactatgggcttttaaaacccatagctccggattcccaatcatatattctatagtctatgtcatctaaaacaatatgaatttagataaacaatttatgaccttcaagccatatatttgggccggatactcaaaacatatgaaattacactcaaacactaattgagctacttaggccaaatatataaaggaaacacttactactaggcataaaaagtttggaagaaataataagagagaaaaaaatgttataatcctgacattgtttttttattgttaactcactcttggaataagttgtccaagtctcatagttgactcagtttggtggtgtcacaaattagttccatcattactaatttgctatcagtttggtgatgtatcaaatactgttgatctagtaatttcacaaaaagcgcatatcttccggctaatgatattagatttactcatatgtgtaatgtgtatgtatggttgaaagttgaagctaaattaggtttaagtcactcatatcatatgtgtgtgttatcttgtatagtgtaatacaaaattcaatacaaaattttccaataagcaaaaatagtcgtcagtgcgagttcaactttaaactgtttcaaactttatattcattacgaatg

SEQ ID NO: 30434 - DNA, 3003 bp, Unknown
  misc_feature (1)..( 3003): 2750-1469P.txt file - cDNA_ID_3031294; gDNA_ID_2214642; Annot_ID_188354
tcgaacctcctactaaggaaagaaagaaaaagaaaaagaaagtgagctttgcagaagatatggtggagccgtcagggaacaacgaagagtatcgccggagttttcgcaaatcatcaaagttggaggatgaaagatgaagtcaacattcaacacatgaatttttctgtgtatttgttttccttatttggtaaatattaagtgtacaccgctcttcacaaaattaggagctagaccggaccacataccccattccatgtctttttttttttattatgccaagttgtcaatggacgtagatgtagatgtgttgttgatgttctcattcgtatctcgagtagcgtataattagtaccagccaaaattggtacactagcgtattaattagaaccagccaaaagaaagattcaagatgacgtagtacttgggcttttggtataaagcccaggcagatttggagtttacatttttggggagaacatatatttagcttcttttttgtttttttctccaacaacatgcattggttaaaatatggattatgacttacaacgatagtaatacaaatcctggtcgattaacaatctaatagtcgatcaatcatcactgctagaaacagtgccgcctaacagtacccctgaaaccataaatgggtttctagttaggtaaacaatataaattagtaactacaacataccaatgtaaggacgtgaatttatatttgtcctatcaatctttaattttataagaatgaattagtatgaatcaatggtaaattaattgcagggatactttgattaataatgtcatattacaagatcttcataatatctcgaatggccatgcatctcgcatctaccctaaaagtttatatacaatgcatgctttttctcaattattgtcaaatttatattctttctctaatagaaaaaaaccttttaaatcaccaattgacttttcttttcgaaataatggaatcatatatattgacacctaataaattaaaatgattaagaaaaacttaatagtgaagaattccgtttctgttacgagtgaggaggagctctatggccaaatttaatatcaagaaattgaaaatattaaaatgaataccaataaatgtttttcttctctatataatgttggtgggactgactgggaacggagcttcgaatcaaagaagaaagccaactaccaaagacagtgtcggttcgacggcgatggcaaatctaacggcaggagaaacgtcgccgtttcagatcatttattaacgtcgaaaacgagttttattaaaaaaattattttatttgatccaaaacgagatttatttttatattatcaaatcatacgttacgactttttacgcgctttttcaccacacgtaccattagcaaatcatacgttatgacttttgcgtaaaaggtaaaaacttgttttacatctgtctcacaaaacttgtaacttgtatattcattttattgatcaagtagatgtagatccccatcacaagatgtgtgttttattcattatgacgacatatttatgtgtgatatataggataaaaagataaaattagatttatgttggatgtatttgtcttaagtcttttaaacaaagattcttgaaaaatgacacaatgttagatcaaaagttttaatcgatacatttagactaaagacatcttaccttccttcactggttttcttacaatgatttcaatatgtagtaaaataaaatgtgttgtttattgctatatgagactcatgggtctagaaagtataaactataagtcatttggataggggtttctctataatttcacccacgaaaatggattacaatgtaacttcatttcataaacacttttaacaatgctataacattcgactatgtttatcaccgaagattcacttattaggctttcttctagtacatccagagaaaacttcgcatgtgttcgactggagcaatttaaaaatgaatgattttaagctaagtaaatgatttttagtatcttgagaatatggacaaacaaacaaaaagtttgtaaagaatgacaaagaggaaacccatgaaaaaaagatacaatatatggaagctcacagacgatgacggcatgagagttattatgacatacaaaccaatcgataaatctttaacaatttactgaaatatttgactaataatcttttggttttggaataatgaaccgatcgaccgtcatataaaatataaatgattggatccacgtacgttggtggccgagcctctgaaaacgaatttgatttatctattttgctaactaatcacctaacgtagtttttgtgtctcaatggttgtacaaaagataaagtctcaagaatttattaacaaaagaagtggccacgaagaatggaattttgttgtatcaatgaagcataagtagtaccatagtattttaaaattcgaaatgcaaatcaaatttcaacgtgacaacatatgttgtataatagttaatcatagtaaatagcacacattgcagctaataattggatttacaattgtttgagtcgtacgttttgatctgttgtttacaagaaaaaatacaaagatggaaagttctaacttcaagtgaagttcagatatcgaccgagtcagaacacgacacgaggctcgaagacagaggcatagtgctgagttgttcaacagaagcaagtaaaaaccttttgtctgagagagaggctccgagttaggcataagccaaacaacttgacacgacacataacctttgcttctcgtgtagacccaactttttacccttaccaaaaatataaaataaaatatgcaaaaaacacacccactcaaaaattaaaattttaatgaaagaaagaagaaacttcacatcagcatcagaatctctctttctctctctctccttcttcacaagcaaaaaaacaccaaaccatttttctttcttcattgtgccgacacttctttcccctctctctctctctctccaccgccatg

SEQ ID NO: 30435 - DNA, 3003 bp, Unknown; identical to SEQ ID NO: 25173
  misc_feature (1)..( 3003): 2750-1469P.txt file - cDNA_ID_3031298; gDNA_ID_2214642; Annot_ID_188352

SEQ ID NO: 30436 - DNA, 3003 bp, Unknown; identical to SEQ ID NO: 25172
  misc_feature (1)..( 3003): 2750-1469P.txt file - cDNA_ID_3031302; gDNA_ID_2214642; Annot_ID_188349

SEQ ID NO: 30437 - DNA, 3003 bp, Unknown; identical to SEQ ID NO: 26464
  misc_feature (1)..( 3003): 2750-1469P.txt file - cDNA_ID_3031306; gDNA_ID_2214642; Annot_ID_188347

SEQ ID NO: 30438 - DNA, 3000 bp, Unknown; identical to SEQ ID NO: 13671
  misc_feature (1)..( 3000): 2750-1469P.txt file - cDNA_ID_3031333; gDNA_ID_2214643; Annot_ID_188415

SEQ ID NO: 30439 - DNA, 3003 bp, Unknown; identical to SEQ ID NO: 25183
  misc_feature (1)..( 3003): 2750-1469P.txt file - cDNA_ID_3031349; gDNA_ID_2214643; Annot_ID_188407

SEQ ID NO: 30440 - DNA, 3003 bp, Unknown; identical to SEQ ID NO: 26465
  misc_feature (1)..( 3003): 2750-1469P.txt file - cDNA_ID_3031367; gDNA_ID_2214643; Annot_ID_188402

SEQ ID NO: 30441 - DNA, 3003 bp, Unknown
  misc_feature (1)..( 3003): 2750-1469P.txt file - cDNA_ID_3031374; gDNA_ID_2214643; Annot_ID_188399
gtaataatttcggcaacatcactatcaccacacaaatccttacgattttgacctacttttctagatgggaagtaagaaaacttactcatattttctgtataaccaacactcaaaatcatacttgtcaacattgctaaactcggatcttcaaaatcaagctgtaagagcatcttcattagaagtatctcaatgagatacccaacaaaaaaaaaaaaattttaaaaaaaagtatgagagaagggagaaaaagtaggagagaaggagagttgagtttctcggaggagaaactttgagaaactattctcatccaatttggacaggtgtcatcatactattagttcaactattaaataataattaatatatttgttttgattaaattattaatatatttttttttgagaaactttctttatttttactgatggagatggtctaaacatcttgtctcaccgccatggtatgaaccatctgctgcccaatctcctccgacatgcaatcgaaagaaaagcgtcctaacaaatacaattatcaaaaactctctaaaaatctgataaatttatgcgtctgaaaacaatttaaaaaattgagagaacaatcttataatagttaccttaaaaagctgagagaaattttcctttaataatcttttcctattcgtttaaattttattttttcagacttttggaaattttatgttctgttgtttaatataataataaaatttacatataaaatgctaataataaattttttgcctttttgttttttgaaattttattttattgaaaactattattttgtatattctaataattatattatacatttttactatttccatatcttgttgaattgaagagatcacttaagactttcatcaccttctaattattattataactatttgtataataataattactatattgagtttataataattgacacgtcataatgtactggatcacgtgcatcgcatgttttagacgagagtatcatatggcaactcgtaagaagaaaagctgaaaccagatcttccttcgttaactgttttcagctccagcttctgaaacaaaatatcatcagggttttatctcaaacaacaacagattatatagtttgtagatacgaggaagatcttggactaacctgctgtttggatcataatagaaaccgcgcgctgatggatccgtcgctgcaggagaagcatacgtagtaaaatctagctattgttagtccacaatctgtgccaacatttacaaagtattgctctttccatctcttgcaccaccacaaaaattatccggagtgaattatataggatatgtaagagtaaaggatcatcgatattgatacgaaagcgagagttataccataaatatataagggtaaatgttatgacctgacactcacagaatcaagaatcgtttcccgtattagaaattcaaagggaaacaacatgaagaaaaataagtaagagtttaaggtcttacaggagtgtctgccatgggaacgtttagagcttccatggtgccacaaagacagccatgttcaaggtcaattccctgtatctggacattaactctccaagcttcctccttgtgttaattagagacattttgcgtaccagaaaatgcatgcagcataaaaacatgtgtgttcctcatctttaggttcaatatgaacaaacaatctcttggagccaatgaatgttatacaatcccaactagatataaatgcacttgaattaagcatagatgtcaacatgaaaaagatatcaagccaatcaaagcagacaaggccaacttctactattagctattcttgtgatttcaagtattcataagtcagaacttgtcaagtctgagagaaatttcaccttttacatataaaaatccctaagacaatgtctttatagatatactcagattctgcttacacataaggttatgttcataaaaagagtgtgcatacataaccacagatgcacaagcataactaataaagttctctctagtcctaaccaatattcccaagacctctatggtcagacacttataaaattcaatttgttaaaccaaataaacagaatcgaaaaccacatctcatcatacccggttcggttttcttaaccgaatcaaattatatataaaacggattaggcttctccggttttctactgcgttttgtataaaaccctcacaaaaaccctttctccaaatccttcaacctctattatcgaacttgctatataacctttggacctgactttcctacttctctctaactccaggtttgtcttcctctcaagttgaagctgcggctttattagtttcctgttgacttatgttccttgaatccattcacatgagcttcttacgccgttttcattggtttacctattgacgttgacttgggtctaccatactttttcatgttacttgattgcatatttataaaacggtgctcctttttgtatagcattctagatgttgcttctgaaacaaagctcatctgctgttcttgtcgttgggaatacaaaaactccagtccttcacacttgtcgctccacctacagagttggaaccagaacgcactcgttcaagagtttgactatggcaaatttgcacaagcacttcttcgtctgggaaactgaatacggcttcatctgtgccttgtagctctcacgaggcttctcctatcaggtacctatgccccctgtattgagtataatggtgtcaaccattcttcttaagtattttctcgattcttgttattttcttggctattgtcagtttcatggacatgagaagttgcatagctgttgtagttaagattgcatcacaccaatataataaagaaactagctgtgtgcttccctgctcgtttctctgttactagacacgaagatttgaaaatagtaagactggttaaggtatttctaatgttcattttctttcctctttgcaagtgagaataacgagaataaacatgtccatg

SEQ ID NO: 30442 - DNA, 3000 bp, Unknown; identical to SEQ ID NO: 13666
  misc_feature (1)..( 3000): 2750-1469P.txt file - cDNA_ID_3031386; gDNA_ID_2214643; Annot_ID_188396

SEQ ID NO: 30443 - DNA, 2584 bp, Unknown; identical to SEQ ID NO: 13693
  misc_feature (1)..( 2584): 2750-1469P.txt file - cDNA_ID_3031419; gDNA_ID_2214644; Annot_ID_188465

SEQ ID NO: 30444 - DNA, 3000 bp, Unknown
  misc_feature (1)..( 3000): 2750-1469P.txt file - cDNA_ID_3031423; gDNA_ID_2214644; Annot_ID_188463
agtgttaaactaaaaaatcttacactcaagttagataagagcaacagaagaatatcgatataaacgatgaatataattttctcacgtaaaaataccaaaaaaaaaaaaaagtctcacgtattttaagaaggtaaacatgaaaactattttacaaaagagtcttaccaattttgtcttatttcagataaattaagaagaaaaaaaaagcaaaccgctcacataaccaaaaaaatggtaaaaaaaaataaagatcataagtgaattttaaacaacaagaagatccacacggagagacacaagcttgtcttcaggagtgttaatcagaatcaattgttttgaccaggtcgtcctgagctataaggtggtggtcttggtctccttcttaacactgctgttatcctcgccataaatcctgtttcttcaacctatataatgaaacataaatacgatgtttaatttattgcaaatttcatgacttctaacattaagtccaatataagtagtataacctttttagtttaagtgtgtttgaccaacaaaagaagaaagatcaaattttcaattagggtttaactaattcctagcttcctaaattaacttcttttttctccacgtttaattcctaaactatgtacttctgatgcatctttgattatataattattataagaacagattgtagtacatagagattagagagcttacagtttcagttcctgaatcttcttcttctactaaggatggtgatgatgatgatgaagatggtggtattgatgatgactcaagaccaagacacttcaatatggcttgaacaaatttgttacaaacagaacatggagagttgagaagagagtagtagtaatcttctttttcttcatcttctcttctacttcttctctcttcttctccattaacttccatgttttttgttttctttctcttcttaattcttcttcttcttcttcttctgctcaatgcattaagtgttgtgtctagtttgacctcacctgcttctctgcgttcttacacacacaccctaccttgcattaaatacccttttataaagaaaattaaaaaacaaaatgtattcaaatttttttaactaagactaaaacaactagggtgccaaatcaattaattaattaaatctcgtgaacaatcaaaataggtagataaaaatattgatgccgttcattgtaatctgaaccatttgcagatgaaacaaaaagaaaagaaaaaaaaaactataacaaaataacttcttttataaacagttaatttaattatatatttgggtgaaaaaatttaaagatcaaacgaaattttgtttcctattttaattcataaatgaaactgcggtatataggcggtgcagtctaaagatattgctgaatatatttaactagattaaattcatagttgggttgatctgaatgagatgtgttggcgaacgcatatagtttttgtttcttgctgttcataactttgcttatggaattttatttatgtctttctctatacctctttggaccagtgttccatttgcaatagagagtcactcgtgaaaaaaacaaataatgtgtgtgtatcaattattccctctcggccttatattttgtcttctttttgctaattatatactattgatttagatatttacttatattcatgacgtcttcttcttatattcttatttaatttgaagttagaaaattaacgttacaacttacaactattaaattattgttaattggttttataataagtatcgctcttgtctccattcacttgtcttttattgtccccagtaccaaactaccaaatacaattcatattcactaattaattagtttgatgcaaaggatgatgcaatgttaagaaaattgaaactctaccacattctaaaatgaagcaactctaccatatttaatttctttagacttggaatagtcacaatatgaatgcttaggtagttacggttagttaggagtatcacacagaattgaaaataccaaaccacaattttaatcaggtgattcggtactaatttttattaatgaataaaaacataaccgaaccaactcaaagcagatattaacctgaaaatgaactcaccaaaacaataatagaaagactcaaatcgagccggaaaccagattgagcaacgaactcatgggaatatcatatctatttatgtccagactattaatatacatacctatgacaaaatactatgcatgcaatgcaagactgaagtaaccatatttttttgggtaaaccattgataagctaaacttgaatatccatagtacttcatcgtactatgtatcaatagtatagtaagtttgacacaattacattcagtttgatttttatcatataaacctcccaacaatatttaaaaccgtatctatatataaatttatttgattaaatcagcctagaagtttatagttcagtgcagataaattcaaattttgatatatatcttaattgaattaaccgtcttttggttaaattattgttacaagcttacaaaatccactatacaccaagttggacttagatatcatatatgagattaacagccgattacacttgtacattgacctgacctatacaaacgactacaactttatgtatatatatttctctatttttggaaactcgtttgatttgttttcacatgtcgtgaaatttacagctttgtttcctactctcaaaaatagagcatagagctggctgatcacacttcaaattaaaaccaacaacgtatataaactataacccatgtgaacacaaaaatttagaccttttttcaaaaccattccaatttctaacaaaaacaaaattagaaatcctaaaatctgcaaggtgtatggaaggcaaaaaaggctaacaggattaaaaacagtttacattagttattctctttaaaatagaaagaagattttcgataaaaacgtcgtcgtatcttcgtcgacgtctccgtctttaatg

SEQ ID NO: 30445 - DNA, 3003 bp, Unknown; identical to SEQ ID NO: 21325
  misc_feature (1)..( 3003): 2750-1469P.txt file - cDNA_ID_3031427; gDNA_ID_2214644; Annot_ID_188461

SEQ ID NO: 30446 - DNA, 3003 bp, Unknown; identical to SEQ ID NO: 26468
  misc_feature (1)..( 3003): 2750-1469P.txt file - cDNA_ID_3031429; gDNA_ID_2214644; Annot_ID_188459

SEQ ID NO: 30447 - DNA, 3003 bp, Unknown; identical to SEQ ID NO: 26470
  misc_feature (1)..( 3003): 2750-1469P.txt file - cDNA_ID_3031460; gDNA_ID_2214644; Annot_ID_188446

SEQ ID NO: 30448 - DNA, 3003 bp, Unknown; identical to SEQ ID NO: 25189
  misc_feature (1)..( 3003): 2750-1469P.txt file - cDNA_ID_3031464; gDNA_ID_2214644; Annot_ID_188443

SEQ ID NO: 30449 - DNA, 3000 bp, Unknown; identical to SEQ ID NO: 13707
  misc_feature (1)..( 3000): 2750-1469P.txt file - cDNA_ID_3031490; gDNA_ID_2214645; Annot_ID_188487

SEQ ID NO: 30450 - DNA, 3003 bp, Unknown
  misc_feature (1)..( 3003): 2750-1469P.txt file - cDNA_ID_3031493; gDNA_ID_2214645; Annot_ID_188483
agacacgtgtacgtacgagatcgtgggatgggtcatggcgcgtggcaagcttgtggttcaactgcgttgctggaattttttttctttttctttttgtcgttgctggaattttgtttatccgtgacttatttgttttgaagctgtataattttgttttatgtgatgaaaattgaaattgcagcttcaaaatctctttcactaattacttaattaagtaaataatcatttatttaatagaaaatctcttgtaatttgtgattagtgaataaaaaagttaacagaacaactaaaatactaaaattaaatatcccttaaaattggaacaaataagaaagagtgcataaggaaaacaatttggttttatgcaatttaaattaaaacaaacaaaaacaacaagtaattggtaaatatgattggcacattcctcaaattgaagattctgttttagaggagagaacaaaaaaaaaacatatacactcaaaaatcttcataacaagatattattaaccaatcaaaatcattaccactaaaaaaaaaacacaattttagttgttaattagtaaccataatccagttcttctacctgttcattgagagatgctaactctatataagctgataatgtaggctaacacttctcatcatctcttagaacaagtattgataaacaacaattttttttttccatacaccttaaactcaataataagatggcaagcattgcttttgtgtttaaggttttatgtgtatctttcttgttcatatttgttgcaagtcgtcctactatccgaccaaaaacgtttaacgtccaacgtcatggttctaagccggacggaaaaactgataatgccaatgtatgtaaacgagaatttttctaattttttttttaccattaattagttatgagatgaaaatctatgcacattagcacaactataaacatatatgacaaatatacaaaccaaaaagataaatatatatttttaatttattgtattttaacatatatatatcattcttaacacatacaaaatcaggtattcacaagtatatggagtcgtgcatgcaaaagaaaaagtggaagtagtaaaatctatgtaccaaaaggaatattttacctcggtggtgtagagtttgtgggtccatgcaaaaatcctattgaattcgtcattgatggaactttattggctcctgcaaatcctagtgatattaagcaagatacatggatcaactttaggtacatcaacaatctttctatctccggttccggtacacttgacggccaaggaaaacaatcttggccactcaatgactgccacaaaaatctcaattgtcctaaactagctatggtaacatatcttaaactttttcacttatttacatttaaagcgtattacaaaacgtacatgtgatatttatacacaactttattagaatttttggtctttttcatttgagaaattaacaagtcttataataaacttgaatttttttatagactatgggatttgcattcgtgaacaactcaaatatcaaagacataacatcactcaacagcaaaatgggacatttcaacttcttctccgtccatcactttaatattaccggcgtcactataacagcttccggtgatagtcctaacaccgacggtatcaagatgggttcatgtagcaacatgcacatctccaacacaaacatcggtaccggagacgattgtattgccattctctctggaaccactaacctcgatatctctaatgttaaatgtggtcccggacatgggatcagtgttggaagtttagggaagaacaaagacgagaaagacgtgaaaaacttaacagtaagagacgtcattttcaacggtacaagtgatggtattcggatcaagacttgggaatcttcagcttcaaaaatcctcgtttcgaactttgtgtacgagaatattcagatgattgacgttggaaaaccaatcaacatcgatcagaagtattgtcctcatcctccttgtgaacatgagcaaaaggttaacattctattcaaaaaacaagcttcatcattctcttatttcatcaaaagaataagaacaaaaatataaaagacaacttgtgtttatttttcttcagggagagtctcacgttcaaatccaagatcttaagttaaaaaacatatatggaacgtcaaagaacaaagtggcaatgaatcttcaatgtagcaaaagctttccgtgcaagaatattgagctaattgacattaacataaaaagtaatggacttgaaaatagttcttccattgcagtttgcgaaaatgttgatggttctatgagcggtaaaatggttcctcaacattgtctgaattgatttgacgagccatcaaaataataacgatgtgttgtgtatatgatactttcatttatgaataaaccaaattatttgatgtataggataatgtttttttttataaccgaaattccaaattaaaacataaatatgtatataagctttcagataaaataaaaaattaacatccataatctacaagaaattgtattttctgaaaatcgaatagaaacacatgattaaacaattggacgaaagaatttctacataaatctctgaataaattcaataaatccggttcatctgaagaaactaaattgaaccatactctggttcggtttttaaatgggccgtttgagatttgagaaggcccatagttgataacattcaggcttcaaattgcaaatgatatacaaaaataatttatgcggcttattcgtaagaattactaagattaagggtacaattgaaatttcgattgaaccaacggcggatgtgaaatcaacaacagcgacgactgcagccgtgccgagcactcatctcttcttctctctcagtctcgctcgccatctccgtggagatcctcggacatggtcatgagatcgtaagagagaatcttcaaaaaattgaaattggaaatcgataagctaggagctaaggagaaatg

SEQ ID NO: 30451 - DNA, 3003 bp, Unknown; identical to SEQ ID NO: 30450
  misc_feature (1)..( 3003): 2750-1469P.txt file - cDNA_ID_3031493; gDNA_ID_1620849; Annot_ID_170295

SEQ ID NO: 30452 - DNA, 3000 bp, Unknown; identical to SEQ ID NO: 6143
  misc_feature (1)..( 3000): 2750-1469P.txt file - cDNA_ID_3031495; gDNA_ID_2214645; Annot_ID_188480

SEQ ID NO: 30453 - DNA, 3000 bp, Unknown
  misc_feature (1)..( 3000): 2750-1469P.txt file - cDNA_ID_3031499; gDNA_ID_2214645; Annot_ID_188478
gtttgctcctaaagatgaacatgaagctcagattcaatttgcgttagaacgaggaatacctgcaacactttctgttattggaacacaacagctcacgtttccgagcaatgcatttgatcttatacattgtgcacggtgcagagtccattgggatgctgatggtatttcttttgttccattctttttcctcttagcccatttgcttcaaggttccaatgatcattatggtttaatttgttaggtgggaaaccgttgttggagctcaatagggtacttaggccaggaggtttcttcatatggtctgcaacaccagtctatcgagataatgacagagatagcagaatttggaatggttcgcaacaatcatgttttttttatttgatcattcaacactgatgttgatctctatggttttaactgttacaattctgttttgcagaaatggtttctcttactaaatccatttgctggaaggtcgtgacaaagacggttgattcctctggaatcggacttgtgatctatcaaaagccaacatcagaatcctgttataataaacgcagcacacaagatccaccactttgtgataaaaaggaagcaaatggttcatggtaaaaaaactattacacaaaatgatgctttacattcacatataagtaatgtccactattttttgtaacatttccttctgattaattttaggtatgttcctctcgctaaatgcctttccaagttacctagtggaaatgtccagagttggcctgaactatggcctaaacggcttgtgagtgttaaaccgcaaagcatttcagttaaagcggaaacattgaagaaagatacagagaaatggtcagcaagtgtttctgatgtttacctcaaacatctagctgtaaactggtcgactgtgcggaatgtgatggacatgaatgctggttttggcgggtacatttacaatctctgaaactttaaccagaatccggtttatcccaaactgaaacttgacacaagtttttcttcttttcttctttttggtatagttttgctgctgcacttataaatctaccactctgggtgatgaatgttgtccctgtggataaacctgacactctctccgtcgtttatgatcgaggcttgatcggagtttaccatgattggtgtgagtccgtcaacacttaccctagaacatacgatctgttacattccagtttcctcctaggtgatctcacacaaaggtaaacaacagatctgagtttgtatatctatagagtttcagttctttagcagtagccagtaggcattcactgttttggttcggttcacggttagcttaaccaaagtcggagttgtcataccaaactcggtttgatattgcgaatagtgtggttaacctttaatatgtgttttttgggtcaatttcaggtgtgagattgtacaagtggtagctgagatagatcggatagtgagaccaggtggatatcttgtggtacaagacaacatggaaacaataatgaagcttgaatccatacttggttcgcttcattggtcaaccaaaatatacgaggaccggtttttggttggtcggaagggattttggcgtcccgctaaaccggagctcagatagacagaacgagagacataaacatactagcaaagtaaatttgtacactactatcaatgacgcaaccagattatatcacagcgtactatataacccattaagggggttttgttttgactttctgattttgttccataagaagaattgaacgaaaccgagtcactaaagactacataagatattaaagttaacgagaataattcttttgccaacaacatatattgttttgagcaaaacaaattgtttcttatatcttagattctcaaggttttgtccaaaaaaaaaaaaaaagattctcaaggatattttgtttttgtcacattggttcctataacaaaagaatatggaaatgttgacaaaataaaaatagtagaatgtgaattagaattaagataactaaaacatagaggggtttggttgatgacaagtgaccagaccacgaggatcccacatgggaagagaattggggacgaagaaagcaacagctaagcaaccttccactttgaaatagtctcacattacttaagatgacaatcattccttcaacctcaatcattcaaatatcatcacaccaaatctatcgtggctctcgttgaattttatttataaccgacacaaattgtaagaaataaccaagaaaatcaagaaggtggaaccattcgtccattccctacgccacaagtctttttcaacggtggatggctggctggctgtctaattgagccttttcttttgaaccccttttagttctgtaactacattttaccaggtataatagtatattagttaatattaagccgtattacacatttttttttttcacctaacgtttatatatatatataatattttttagttacagaaaatcctcaccactttaaattacgatgcaataagatcaatctaaatggataacttgtaaagaaaagaaaatgatacagtattcgtggttcggaataagtcaagtatgattcgaacatcgtacaatattggtatttgacaataatccttggagaaaaaacaaataaaaagtttctgcagaaaagtttaattttcataaaaatacaaaaagaaaaacgttgattggttgagaaaaatacgcacacttatttagttcttcttgaccaataaaataaaataaaatctcctaaaagtcaagtttcctcaatcgggcaaaacacggcggacgcgctttcttcaatcaaaaactcgtctgctaataagtctcttttcgtcttcagcttcttccgctttttctgattgcttctctgatctcttatctctaattctaatccatagtaaactcgatttcatcatcttctgctcacaacacttactgttgttgttgttgttgttattgttcttctcgattcactcgatcgatg

SEQ ID NO: 30454 - DNA, 3000 bp, Unknown; identical to SEQ ID NO: 6141
  misc_feature (1)..( 3000): 2750-1469P.txt file - cDNA_ID_3031503; gDNA_ID_2214645; Annot_ID_188477

SEQ ID NO: 30455 - DNA, 3003 bp, Unknown
  misc_feature (1)..( 3003): 2750-1469P.txt file - cDNA_ID_3031520; gDNA_ID_2214646; Annot_ID_188505
aaaatttagatataaaaaatcgacctacggtatactgcggataaaatattcaaaattttaaaatccacaatacatcgttacttaaaaaaatatatgttttcgtatctatacttcaaaaattgaaacctaaacaatagtaatcatgtactaaataatacagagattgatatctacatttaaaaatacaaattaatatgatatatcttcaattactctttaaaaaaataacattatatttttgtaaaaaatatagccatgcggtacaccgcgggttaaattctagtatagaacaaaaaaaaattcatagaaattcaaacgaagagtttattgacgtgacttagctacctctcgacgaggttgaaaaacatttactaataaggaaatgaatggacttttgaagaagaaatatgaagcatgtgaaaattttagaaggtagggcacatattgcatagacaaaatcataagagtatggaaagagacaccctatgaaagaacaaaacaaataaaacgagtgtttgcaaaaagatagaaagagtgatagctctctggaaaaagttgtgaagacaaaattttttatacaattgaaaagaatgtgagaaaaatatgagttgttaaaaagaaagtgtaacacccaaaattaaaagaaaatataggatcagattttgggataaattgatcattttgaaactgtctgatttcaggaagatttcttagaaactcgaaagtctggacaaaatctgtaaacaaagaaaaatcagaggactaaagtgcaaaaacgtgaaaaaggagagaaattcgagtttatcttttccgaaactgaagggaagtttttggcaattcaaaaattgaattatcttttaagaccagtatcaacatgcgactctgatttagctagctctattgagcaatctgtggcggccggcatcgccaacagatgtattctgtattctgttagtctgttagtggtattgaggtcggttaatgccgtggattgtacttccttatcaccttgataggggccagcattcctatagagtatattatgtaaatattctgttagtatatggtttgggtcaaccaatgctggggttgtaccattccgacatgcattgctggaaatctggtcgttctgttctgatgttaatattctgttctgctgatattattctgttatgctgatttgataatataatttggatagtataagctctgatgtgtttactttatttcaaattaattaaattgaaatttatgtctattagtacatacacgtgaatattattctgtacgggatcagaccgtgttggtacttgttcgtcgggtttgtagtctcactgggcaattttttgctcatataagttgtgattccgtgcagaggacattgaggaggtggagcgtgcaactgaggtttaaagtttttagttcaatcgtaaagcgagacttgatagaattttcttgatttaaataattttgttttcgacatttggagtttttatgaatttttaaacattaaacattattgaattttagtatttttattacattagttttagtaatactttcaaaattctaccgaattttggggtgttacagaaagtatagataagcttatgaatttatttgtgtatagtatcttattttaagaaaagatatactaactaatccagtgaatataaacgaaaatcaatagtgaatttgttgataccaaaatgagagagtcgtcaaaattcttcctcgtacaataatttatttcatgagatccaatcaaaatatcttacgtaaaaagacgtgatcatccaaactatcaaaacgtttacaacatttatcataatataagcaaaaaaaaatgttcttttgatgttgtaaaacctaaaagttgtattagagttatttgtagttatttattaaaattgaattatctgctacggtaattttataactcaagaaatttaaattattaacaataagtagacatattaaaacttctatctcaaaatattcagtaaatatttttaatcacactaaagtttattaaaagttctaaaaatagacccacgcgtagcgtgagttcatgacctattataggaaaaacttatacattaaaaacaaataaaaaaaaaagaaaacatgtatttattactcattagtgtttttatactataccgcaggtaaaagcatgagtatcatttcgaaacgcggttcactatatttatctatctaaaaatttgcttttttctttttcttttttttcaaaaaacgcaaagtactgttatttatcttgattagtgataaagtgccgtttttcaataaaaaaatttaaattccaccaattaaatgctaccaatcaatacattaatcattccttgttccaaggtatttatgaattatttgagactactaatttaaagtttcactctcgtaattgtaacaaattctagggaaaaaaaccccattcaagattcactagaaaatttcatcaatcttttcaaacacgacaatgtaattaggcttaattaccaatcaactcatcaaatatgaagggaatttaagactaattactaatcaatcatcaatttttagttttctgatataggaaaggagggctaagaagagtagacacgtggacagtggtgattataagaatgaatcaacggctgagatgaagttatcaaagatggttgggtttaaaggaagctgaagatcagaattggatttttttatttttttttattttagtcgtgaataattgttgaagttagttgttcttccctctttgaggtttctaggttttgagtaatatgattcatcctctgtgaagaacattgctcttgcaaggtggatctagtgattcccctgttttatgaacattggatcacattgttatctttttcatattaatcggaagtgtttttgggttgtttgatcgattgttgtggttgattaacagatcgtgatttgtctttatcaaaggtatcagagcttcgtttttcctcggaatcaatg

SEQ ID NO: 30456 - DNA, 1 bp, Unknown
  misc_feature (1)..( 1): 2750-1469P.txt file - cDNA_ID_3031588; gDNA_ID_2214647; Annot_ID_188558
g

SEQ ID NO: 30457 - DNA, 3000 bp, Unknown; identical to SEQ ID NO: 13739
  misc_feature (1)..( 3000): 2750-1469P.txt file - cDNA_ID_3031592; gDNA_ID_2214647; Annot_ID_188557

SEQ ID NO: 30458 - DNA, 3000 bp, Unknown
  misc_feature (1)..( 3000): 2750-1469P.txt file - cDNA_ID_3031600; gDNA_ID_2214647; Annot_ID_188553
ttaaaagccaaattgataacttgtcatttttatttgaatcccatcaatatgccatattatttttttctggcgatcagagaatattattgtttctgtgatctattttgccatcatcctttctaggtgtcagggtttgaaaatttgcaccgagaattatgttaatccaaggattattggtttcttccatttgcattattagttttctagctccttatatgatatgtcaatgactcaatgttacaaattgtcccaactgattttgtttctaagctcaaatattgtcacaacgtatttcattggatcctcctacgactggaatgctcataaggacataggtttggttatgtcttcgtttttttcaaatgagcttatgattataaaaactcaagattaggataattttctcaaaaaaatgcgtgtatatatatcattcttaagatacaagaaacattagttttgttaacagttaagatatagagtcggatttgattcttctaattgagtgttaacatgaagcctaagttgccattgaataaaatcacacatttccttcttcaacgccaagactctttcttttattttcttccaaatgaatcatcttcttgcagtgtatataatttgtgggatcaatgggtttcttaaaacccccttcccaagaaaagattactgaagattgaagaagatccaatagctggtggcccacttggacgtgaagattagcccaattttatttgtattaaccgactaatggtctttagtatacagtatatagctacgtttctcttaggtcttttgtgaattggttttgtctaggtcttacttaatctacaagttctgtttcttcgtctgatcggcaatcatgaatccaagtccaataacgattgatctcatcttggagatattgtcgagattgcctgcaaaatcagtccggaggtttcattgcgtgtcgaagcgatgggcatcaatttttggtagtccatatttcaaggagttgttcctgaccaggtcctcgactaagccgcgcctcttattcgccatcgcagagaaaggcaacaaagagaaagactgtgtgtggaggttcttctcgtcgccacagcttgagaatccatatgagaaatcctcatcgactcttgtagcaaccgctgaatttcatgtgagattctctccagacaatctactgatctgtcattattatgacctaaaatatttttcaattggttatgcctttggcttgatctatatctatggtaatcgaggccgggctagacctctaatatgtaaccccactacaggacggtatgccatcttacctaatcggtatacttacagaaaggcgtttagctttttcgggtttgacccaattgacaagcaatacaaggcattgtccatggtttatccatctggtcctggtcatagtagagttattacatttggagctggagatctgaagtggagaaggataaaatgttcattgcgacatgatattaagagtgaaggggtatgtatcaatggggttttgtattacttaggtgacacgtcggattggagtcgcgttaatggtaatcacgtaacgtctggttatatgatagtttgctttgatgttaggtctgaaaaattcacctttattgacgtaaaaaggttttgtcgattgataaactacaagggcaaattagctgtgatttattgggaggatgatgtcgacattcaagagctttattacaaaaagggtatagatgtcgaggaatatgtggagaataatgtcaacgctgatgccactaatgagttgtgtgtgtggattctagcggatgttgagaaacaggaatggtcgaaacatgcctacacttggaccgatgaaaagttcttccgtcgtttggtatccatcgctggagtgactgcttcgggtgaaatagtgttttcgatgcgcaagtgtaatcctaaacaaccgttttatgtgttttacttcaatcccgaaaggaacagtctccaacgtgttgaaattcaaggttttggtgaagccgttacgaaatcttgtgacgtttgcacctttgtaaaccacgtagaggatctcaatgtttacgatttaaaacaactcaagtcagtccatcctccattggtcgagccagaatattatgattcagattaagagtcagactgagaagggacaaggagaagaagactgacaagtgacaaggataaggagatagagacgagccaggtgaaagcaatgggcatgccattttatgctcttacttatgcgttttttttttaaatcaacattatctatgtttactgttttttttttctcttttgaacgagctttatatgtatccttcattttgtttggtctcaagaacaaggtgttgcagtttctcttagttctctgtcttaatctgagtatctattctttgaatttcagcatggtttcttctggatgagatctgtcctctgttctgtttcaatatcttgttgtgtttgtcggttgtgtgtgatgggactaattttcatgatgacactttggactaaatacttaaatgggatttgtacaaaatcgttcactcacttgaagaaaacattccttgaattctaccattcctggtttctattagtctcagtcttcatgtttaaagtatgcaacttcttgttagcttagttttgaaacttttggttctctgtaacaaagggtcttgtaagctgtctttgaaagagggaacattctcgttaacagtctttatgggtcttatgctttgttgcttctctaagttttttgtttgaacttgtgaatggcgaatagatgagatctgtcctctgttcttaacatcttattgattttgtcatttggtttaagaaatgggaccaataggcccaggaattaggtccattaaaagcccagtaataatggcgccaaaatcaagtgaagtccccgcctaattcatctcttctcactaaaaaagcgtcgaaacctctcactccgtctctcaatcaattctccgatcagccatg

SEQ ID NO: 30459 - DNA, 3000 bp, Unknown; identical to SEQ ID NO: 13736
  misc_feature (1)..( 3000): 2750-1469P.txt file - cDNA_ID_3031604; gDNA_ID_2214647; Annot_ID_188552

SEQ ID NO: 30460 - DNA, 3003 bp, Unknown
  misc_feature (1)..( 3003): 2750-1469P.txt file - cDNA_ID_3031619; gDNA_ID_2214647; Annot_ID_188547
gttttaaaaaatctcaaaacaaatttcgtcatattttatgattcgaaattttaagaatgaacatatattaaccaattggcaaaaaatgtgtgggttcaacgtcccgcaacgactaaaatattttgacaatgattcataaacatattataaataacatcaatattaataaaataaacagtttttttttgtggacgggtttggcaggacgttacttagtaacaatggtaaactataaaataatttatatatttttatatatattaattttagaaaatgaattgtcttcgcggtgtaccaatggttaaaatctagtggagtattaaaatcaaaacaactaacttctttagacttatggtggccaacaaagcaacaacgggaaagtggtctcctttcaactttttctttctcccccattttcatgaaatattaaaaatatctcaaaagagcataatacgacattaatttgcattaatcgtcaagttgcaattatgtgtctaatcatatttacaatgctacacaaataaatatattatagttatcaataaactctctaatttggcgtcttgtttctcccttaccatttgagaactcaatttttctccaagagaaaaacaagaattccaaggagagataattaagttatgggtatgtcaccattaacggtgaagaaacttggtttcatcttcatgattgtttcagcttctgctctttctgtctcctttgcaggtttcacttctctcacccactctcttctgttttgttgcagcttttctctatacttcatgtgcgcaagaaattctttagtccttgttagaaagaaatgatcacaattgtataatctttagtccttgttagaaagaaatgatcaatattgtagtttgtcgttgtgtaaagaaactactaaacaatgatgatcatgatttagttatactgtatgtacaattaagtaacctatttttcttatagatgtaacaaataaacttcttttgttatgcaggccgaccatcgatttttgttcataaaaaaataaatcttcgcgaagaggttagtctaactaacatatgaaggggaatgtgtttcatgtaactttgtgcataaataagcatacattttctaaatttgaatacataataaatcttttttgctttcaataaataattttggagctgaatttggttaaatgataatgtgactcagatggtggaaagaagcatgcatgagcatgagaggcttctaagaatgaacacaaaggattatgggaacaacagtccgtcacctagacttgagagacctcctttcaagcttatacccaattgatgacattagaattggttctaatccatccttaaataatatatacatatataggtagaattagtttcagtgactatatagttccatcgaaatttggagatgtaatataaataaaggtaagaagctagcttgagctatgctatactcttatatttggtgtgctgcatagattttggcattttgccatacatccatggcatcacaatcatgtgtctttgtttttggttttcaaatatatatttatgttgcatgcaatattatttatatgtatatatatatatatatatatatatatgagaatttgaattcttactattagacagagatagtctaacagtaaaaaatttgtgatttgagttctataacggttcgctaataatttctaatcaacctctagatctattattatgatattttctgagaaattccttaggcatgacgatttttaatctatatgaatttacatcgaattttattgtttttcttgttttagttaacaatttttctgtttagtttgatttcaacactaagaactttccgtgtgaacaaaagaactttgtgaatctgatccttaagtattataatgaactcttaatttgagggacttacttgaagtctaatttgatatatgtcaattaccaattaagaaagccttcccatttgtttgatacaacacaatcgaggtgacactagtatggccaaagagatagttcacgatagaaaatcaaaaatcaaactttgcctcaccaaagattgatgtagtagaaactaaaaacaccatgagaaactctcatgttagaaaatcaaaattcaaataataatcaaaataaatttatattcaagagttgtatatatatatatatatatactagagtcgtcggatgcatctaaaccatagtccttgattcatatatgtgacgttttcatctccacaaatgggtaattgtgttattacatagtttaaccaagacgacatcgtctatatacaaccatttagggcatgtgttgtccaaattatttttgctatgaatcatagcgtataacaatgtttgtaccaattttgtattattattcaagtcaaaacataaaaaaaatgtttgtttttggtcaatgacctttacgtaagtcacatacaaaataaaattgtaagaaagatgcatatagaatctttaaagcattctgaaatttgataaaagtagacattaataatgagagtggaataatataattatatgcttatatacatctttcttacaaattcattttgtctatgaccctttactaatttagataattacatactcttatcacctctctcttagttacagttaatgaattatgaacaaaaatatggtaatatgacattaatgtgtttaaccttcgaaagatatatcgatggcgcaagtaaaaaaaagagttgaaacgagtttttaaaagagagacaatttacatgagatatttttcgttttaattcttagaattgaaactgttagttactctcaattttgttcattaaacactctcattattgatttctcttatcagcactgatggtattagacctgtggcaccaatagcacctcttgaggggttttatgcaaatccaaaagttaaagatgtcaattggaattggaagtaattcaaagggcttttatgcaaaagtttgtttttctcataaaagtttaaatg

SEQ ID NO: 30461 - DNA, 3003 bp, Unknown
  misc_feature (1)..( 3003): 2750-1469P.txt file - cDNA_ID_3031633; gDNA_ID_2214647; Annot_ID_188542
ttgttttgaattatgattgagataaaggatatttacttctcaggtgatttaatcaaagcctctggagaagatctgtaggtacgtacaaatgtctgaacatgttatggttttgggtaaaggtaacaaaggaatcagcaagaattcttcagtcaatccatatgaatcagcttggttaggtcgttggactcagtcaggtagtgaagtgaagtttcatgatggtgagaccaattgctctaagcagttgataagacctgaagatgagaatcatggagtcgaggtcttgccgtttcctatgttcaaggtttctcaaaagagagagactactactactactactactaaaccgtctttccatgaagatgttggttcaagctcgagagctatggttaatagaatgccctggatgtatccgcaaggagagaacttcagttctagtaaccgtcttgacttcccaattcaagaaaagactactcaaaacttgctagagttgataagaccggtgaggatttacgcaacggttgattctgttaacttgcctaaagaagatagtcatcagttattgaaggggtctacagtttccatgaaactgaaagggaagatttttggtggatatcttgatctgtttcctaatcaagatcactcccacaatagaggaggagtaaggctgcagtctctagaaagctcaaaggatactcaagaagatggaccgagaaaaaatgaatcatcggcagagactaataccttagaaatggatagacttcagactatacatctttccggctccatttcttcgtcatcaactaaggtattgttcaatcgacatatctacatatctttactcaaaatgttgaaagttgtgattgtgaaagatgttgaaaattccgcagggaaaaggaataaaaggctactcagccattccaaggaccgaaatacctgacatgaatgaagaaccacctcttgttccggatagagagaattcagtagatggacatcagggagaaacaagcaactcggctactcaaagtatgaatgtggaacactttctgtccagagattgcaaacgtgtgcggttggaaccagaagtagaagccagcagtagatgggtcaagcgtctgaagacaagcccctcagattccagtgaaaccaagagcatgatgaagatgaaagaagcatcactgggagaaaaagagaacaataatctattccttgagatcttgaagtccggaatcaacaatctccaaccgagaaatcaagaacccgtcgtttcacagagcaatgatctgagacaaggaggagatgacattacacttctgcatccatggatccagaggtggtgcaagaagaaaactacatcaacagatcaaccaacagggcaagaagctagctttgagccagagagtcacaaggagttcgagaagaaacagtatccgagtattgcagccatggcattgatggggaaggctctgagcggtttaaacccatatggtcttagaaagaccaactctctcatggtttggaatgcaagggatttgaggtaggaaaacaaaaccatcatcctcatcttcccttgtttatcattacaacgtaaagtcaagaacatcaaacagaactagctagcaggcttgctacgatcaaatattttgacaggttctaccttatatgtcagtctgactattcttataatagtttcagtttatgtatgaataccttgtttgcatcataaatattcccttttaatcgttaccgcatcagtattttgatttgttactggccttacaaaaatgatagcataattcaaagtggtaagtaaatctgttctctcgaaaatcttgattcaagggaaaaagagtaacatttaacattaagtcaagcaagtagccctagtgttaatctgctgacttgagtgagtagaaaccatccttatcgtgcctttcaccatcaaatctcttatcgcctttctagcaagcgacccattgatctacgacagaaaccaatacaacattttacacatgatcaaattcttgagcacaataaaatttctctttcaataactcgataatcttgaacctatcccaacacattataaagagctaattcagtgaaaagagtggaggtagagagttagttagtttacccgaagacggtcagagagaatcgaaggagtgatcaatttgaacttaggagcttcagacataagcttgtcgtaagttgcttgatcgaacagaaccatgttgttcaccttctccttttgctttcctttgctccacttctgttgaaatcaagaaatgagaaacgtaaataaaacaaaacccaccagaaaccaaatcaaagaaacttactgatcaagtaaaaaaaaaagtgattgtgatttggtaaaggaccttctttttctgctttccgccaccggatttggcgggtttagaggatggtggtgggactttgtccttctttggtgcctggaatcagtcagagaaaccacacacgaaatctgtatgcgacgaataaaatcaaccatccgaaatacctaaaacctatataagccaaatatttttatttttattttggtaaggtttgttcgatttttttttggtagggtcttgttcaattttatgtagtaaaatatatttttaaattgtatattaactttatgttttattatattccaaactgggttataacttataattaaatgtaaaaatttaaatatttgtgaaatggagaaaagtaaaaatttatcatgacagacgtcttcatttcccttaatcttaatcttaacatagtaaaaatctctttcttcaatttatctatatataagattttactttagttatgttttaaaataataatatactcttaattgggttataaatgtgaaatctatatatttttaaaagggagcaaaatcaaatcttattgtgataaatatatatttcttcattatatatccttaacttttaattcttcagttttacatacagatctttacggtggaatttaacgatg

SEQ ID NO: 30462 - DNA, 3003 bp, Unknown; identical to SEQ ID NO: 25204
  misc_feature (1)..( 3003): 2750-1469P.txt file - cDNA_ID_3031637; gDNA_ID_2214647; Annot_ID_188540

SEQ ID NO: 30463 - DNA, 1919 bp, Unknown
  misc_feature (1)..( 1919): 2750-1469P.txt file - cDNA_ID_3031681; gDNA_ID_2214648; Annot_ID_188582
tgtagtagtactactacttggtttgcataatctgaatcaaagttttacaccaaaaaaaagaaaaaaatctggattaaagtaaaccccaattaattaatcatgcgtgggattgactcattttgacatcatagtatgtgtttagaaacattttttttagcaaatttctagtcatcaagagtaagtaacattagatggagcgtaaggaaaaaaaaaatacattaggattattatgattatggcattcggcccaaaatctcttagtattcaaaaaaaaaaaaaaaaaatttaaaackaataaatagctaaatagttacatgtagtrgkactactacttggtttgcataatctgaatcaaagttttacaccaaaaaaaagaaaaaaatctggattaaagtaaaccccaattaattaatcatgcgtgggattgactcattttgacatcatagtatgtgtttagaaacgttttttttagcaaatttctagtcatcaagagtaagtaacattagatggagcgtaaggaaaaaaaaaatacattaggattattatgattatggcattcggcccaaaatctcttagtattcaaaaaaaaaaaaaaaaaaatttaaaacgaataaatagctaaatagttacatgtagtagtactactacttggtttgcataatctgaatcaaagttttacaccaaaaaaaagaaaaacatctggattaaagtaaaccccaattaattaatcatgcgtgggattgactcattttgacatcatagtatgtgtttagaaacgttttttagcaaatttctaatcatcaagagtaagtaacattagatggagcgtaaggaaaaaaaaatacattaggattattatgattatggcattcggcccaaaatctcttagtattcaaaaaaaaaaaaaaaaaatttaaaacgaataaatagctaaatagttacatgtagtagtactactacttggtttgcataatctgaatcaaagttttacaccaaaaaaaaaaaaaacatctggattaaagtaaaccccaattaattaatcatgcgtgggattgactcattttgacatcatagtatgtgtttagaaacgttttttttagcaaatttctagtcatcaagagtaagtaacattagatggagcataaagaaaaaaaaaatacattaggattattatgattatggcattcggcccaaaatctcttagtattcaaaaaaaaaaaaaaaaattttaaacgaataaatggctaaatagttacatgtagtagtactactacttggtttgcataatctgaatcaaagttttacaccaaaaaaaaaaaaaacatctggattaaagtaaaccccaattaattaatcatgcgtgggattgactcattttgacatcatagtatgtatttagaaactttttttttaacaaatttctagtcataagagtaaggaacattagatgagcataaggaaaaaaaaaatacattaggacaaatgttaatttggaatctcttaaatttagatttttttaaaaatgtctatctgtttttcttctagataaaagtgtttcatattatccatatatattacttttaaagaaatctttttataaatagaatagtatttttgtagagtatatccggatatgttctgcgaaagaagaagaagctcacgagattagtcatgctgacatgggaactagctgtcttgagcaatcattcatctctcagatcttacacgtcctccaatcacagtttcacacgtcaccattcgcggcgccatgtatctgcttctctgatttctgataggtcccattttattctctcccacctactatataaactcccatttttcctttgtttttcttcaacccaaacaaaaaaacattttttctctataaatcctttattattgttataaaaactccgatg

SEQ ID NO: 30464 - DNA, 1919 bp, Unknown; identical to SEQ ID NO: 30463
  misc_feature (1)..( 1919): 2750-1469P.txt file - cDNA_ID_3031681; gDNA_ID_2214648; Annot_ID_136395

SEQ ID NO: 30465 - DNA, 3000 bp, Unknown; identical to SEQ ID NO: 13743
  misc_feature (1)..( 3000): 2750-1469P.txt file - cDNA_ID_3031708; gDNA_ID_2214648; Annot_ID_188578

SEQ ID NO: 30466 - DNA, 3000 bp, Unknown; identical to SEQ ID NO: 13746
  misc_feature (1)..( 3000): 2750-1469P.txt file - cDNA_ID_3031736; gDNA_ID_2214648; Annot_ID_188568

SEQ ID NO: 30467 - DNA, 3003 bp, Unknown; identical to SEQ ID NO: 25232
  misc_feature (1)..( 3003): 2750-1469P.txt file - cDNA_ID_3031744; gDNA_ID_2214648; Annot_ID_188566

SEQ ID NO: 30468 - DNA, 1673 bp, Unknown; identical to SEQ ID NO: 13756
  misc_feature (1)..( 1673): 2750-1469P.txt file - cDNA_ID_3031750; gDNA_ID_2214649; Annot_ID_188610

SEQ ID NO: 30469 - DNA, 3000 bp, Unknown
  misc_feature (1)..( 3000): 2750-1469P.txt file - cDNA_ID_3031762; gDNA_ID_2214649; Annot_ID_188607
gttaactaaagctgcagacatcgatatccgcccaatctcggtattgatgagcttgagctcagcaagaattcttgcaagaaccgggaatgcagtaacggagagtgcaacaccaaggaaaagtatataggtgccttgccctaagtggtcttctgatctatgcatagagaaagagaaggcagcaccaatgaggaatggtaaaaccataccaccaatagcgatggttagggctcgcttccctgtcttacgtacaaccataatgtccatctctacacccaccaagaataggaagtaaagtaaacccacattagccattgtttcaagtaccatcacacttctttgagggaaaatagtgtgtgcaaattttgtggagcgccctagcaccgatggtccaagaacaattccgccctataatttaagatcaaaatatacatttcaaaatgttagaaacctctcatccgaagtgatatgtattatttcactttttgccaattggttttgagttaaaaaaacttttccgccacgaatgaaaaaaattgagaatttatggttacttacaaggatctcggagatgacacgaggttggcgaaagggtttgaggataaagacgaagaaacgagtgacgacaacaaccaaagttagctgaagaacaaagagaggtagcgaaaagtcgagaggattatcgccttgccaaacaccattggtggtgatcatgcttggcgcataacatattatggaggcatccgtactaggttcttcacttgtcgccattttttcctaagaaaaaaacttgaaatgatcgaaaggaaatgttgtgtgttaatttgcaggaacatacatatgagagaaaggaaatggattcaaagtttggtggtattccgtatcatcctctctgctcaacgagtcaaaacaacatcattcatcatctctatttttggtcttcttttcttttattagaactattacaattattttcaggtgtttaacgtaactaaccgtttttttttaattcttgatatgtaaataaatattacattaacaataattatctcttaagaaaatgggttctacacttcttttgtttttttttacaaaattacaaaatataaatttccccaacacatatataaattcttggaaagaaactagtcacctattgtcttcaaattatacaattgaaaatgtttaattcctagcataagaaaaataacaatgagcgcaaaacatggagtaaagactttagttataccagtctccagtcagatataaaccaaacaaaattgaaaacataagagaagaaataaagtatgactatcataatttttaagattttataccaaaaaatcctataaattatccatttttgcaattttatcttttatttccaaaaaataagatataatcatatgatatcaaaaataatattgcattataattttttcactattttcgatgttgtcaagtttaaaaaatattaatatataagtgtgtgttaaattatagcccttgcaacgaaaagttcagctttattcaaaattttaaaaaccaagttatttgattgtataaacctttacatcttatattttaaaacaaagagagtaatttttaaaataactagagtcctgaaatttatgtactgtatatgacaagttcgtttatttttttgtgctgtttaatgttcaaaaataaataaatttaaaatctgttaatttataattgacgaggatgaagtataccacacaaacactggttaatacaaaagtatcgtagctctatcgttttccaaattagccacaaatatttctaattctaatctgctccatcatttaaaaatcttttagagtttatttcccttaacatttttgctttttcccattttttgtaattgtttatcatcatttccattttaacgacgaatttttagatgaaaacgtggctttattattgcttttgtagtgttttttttttgtttttcttgtttgggtcaaagattgcttttgtagtgtttagaatcctaaagacgtaacgccacatttatggttataaaaacacataattaggggatagttcaatcagtgccaaatgtcaatacatgtaaatttcttatgaaagaaaagtgattacaaaatacatcggtgaaagagaaaatgtcggtgaaagagaaaatgtcggtgccatgaacgggcaacaatgtgtaagttgttacaaaatacgtgatcaagatccaaaaaccatttcaagcaacatatcaatgtattcttttaatgagagtgatgagaaaaatattttgtaacttttatctataagatgttagttttttacgaggatataaagaagagatttaacagattttatctattgcttataaaacttccgtatagaaagcaaggttacttctattaatttttatcgaaattgtgtttaattttctttatttgtttcaaaggttgtttttgaatgttttttatatttcatgtaaatcgatttgccgaaaagaaaaaaaaagtgattttgagaattagccgtcggtaacttttattaatattaattgaattttttaaaaattataaattgatgaagaaatcacaagtatattacaaaatatgaaagtaaatatataaataatatcacaaaggaacacgtgactcttcatgtcttgggaaagttaaagagaagtgagaagaacaactgcatgtgaacctctctcactctccatccatctatatttggtataacaaaacaatggcccgtgaccaaactcaaaaatttcaactctcttcacttaaatccaatacaagttacagaaatctagctgtcttcttacttcttagtcttttgaaccatttatgaccaatccaatactaattcaaagtttcttataacaataacacatttagtacaagacatatataattggttttgttctattacttgtcctttttcttacgccactatagcattggaaaagaaagaaagagagagaacaaagcttcttcatcaatg

SEQ ID NO: 30470 - DNA, 3003 bp, Unknown; identical to SEQ ID NO: 25211
  misc_feature (1)..( 3003): 2750-1469P.txt file - cDNA_ID_3031773; gDNA_ID_2214649; Annot_ID_188600

SEQ ID NO: 30471 - DNA, 3003 bp, Unknown
  misc_feature (1)..( 3003): 2750-1469P.txt file - cDNA_ID_3031806; gDNA_ID_2214650; Annot_ID_188620
tcactacaaacgtacttaataacacttaataaagtatgtaattcatttgaatttggtattacttctttagtttcttcgatctgaaatatacatgatttgacactgatttttttttttttttttttttgataatatacattttcagttgttttaaaggaaattcaaatgtgtatttcacttgcactctcatcatcatttagctaggaggtttacaaaacagaagttcttgaccatgaaaactctcaccaaagtgtgttgggacaccgagaatcaaaaaaacttctcaattgttacattttgaaatagattttgctaatgtggccgatgatatgatcatggaacaaatggataattggttactaaaaactatagataatggattatgcacttatgcagtgtatcacctctgtttctaaaacagcaaaatatacaatactgaaatatgtaaagtattgggtaaaattgtcaacaaacatcttgagatatttcttccagaaaactgctacaaagattctaatcaccatcgacaagaacattaaactaatgtgattatgtgaacaaccattattcaaattatttagttcctatatcaatgaaaagaaagttcagaacgtcaatctcgtttgatacataattctaattttctttctcattgctttatttaagtaagatatcaacggctgtgattctctctgatgacatactgatccgtgcggattaaacccatgcaaaaaccacacgtgaatattccacattgtcacattgggatcttctaattactactagattcacatgtgcttatgctaattaacctcgcacacgttacactaaaatacgcctatcaaacttgttgggacgatgaccgttgtgacctcaatgaaattattttttcccatccaccaaatatgaaattaaaataatactgatactgattttacatgtagtactaattattagtatctatttacgcgtgaagtattggacttctctgacacgactgttaccaaaaatggagttaacggcgttaacattgctgttaactgcgtgtctgcttactagatatgttagtgggcccagtagagattttaacggttgttatgtgctgacgtggactcatctttcttaacgctgctaattaactccggcacaggtaacagtaaccagtacgacaccgtttttggggttgcattcattggcagcacagagccgcgtcgccaaacgttagcgttttaaaatccacccgctccacatattactcaccacgtgtctttatttaaaacccgcgtttccttcacgcgattctcatttaacggagccgtgactttttcaaaaattgtttaccgttggacaaatgtcttattgtcctcataatgtcagccttatttacggaaataccattggacggtggtcgtgaattttattaacaaagaagggtattttggagaattacatcagggacggcgtattggggcggctaaccccatccgactttatatgcactttatgggaaatttcaattaattaaaatatgtaaaaactataaaaatatgaattaaaaatttgaaaattcaatgatacgccttttatttttgactgtgaaagtcttaaaaaaaattgtttttaaaaaacccaaatgattcaccttttcttaaaatgtaccccgtttgtcttcgaggagagatctctggtccacaacttttttattagacaactcaaaaaaattatattcttttcttttctgttttgtattatgagtttttatttggtatttttgcactttatcccttctcaaagaaagctctacaaagcaaaacccaatttgaattaaacttcatatttaccataaatgattacaccatgaggcgatttttataccattttcaagttttgtgaaaatattagtgagtttgtaagttgtgattttatgggttttttttgttgaaaagaaattgtagtgttggtaagaatagagttgagctgacacagcacctgtgactatttgtcgggacacatgtgtaagaagcaaagcctctcatgctttcttgcttctctttgttttcctctcgtcgtcttttatatatccttcaattatcatttttatgtatatatctttttgctagaaatttaaacatatatatatatattaaactaaagaatctgtatctcctttttacattgaaaagaataaaaaattaattatggtattagcctaacagtaccgattatcaaatataaatgttgttttttttttcgtctgaaaataccaaaagcccgcatttatatttttattttgtcatcagatattatttaaaactcaaacgagctaaaattgcgggaaattacgagataccgtatttacattttacattctaatattctatagaaaggaaaattttgacaggtatttagattactgtttttgcaaaattaaaatctcctaataaaaaccaataatacaaatatcaccaaatatgatagaagacaacacaaatacactaaaaaaggaaacatattaggtaacatgatttattataattttgccatctaaaatatggtttactttaaatatgtagacttctggaccatataaaattaacataattttggaaactatatccaattatatcaatcaaatattaaaaaactatataaattttaattattatatactctaaatatctatacagctggacatataaaaatttaacaaaattttggaaactaatacccaattatatccatcaaatataaaaactaaatcaatttaaagatattaaaaattgttgagaattcgttaaaataatttaaaaaatcgaaatataaacgacccaaaaagacagatggaaaccatattcactctctcttcttcattagcctttcgtctccttcttctcttctctatctctctttagcttctctacgcaagcttattatctctttctcttaaagctttttctatatacaaacagaagcgtttgatactgtaaaaaagatttagaaatg

SEQ ID NO: 30472 - DNA, 3003 bp, Unknown; identical to SEQ ID NO: 30471
  misc_feature (1)..( 3003): 2750-1469P.txt file - cDNA_ID_3031806; gDNA_ID_2214650; Annot_ID_136412

SEQ ID NO: 30473 - DNA, 2054 bp, Unknown; identical to SEQ ID NO: 13770
  misc_feature (1)..( 2054): 2750-1469P.txt file - cDNA_ID_3031814; gDNA_ID_2214650; Annot_ID_188628

SEQ ID NO: 30474 - DNA, 3000 bp, Unknown; identical to SEQ ID NO: 13769
  misc_feature (1)..( 3000): 2750-1469P.txt file - cDNA_ID_3031825; gDNA_ID_2214650; Annot_ID_188623

SEQ ID NO: 30475 - DNA, 3000 bp, Unknown; identical to SEQ ID NO: 13775
  misc_feature (1)..( 3000): 2750-1469P.txt file - cDNA_ID_3031838; gDNA_ID_2214650; Annot_ID_188617

SEQ ID NO: 30476 - DNA, 3000 bp, Unknown; identical to SEQ ID NO: 13765
  misc_feature (1)..( 3000): 2750-1469P.txt file - cDNA_ID_3031842; gDNA_ID_2214650; Annot_ID_188616

SEQ ID NO: 30477 - DNA, 3000 bp, Unknown
  misc_feature (1)..( 3000): 2750-1469P.txt file - cDNA_ID_3031868; gDNA_ID_2214651; Annot_ID_188651
attaaaagtacttaccgtatggtcatgggtggaggctagcatttcgaaaaccttgcagtgtttctttgagtttccagagttattgataattaaaaagtcgatatagttactacttgcaagatatcatgcatggtctcttctgttggtttactagtttgtaattttcttatgtatattcttctatataccaaataggcaaaaatatatctacagttctttgaaagtaatctcatcatcatcatgaaatgaaaaaaacaaaataattctaatcatgatgactgatttcaaacattatacaatgtagtgatacgacaaatagaaattagtactagtacatattttaatagtatgtcaacaaaagtctcaacctcgtggctctacctccatgaagactcgtggcaaagatagagaaagaggtcatatgtgttgcagacatatgaaaatgaattctctttattatctctctgattcatttggttagttcgattcttcacagttaaccatttatttagtatttcttccgatgtcgatattatacgcgttggtggcgcgtggaacggtggttcttgcggagttaagcactacgtccacgaacgctagcacgatcgcgaagcagatccttgagaagatccctggtaacggcgacagccacgtgtcatactctcaggatcgttacgtcttccacgtaaaacgtactgatggcctcaccgttctttgtatggctgatgaagacgccggaagtaagtcttttgagcttttagtctgttactatgataacactaatactcaatattttgttccttattttggttaatgatcaataaattaatcattacttagtttagaagacagagaccagattcttgaaatttgaggttttatgaatttggtgtttatgatgagtaacaacctttgagaacagagacaatgaaataagaagagtctttaaaatgttcccaaagttgtgaagtagtagagattgagattcttttttctttctttctttagtttgttgttatgtgttaatgtacttgttttgagtgttattttcagggaggattccattttcgtttctagaggatattcatcagaggtttgttcggacttatggccgcgcaattcattcggcacaagcttatgctatgaatgatgagttctcaagagttcttaaccaacaaattgagtattactctaatgatcctaatgccgatacgataagtcgaattaagggtgaaatgaatcaggttttgtgtttctccataatttgaaacatatatagtgcaatggttatgttttgctggcttcaacggattctctgttttgtatggttatgaataggtgagggatgttatgatagagaacattgacaacattcttgatagaggtgaacgtcttgagcttcttgtcgataaaaccgcgaacatgcaagggaataccttccgattcagaaagcaaacacgtcgtttcaacaacacggtgtggtggagaaattgcaagctcacgtatgttttcatcaaccgtaattccttaccatgtttgcaccttaagcatgacttcaaatggtttaatcttttcgatgcattctcgtgtaacgtctcttgtaggctactcttaatactagtgttgttggtgatcatatacatcggtgtggcctttgcttgccatggaccaactctaccctcttgcgtttaattaagtgagtgaatctgtcatatgcgcgcaatttcgctgcgatcatggatttctttgtatgtattggcgcagcttagatcctctgtttctagctagctgtatgactatgactgagataagttttatttgtataaagcatacatggaagtgaaaacgcatttctttcacaagtgtttgaagtcttgttataaccatatatttgaactttggcatgtgtgtaaggtcatacaagggttgattgattctttagaaatggctaatgggagcattttgcacacgtctgacattgataagaaaatccactataccgttttataacactttaaccgctttaattcggttctgagaccagaccatgcgggcatggcctatgtggtggcgacacaaagaaaatggatttggaaagggggtggtcttccgcatcaacgataaaaggtgacctaggcgcatcacattttcatcagacgcataaccgttcacacccatttgcgtaagccatagactatggcccatagttggtgatgagaagcgtacatcctaaggaatgagtatgataacatcgttatccaaactagagtcacacacaaatatgttaatgacgtgttataacttataagaagctagcgcaccgaacgtggtgtacacgtagtttctgccataaaccaacatatggacagtttcgatataccaatacaatttgggtgattcggacccaataatattgtttccttatgaatatgatttttaatgcctttgaaattattattttatctaagcgagcatagaaggatctagaagatcataagataattaaagaatatatattctaatcaatcttatgatgttctacatcgtactatacgatcactcgatctttattgtaaaccattaaccctaatatcgggcatatccacacactgcctgtccgacgtttattaagatcctacggaagatttttttttccacctttccaaaatgctatttgaattcatatataataccagattattattatttttgccttaccaaaaaaaatataccaacatcttttgttcaaaaaaacgaaaaaatagaagttcaaaaaaaaattgcaaaagagaagagaagagttgataattatttggaggagaagagagttaactataacaaactttcaaaaaataaaacaaaacattttaaatagccctttttcagaaaaacaaaaatatattttaattaatattgaagtcaaaaccaaaaacttaaacctaagccctagataaaatagtagtactgttggatgttataaaaaaaactgccacagaaatg

SEQ ID NO: 30478 - DNA, 3000 bp, Unknown
  misc_feature (1)..( 3000): 2750-1469P.txt file - cDNA_ID_3031868; gDNA_ID_2214651; Annot_ID_136433
ggtggaggctagcatttcgaaaaccttgcagtgtttctttgagtttccagagttattgataattaaaaagtcgatatagttactacttgcaagatatcatgcatggtctcttctgttggtttactagtttgtaattttcttatgtatattcttctatataccaaataggcaaaaatatatctacagttctttgaaagtaatctcatcatcatcatgaaatgaaaaaaacaaaataattctaatcatgatgactgatttcaaacattatacaatgtagtgatacgacaaatagaaattagtactagtacatattttaatagtatgtcaacaaaagtctcaacctcgtggctctacctccatgaagactcgtggcaaagatagagaaagaggtcatatgtgttgcagacatatgaaaatgaattctctttattatctctctgattcatttggttagttcgattcttcacagttaaccatttatttagtatttcttccgatgtcgatattatacgcgttggtggcgcgtggaacggtggttcttgcggagttaagcactacgtccacgaacgctagcacgatcgcgaagcagatccttgagaagatccctggtaacggcgacagccacgtgtcatactctcaggatcgttacgtcttccacgtaaaacgtactgatggcctcaccgttctttgtatggctgatgaagacgccggaagtaagtcttttgagcttttagtctgttactatgataacactaatactcaatattttgttccttattttggttaatgatcaataaattaatcattacttagtttagaagacagagaccagattcttgaaatttgaggttttatgaatttggtgtttatgatgagtaacaacctttgagaacagagacaatgaaataagaagagtctttaaaatgttcccaaagttgtgaagtagtagagattgagattcttttttctttctttctttagtttgttgttatgtgttaatgtacttgttttgagtgttattttcagggaggattccattttcgtttctagaggatattcatcagaggtttgttcggacttatggccgcgcaattcattcggcacaagcttatgctatgaatgatgagttctcaagagttcttaaccaacaaattgagtattactctaatgatcctaatgccgatacgataagtcgaattaagggtgaaatgaatcaggttttgtgtttctccataatttgaaacatatatagtgcaatggttatgttttgctggcttcaacggattctctgttttgtatggttatgaataggtgagggatgttatgatagagaacattgacaacattcttgatagaggtgaacgtcttgagcttcttgtcgataaaaccgcgaacatgcaagggaataccttccgattcagaaagcaaacacgtcgtttcaacaacacggtgtggtggagaaattgcaagctcacgtatgttttcatcaaccgtaattccttaccatgtttgcaccttaagcatgacttcaaatggtttaatcttttcgatgcattctcgtgtaacgtctcttgtaggctactcttaatactagtgttgttggtgatcatatacatcggtgtggcctttgcttgccatggaccaactctaccctcttgcgtttaattaagtgagtgaatctgtcatatgcgcgcaatttcgctgcgatcatggatttctttgtatgtattggcgcagcttagatcctctgtttctagctagctgtatgactatgactgagataagttttatttgtataaagcatacatggaagtgaaaacgcatttctttcacaagtgtttgaagtcttgttataaccatatatttgaactttggcatgtgtgtaaggtcatacaagggttgattgattctttagaaatggctaatgggagcattttgcacacgtctgacattgataagaaaatccactataccgttttataacactttaaccgctttaattcggttctgagaccagaccatgcgggcatggcctatgtggtggcgacacaaagaaaatggatttggaaagggggtggtcttccgcatcaacgataaaaggtgacctaggcgcatcacattttcatcagacgcataaccgttcacacccatttgcgtaagccatagactatggcccatagttggtgatgagaagcgtacatcctaaggaatgagtatgataacatcgttatccaaactagagtcacacacaaatatgttaatgacgtgttataacttataagaagctagcgcaccgaacgtggtgtacacgtagtttctgccataaaccaacatatggacagtttcgatataccaatacaatttgggtgattcggacccaataatattgtttccttatgaatatgatttttaatgcctttgaaattattattttatctaagcgagcatagaaggatctagaagatcataagataattaaagaatatatattctaatcaatcttatgatgttctacatcgtactatacgatcactcgatctttattgtaaaccattaaccctaatatcgggcatatccacacactgcctgtccgacgtttattaagatcctacggaagatttttttttccacctttccaaaatgctatttgaattcatatataataccagattattattatttttgccttaccaaaaaaaatataccaacatcttttgttcaaaaaaacgaaaaaatagaagttcaaaaaaaaattgcaaaagagaagagaagagttgataattatttggaggagaagagagttaactataacaaactttcaaaaaataaaacaaaacattttaaatagccctttttcagaaaaacaaaaatatattttaattaatattgaagtcaaaaccaaaaacttaaacctaagccctagataaaatagtagtactgttggatgttataaaaaaaactgccacagaaatgaagaagcagatctcgtcggaggcaatg

SEQ ID NO: 30479 - DNA, 3000 bp, Unknown; identical to SEQ ID NO: 13784
  misc_feature (1)..( 3000): 2750-1469P.txt file - cDNA_ID_3031872; gDNA_ID_2214651; Annot_ID_188650

SEQ ID NO: 30480 - DNA, 3003 bp, Unknown
  misc_feature (1)..( 3003): 2750-1469P.txt file - cDNA_ID_3031892; gDNA_ID_2214651; Annot_ID_188644
aacaaactataactatacgatagggtattaataaaacaaagtaagagttctagatatcaaaatagtattatgaaaataaggactgagaatgtaaacgatacgtactcttcctctatatgtgcttgttgaagccattgaacaaaggcccaaggcctatttagaacaacatatccctgcacattatatacaattcatcatcacatgttttttttgtgtaaatatttctttaagaaaatttcatcatccttggaataaaatttacacatattatcatttgttttacgaggttttttcatgtttgttttaaatcttataatttcataaaagatgcttatgtttattaaaaataatgttttaatttttttttgataaagaagaagttttatcctcaacatgatttcgtgaacatgcattacttattttgacaagtcaatcaataatataatacaagatttgagattgtttttttttacgttactattttcaattataaaataaacctctaaatcgaaaaataacatcatgatgattctaaaatctagctataaccaatacacctttcaccaataacaaagaattaagtaagataaagaaccttgtcaacaccggagggaagagggtcagcaacgaaagtagggatctcatccatgagtccatcgggtcgacccgaatgcaagatccgggtatacccgcccatatccgacccgggttcgtccctgaacctgttgtaccaataatacatgacccgacactgccacgtgctgtacacggaatccgtggctgtcaccgccgtgtgaaacagtctctttgtcttctttgacggagtcttgacggtatatgtgatgtcatctccggaagaagctgatcggcgaccggggagttcttgccggagaggaggatcatcggagactatgtagttgtatctgattattagaaataacgatagagtcatgagaattgggaagaagtacttcccacggaatcccattttctctctttttctgtatcaaaaattcattcatgtgcatatgcatttgctaatgtgtatatattatatatttttgatgtttgtgacaaggaagaaggcataagacagtttcaagttgtatgaaaagtcgtcgcttattgtgttattttgaaatgaggagtagttgtcagaaagtggctggtcccacaacgttctggtcttcgtttcattttctatacatgtatgagttatcaattcagttttcctatgatttgatgttataatagtattgcttttgttgttcaatatgattctacttgtttttatttgttttctcactttgttcttgtcggggaatatttcataagcacgaaaggggtttgggttctggacaaaagatggctaattcggctactacgaaccaaatgtttggtgttggatccgaccatcggattttgggtaataaaagcccaaggaaaagaaagctcatcttaacaatgaagataaatcaaggattataaaaaaaataatcatttcatacttcttaaagaggtaattgatcgtttgtaaggaaaattacaagagtcaaaatgtatggttaaatctctaggaagctgttgtgaatagatgttctccattaatgttttctgcttagtgtaactcgtattgatttaattgttagttactttcatggcttatgtgatacaagccacttgtaagattaatcaaaagttgtgaatttagtagataactcatatcaatcgagtatttaagactagtacaacaattgtctcacgcatcaaaataaggtggcatgcttagttaaacgcaatgcacatgtcttttcagtttaatatttctttagtttctataccaagttaatagtatcgacttacattgtactcggtttccacttgtgatcttcaaattgatcttcattgttttggtttaaccaggaagttgctgctacctcaatgaacatgaaaatgattgagcatatgatttgctaaaccataaataaaccaaacaatttatttcggtttggtttggttcggttttcggttattttactcacccactacagaacaaaactgacatatagaacttacacaaaatttctaataaaaatttttggtttcataatcttaaaatacaaaataaataaataactaaaacagtttttatataaccaaactgaactgaatctaacaaactaaaattcattaaaatttattttagttgtatgagagatataaccatattatataaatataatattgagtgaattattatttgtttctatttttagacatttttttgaaacaaaaaatgtaacccttatttaccactacatatactttaatctagttagataatatatacacatttaagacaacaaatctaaatttctaatacacataatctaataattttcttatacatttatgttataaaatacatctattctaatatcacacataaaaggattacgtgtcctaaacctgaaaaaaaacacataaatgtctatataggagaatctgctgtacattaatatttttattttatccttgtttttcttttcaattttgtttgtcttctttcttgtatctgttccattgcataactataattacctaaaaagttaataataacatatgttaataccgtaaaacattaaaagttcaattattttctttgtgtgattaaaacaaacatgtaaatttcctaaatcataactgtactaatatttaaagtttagaacaataacaattaattaactcacgcggtaaaagtgaaatctacaaagattccattgtccaataattcacttcagaaattgtaagagaaaacctggttttgtgtgtatcatcaaagtctaaactcattacagaaaaactgcaaaaagtcttttgtgggtcatagattttctaaaaagacacatttaagtttattgtcctccttctctctctctctctccactgcaactctttctcactttcactcaagattgcgtcactgtagtagtagtagtaatg

SEQ ID NO: 30481 - DNA, 3000 bp, Unknown; identical to SEQ ID NO: 13787
  misc_feature (1)..( 3000): 2750-1469P.txt file - cDNA_ID_3031896; gDNA_ID_2214651; Annot_ID_188643

SEQ ID NO: 30482 - DNA, 3003 bp, Unknown
  misc_feature (1)..( 3003): 2750-1469P.txt file - cDNA_ID_3031910; gDNA_ID_2214651; Annot_ID_188637
aagactcgaatttgggacctctcccatattcagtcgcaaggttaaccaacggagctatcatctactttttcaaaccggtaaaggaatatcatctatttttttgttatgataacgtatgcaccaagtcaaattctaagtaagttactacacaattgtgtaaattgtgagtcatactcttgttgcatacgcgttttttccttcgtcttttgttttttcctctgtataatacttgtatcaagcatctactaaatcatcttataattatctcattggttgtttaagcacaatcatatagggcttattttgcacccttgttctaattctggtggcttttgccttttttctaaactgattaaatctccaatgaggcattgtttgttaagaaattttcacaaaacacacttttttaccctttgcttgttcttactactctactggttcctttgcaacgacgagtttctggtctgttttgaacaaaacaaaaccaaaactctgattcttacacactttcatatatcctcaaagccaattggttgctttatatacaaataaaattttttgataaagataagttgagtgtgtttttacttcctccaagcatagataatcaaagagaaccaactcttagacccgaagctcctctcatcttcttccctacaactagaccactccatcacagaagacatcctagaagaagaccaatgactatacgtactcgcccaaaacgacggtgttcgacaattctccttccgtaaaatgacatcgtctcttacacgcttgttcatcatcaaaacgtcgtttccttcaacctcttggttctcaaaccggagtaagaacacggcgggaatcttatccggtttaaccttatccttgccaccaaacagccagttgaaaacatcccatgatatctgtattgtcacaccatcgatcacgatctttgtgtttcctctgaatttccattgaagctgactaatctttaggacactcttatcgtctacgctaaaccggagactagcatcgtcgttaacaaccttaacgtcgatactaatctctctaagttttccttgaatcatgattttcgtagagtaaactctgtttccaaacagattctctttcttggacaccaagatttgtctcctcggtctctgtttcaagtttcctccaccgacaagaagacctacttcgccggatacaaagactgccacgtaaaacccggattccggatcgggtcctgatccaaattttgcgtgagtcaggtcccataccacccgaatatccggctttcgagataacttctttgatccattttttctccagaatgtcaagggtttgatttcgagccggaaggcgaagggaatggagtgacggtaacaatctagagagtgtagatagcaatttgtggagttgcatgagtagaaatgaaggtggagagagcgtcggaggaaggatcgagaccatgaaagaaagaaaacaccaacgttagtgtggtactgacaagttgtggtagcgtcgccggaggtggagatatacgatggatttgatggggatggaagagccgacggtagatcgtcgttgatggcggtggcggaaggatggaaacaggcggacaaaggggaggagccaccgcgaccaagagcagagattttcatttttaggtatagtcaattaatatgactggttgatcttatatacgcacatgcatacaaaaagacactaattatatgtaaggatatgactatttgagtatttatctatacttgagttggcttatgtgtctgaaaatgagttgtcatgttgtgaaaattcaaaagagtgggtcaatgtcgagaaattgaaagcaactttgtggataaattttatagaccgaaactgacgttcattgatattttgtgctggttttcacattatttatatgtagattatgttctagttcaattcttttgaagtcgcttgactttttgtctctttcctagtttccttaatcttttccacttatattagtttttaacgtttgtagtcacagtgaaagctaccaaaattctaaaaatggtaaagagaaatagaactgtatcttgttaaagctcggttttcatgttacttaacattacatatgttgtgtttgatagtataaaataataaatttgttatggataattagatgaaaaaattaaagagttttgcgataagtaagatatttgtttcttgttggtttaagagtcggtttgggtccatgatataacactaattaaccaatagttgtggccttgtgggaggtaaatgatccaacaaactttgctttactaactcacatcttttttcttttgaataactaagaggttttggcctaggccaatacatcctctcgggatgggactaaagcattttatagaattttctttcaaatgttattggaaccagcaacctctaggcttagctaaaatattttaccagttttgagctattgacacttgataactcacagtttttagatgtagtttctctaaatcatgcatataaaataaacatcatagagatcactagtagatgatttcatcaactagttctatattcgatacgattttacacgaaactcgtattttcgaaatgttgtacattgtatgatataaactttagaaagggaagatacaaaattaagttgctgactatatgctaaacctatagacacgtgaacaatgagatgacggcaaacatgtggatttaagtttgcttcggtttgtttcagtttgttctagtttgctacaacaaaactccaaaatattgttgatttggtggctacaaaaaaattataatataaaaatagaagatatgtgtttgattaaatatactaacatagttttgatcgtattaggtagagccatatttagataagtttgtggactgcgatgaagttatgaagccacacaatatgtatttttttttccctcatgcttgattcgttattttctctgtgatttgatatgtatgcaaatttatttattaatg

SEQ ID NO: 30483 - DNA, 3003 bp, Unknown; identical to SEQ ID NO: 16578
  misc_feature (1)..( 3003): 2750-1469P.txt file - cDNA_ID_3031914; gDNA_ID_2214651; Annot_ID_188635

SEQ ID NO: 30484 - DNA, 3003 bp, Unknown; identical to SEQ ID NO: 16578
  misc_feature (1)..( 3003): 2750-1469P.txt file - cDNA_ID_3031914; gDNA_ID_1620626; Annot_ID_162487

SEQ ID NO: 30485 - DNA, 3003 bp, Unknown; identical to SEQ ID NO: 26479
  misc_feature (1)..( 3003): 2750-1469P.txt file - cDNA_ID_3031944; gDNA_ID_2214652; Annot_ID_188677

SEQ ID NO: 30486 - DNA, 3003 bp, Unknown
  misc_feature (1)..( 3003): 2750-1469P.txt file - cDNA_ID_3031959; gDNA_ID_2214652; Annot_ID_188671
atttagtttaacctggattgtcttttgtagagctcagattctttcttcaaaacaaagctgtaatcgatgatgaacttaattaatatctaaattatgtaaagctgagataaacaggttgcgagatggacacctatactcatcactgacaccataggcaaagtgaatatcctcaaactcctcgagaacagccactgcacatgaattcataagtttcagagcttgctcatcatttggcttctcaaattcatgaacgtcagaaaatctatcaaaatccaagcaagctccatgagtcgtaatttgcaacacagaagactagtaatcactaacaaaatgacttctttctgaaaatgcaagttcagattcaataatcagaatattccctagacaaatgcaaccacaacagaacataataaaactgaacaggctagcctagctgaatcctatggagcgcaaggattttactagtctaaggcttcaatgcagtaaaaagactgacaaacttttacgaaataaaggtaagctatagacaattacctgtgaaagtgacagccatcaatcctaaccacgacccaagttaaaggtaacaatttgttctcaaactgaaacgacctaataaaatctggttcaatttttccaatgtctttcgtgaagtggccaagatcattatatagagagggctgctcattccaaaagcttcttcctgcaatattctctgaatgtacaaaaacagcctttctcctcaatctttttacaggattgccattttcgtcatgctttacagtttcttccacctgaatcaagttaaatgaaagtgtgttattggaaatttacaataagtcttagctacatagcatcacgcaaatttatgatgaacatcaagaagagcagctagatacatcagttttaaacctgaacatcaactaagctgaagtaatagtcttctacacattgctagattttactagggttcagacaattcaaacttacaaattacaatgcataagcctaaacgtacatgtgcatcaacaatattgtcaacaaactcaggttactaacattcttagagactcaacttaaaactggaagtctaaatacatacacaacacatagcaaagcaagtgctctgtatataatttctaacaaaagatataaattatcacctttttcttgaaaagacaagatccttggcgaaacaattcaggaagcgtcttgtaattgataccaaatttctgaaagagaagctcatttttctgctgtttttgtgtatcctgcaggcatccaatggaaatagaaatcgtgtgttcaaaccatgtaatatcattactaagcgtgaaacttggcttaagaaggtaaagggccattttgacatctgtattagaaaaaaaaaattatagtcgtagtgcagacaaaaaaacattgatctctgccatagaaaagcacgaataacacacctttagaatctcttgggtttcacttacgctctttccacttttaactaacatccagaaacaagtgtcatactgattgttggcgtggcctgcaaccaaaaaatgggtttcacttaattcacgaagatattcacgccaataagtagaactaatatccggaaaaacaagaaatcaagaataagtgtcaagtacaatatttatgttgtcagaatgtcttacagtcctgttgtctccacgcgagataagcctgaagaacctctgctgatgcacaacttacaacttttgaactgaaggacggagcatataataattttctttggggaaaaaactctttccattttgttacataaactgcagcaaagaaagaagctaccaacgacaaaatcttactgcatataaaaaaaaaaaacaagaaagtgaaaaacaatgagtcaatcagagaagaaaaaaccacatatcattgaggaaaaggttttcttcaagtaaattcactaaaaatatggaatcaactttaatcgaaaaaatacctggctcgtctctggtagaatcttgatgttttcttgaatacaaagctacaaaagacatgtaaacatataaatcttgtacaagatacatagaggtgaaataaataaagtcaatggagtgtatttaggacctgtattcgtcactgtatccataagcaaagattatgtcaggaaactcttccaaaaccgcagctgaacatgaattcatcaaattgagggctgtttcatcattaggcttctcaaactcatgaacttgagaaaatctgtagttatcaaacaaaggtaagcaggtgtaagtaaaatgccaaagaaaaaaaacattctttcaggaacaatgtcaaatcatgcttccaaaatccatcaaagatgcagcctttaatcattattttccctcaattattccagagatactacaatctacacaccatcaccattgacattggagtagtgataaatttcatatagatcattatattatacacaatctgtaaaatttacctagaaaaatcacgaccatcgattcgaacaaccatcaagttaggaagcatgacttcatcctccaattcgaatgatttcacatactcgtatttgctattcgccatatccctcaaggtttcacgaaagttttcttctttcttctttgcttctacgctatcgactttgaaactaccagacacaaaaaaaactgcaatcgaacaggatattaaaccgaaagctgagtcgacattgctctgtgaaagagaaaccaaactatatgagcaaagacggtttacttcacataaggagataaaaaaatggcagtattccttaccaatactagttcaggagcatataagattcttaatgcagtaccaataaagatcacaatcaattcaggaacatataaaactttccaataagatcattttctcaagttcaaaaacaatgaattcttagctagggaatcgtgtgcaggaaagtacagaatttcaaatcctcaccagtaagacaaggagaattaggacaagttttaataccttaagacaaatatg

SEQ ID NO: 30487 - DNA, 3000 bp, Unknown
  misc_feature (1)..( 3000): 2750-1469P.txt file - cDNA_ID_3031971; gDNA_ID_2214652; Annot_ID_188666
ctaccctttaccaacaatcttcagagctgaacactttccttacggcatggatcttccagacggaaaagctaacggaagattctcaaacggaaaacttatctccgacataatcgcaaccaaactcaacatcaaagagtttattcctcctttcttacaaccaaatctctccgaccaagacattctaaccggagtctgtttcgcatcagctggtgcggttacgacgacctaaccagtctctcgacacaagccattcgtgtctcggaacaaccaaacatgttcaagagttacattgctcgtctcaaaggtatcgtgggagacaagaaagcgatggagatcataaacaatgctttcgtggttgtgagtgcagggcctaatgatttcattttgaactattacgatattccctcaaggcgtctcgagtatcctttcatttctggttaccaagattttattcttaagaggcttgaaaatttcgtgcgggtaacgtctaaaatatttcttcatatatatattaccacaattagggttttggaacagactatagtgactgaaagttttatgataatttgtttgttttgttaatctctccggtgtatatgcaggagctttacagtttaggtgtccggaatgttttggttggaggtttaccgccaatggggtgtttaccgatccatatgactgctaaattccgcaacatttttagattctgcttggaacaccataacaaagactctgttttgtacaatgagaaacttcagaagctcttgccccaaatcgaagcatctcttccaggaagcaaattcctttacgccgatgtctataatcctatgatggagatgatccaaaaccctagcaaatacggtatgtacataaagatttttcttgctccacaagttatcttatttgtttatatatatatgattcgtgtgtgtggaatcgaaacagggttcaaagagacgaagagaggatgttgtggaacagggttcttggagacgagcttcatgtgtaatgtcttttctcctgtgtgtcaaaatcggtcggagtttatgttctttgactcgattcatccatcggaagctacctataatgtcataggcaatcgtctggatcctctgattcgtgggaagtttcaggcttaagtgatcatcacgatttgcaaaactgaaacaatgtttttttcttgtttcttaatgcaactatttgtcgacttttgtttttaaatcaaatgtactttggctcatatttgtgctttcaaattagccaaatatgccacaagtaaatgaattgatttcactttttttttaacatctaaaacaatctttcgtcactcattgtgatctttaactatatagtcttgaaataaaaattcattaatacatcaaggaggatacaaataagaccggaaagtttggccttaaatatttgccattaaaattgacagatttatatattttaatttgccaaactgttttatatatgtaggttagattgtatagaatttgacccacttttactttaattgaaaggtacaaaatcatatataagaagttggccgactctctaattatctcttctataaaacaattccaaatttctatgatgtacgaaaagactcgaagctttttcatagcgttttgaatcaaaatctttctttctttccatatttagtttttatcagtctactttatgactttctctttattctggtttccaaaatccatattagtcttctattgcagagtgtatctaacaagaagatatttcaaacccacaagacgtctaattacgatgtaaatgctaaggtttcatgttcttgtaagaccatctttattgggggtttctcataagagtttttcacaattaaaaatataaaaataatgaaaataaaggagagagagtatagaaagtttctcacttgagaaactttgagatactttgagatactttctacaacccatgatgatatttctcttctcactattagttcaagattttaattaaaataaaatttcaatcatataattaaattataataaaatattaatttctttttgtttgaaaaactttgtgagtttctcatgaaattgccctaaacataacttgctttatctcccatacgaggtttctaagatatcaaggcctcgtcttaataaaagacgagcatcatgcaaatgtctttttgctttgactttggttttagataatgtttatagggtcgcaaggtttggtgcacgttaatctgacaaattctgtttcttgggagtgtaatgagtatttagaattgatcaacaaaaatattcaacattttttttgaaaaactaaagtgaagacccgcttcaaatataaaaatcagtcgaactaagttttggtcgatctcccaacaaaagtatacaaccaaaaaaagtcacactttaagcttctttcactatttgttttcagatcccacaaaaagggaagtaaacaaatcgttaagaactcttcaaaacctccacttcgaacaatatgtttgcaaaagacacatgtcgttgagatttctacttcccaaaatacaaccgagtaggcgaagattacaataatgatctcatattttatattgaaaaataaaaatatttcaataatcatcatctaattcaaaaaaaataagaaaaaaaataagcaccagctaatctaatttaattataccgcagaatcaaagaaaatcatctggatcatggtcttaacatggcctacatgattaggttgagtaacaattattattattttcagcttttcaaagataacagcattgtttttcagttttatttttaatcattgggtgaaaagctcatcaatatctctatttaaactaaaagattcaaagctcttgacttatctatttgttagtcacttaaaaaggaaaaacaaactcaacaaagccagcaaggtaacaaaagaaatttcaccttataaattcatcaccaaacaacaacatttcttcaaatccaccaaaaacaaaaaatg

SEQ ID NO: 30488 - DNA, 3000 bp, Unknown; identical to SEQ ID NO: 30487
  misc_feature (1)..( 3000): 2750-1469P.txt file - cDNA_ID_3031971; gDNA_ID_2214652; Annot_ID_136440

SEQ ID NO: 30489 - DNA, 3003 bp, Unknown
  misc_feature (1)..( 3003): 2750-1469P.txt file - cDNA_ID_3031975; gDNA_ID_2214652; Annot_ID_188665
ctataggtctatagtcggagagtgttgtagggttagtgatttttggaatcatacatatgttagtatgatttatgctgggtttcataaatgatgtttcaaagaattttttgacttctaatataacatcgtatccgactatatcccaacaattcttataaaatcttgctgttaacccatcaggccctggggctttatcatctcctatttggcagatagcatcatatatttcggtgtcactaaactcttttgtaagatctaaattgactgtattagtgactgtggatttgaagtccgcaaagtctattggtgatacctttataccattggtgctaaagatatttgtaaaaaagtcctgagcgtggtttccaatttctttatctcctgtgaacatccttccttgatcgtccatgattgtgttcactcgattttgagaatatcttgtttttgtacaggcatgaaaatagccggtgttttgatcgccttccttcatccattgattacgactcttctgcttccaataaatctcttcgtcactaaaggccttcgctagtgactcttgaagttgtggaattagttgtctgtcaaccctccttgtactctccattgctctgtttaggctgctttgaagttttttgattcgttgttctgagtttaaattagaagcgtgtttcagtcttgccatggcttgtcgacaactactgatccgttccgtgataggtgtagaacgtgaattccggtttgtcctccagcttgtttgaacaatacgtttgaatgtcggtatgtcaattaagcggttatcaaaacggaaaagctttgatcgacggggaaatgactcgttgaagtgaactaggaccggtttgtggtcagagcccgtgaagtccaggaattctgtttcagcatatggaaatgttgcagtccaggctgaattaataaaaactctgtcaaggcaacatttgactgtgtgtgtatgtctttcccctacccaactgaatctatctccttttgatctcatatcttcaatgtcacaatgagaaaccatgtttctgaaatttctaaaagtccattcctctctcatgggaccaccaattttttcagcgttcgaaagtatctcattgaagtcacccactagcaaccattcagcatttcgattatctgagatatgttcaagagtttgccatagttgatgacgttcagattgagtagggtgaccatacacacaagacaagtagaagctcttattattaaatgttacatgagaatcaatgagtctttcatcctgagaaatcaaggataaagagacattgtttttccacataagagctaagccaccactccttccattagggggctgagttattacattagggaagcctaaatcatatgctagtttacatactttatcacactggtttaaggtttcaactaaaaataaaatatcatagttatacatacggaataagcgaaacaaccgcgattgagtcagcggcataccgatgccctgacagttccatgagatgatcctcatattggatcccttaggggtaccgggccccccgcgcctccgtcacgtccatcatgtatcgaacacgatcctgcagattcagtctttcttcctttcttgcaaagttgactcagaacgcccatttcatctgcagcttccacctgttggtacatttcttctaatcgaaccctctttctcttcatgaagacaaactcattttgtgcattgtcagaggactcaaggagcagatctttctcaaccggtgcgtcagttttaactcctgcaagtttggcgtgaaggtagcggagtctttcaactgtgaggtctgtgtcctcaatgacgcatggaaccgaataaccatctgaaagtttttgtacctggcgttgattcccctttgaaagcgaagattgaaggccgggaataagagtcgctggatccactgtctgaagagtatcagtgtcgcttatgtcatgttctttgttgtcgtcgtgatgatcgtcatcatcatcagcatcatcatcatcacttgtctccaccggatctgcccaataggagactaatattattttggggttctttttgtcagaaattacttggatttgttttttttttcaaaccacacagtaattaaaaataaaactttttacattggcattttggtcttaacagcattgtgattcttctcctgccaacaaaaattcatctaataccatcatcaattatatggattattacaattttgttttgtcatttcattctaaaaaatatgagtgatctaattcttgtaaaattttgatgtgtaacctgaaatattgatacactaatctatagccaattaaaaatgacaaaacataacattgggtaaatagtaacataaaaatatacatgaatcataaattttaaaagtatgctaagtatgtataagatttaaaaaaaaaaagattttaagagagttataacagtaacacacttgaaagccgaagttttgttcttccttgtctcagcgccgcgttttttctctcctcatcctctcgatgaattcctctcaagcttgcttcttccatttttctcttagaccaatctcgctttcgcatccctcctatgccttcctctcgaaacgtaagttttccttccccaaattaagtgcttgggaatcgaaattttaagagattgttgttacctagactagttcaggatacaatcgttagagtttcgttgcttcgaattgattaaaccctaatttcaaaagcacagacctgggtttttcactgttcctgcaaagttgataactttttcactgatactatctcttagactagttctcttaacccggaaattctctcaaagtatccaactttatgaacagaaacaattgttgaggcatgtgttttgaccttgataatgtttttgcaggagacccatttctgtgttctcaacccagaaaatgccttactacgaatttgaatatgtcaagaacgagacaagggcattctatacaaatg

SEQ ID NO: 30490 - DNA, 3000 bp, Unknown; identical to SEQ ID NO: 13791
  misc_feature (1)..( 3000): 2750-1469P.txt file - cDNA_ID_3031983; gDNA_ID_2214652; Annot_ID_188663

SEQ ID NO: 30491 - DNA, 3000 bp, Unknown; identical to SEQ ID NO: 13809
  misc_feature (1)..( 3000): 2750-1469P.txt file - cDNA_ID_3031995; gDNA_ID_2214653; Annot_ID_188706

SEQ ID NO: 30492 - DNA, 3000 bp, Unknown; identical to SEQ ID NO: 13812
  misc_feature (1)..( 3000): 2750-1469P.txt file - cDNA_ID_3031999; gDNA_ID_2214653; Annot_ID_188705

SEQ ID NO: 30493 - DNA, 3003 bp, Unknown; identical to SEQ ID NO: 25227
  misc_feature (1)..( 3003): 2750-1469P.txt file - cDNA_ID_3032003; gDNA_ID_2214653; Annot_ID_188703

SEQ ID NO: 30494 - DNA, 3000 bp, Unknown; identical to SEQ ID NO: 13807
  misc_feature (1)..( 3000): 2750-1469P.txt file - cDNA_ID_3032007; gDNA_ID_2214653; Annot_ID_188702

SEQ ID NO: 30495 - DNA, 3000 bp, Unknown; identical to SEQ ID NO: 13807
  misc_feature (1)..( 3000): 2750-1469P.txt file - cDNA_ID_3032007; gDNA_ID_2214653; Annot_ID_136463

SEQ ID NO: 30496 - DNA, 3000 bp, Unknown
  misc_feature (1)..( 3000): 2750-1469P.txt file - cDNA_ID_3032011; gDNA_ID_2214653; Annot_ID_188698
tttctatttcatattgaattaggagatgttactgtccgtcagattctctagacttttttttttaaagactgatctatgatcagaattccaattttttttttctttaaggaaatacatcagagagaaaaattattacgaaacgattctattacaagtaatgattttaacctttttttttttacaattgacaatcttttcacaacaaaaatccacaagaaacgttagacaatggcataaatttatttaaattaatccgtatatattcgccttctatgagaattgaattctataccactgtaaaattcttaaacgagataagattattttcagcatgtaaaaaatggtttgtggtttcaactcatttgggctattagttttacatttaggcttgcaaccttgtcggtttattttgtgtaggcttttggtagatttgggcttgcaaacccaaattaacttgttggccgacatacatttgtttctattacaaatttaacaacaaacgtcaataaatacacgtgaaggaaatgagaacgaccctcttaagtagtactggaaattgaaaaaaagaaatctagaaatgctaacatgtaagtttttgttaccaaaaatgcaatttgtatgtagccacaatttcatggccgacctgctttttttttcttcttctttctgaaaaccacaaatatgattacacgtggcctgaaaagaacgaacagaaactcggtaatgtgcaaaaaatatcttactcttaatacgtgtaattttggagtgtaataggtctatcgatctataaaacgatactattggagattagattcttctcatctcactttgttcatctaaaaactcctcctttcatttccaaacaaaaacttctttttattctcacatcttaaagatctctctcatggcgatgtctttctcaggagctgttctcactggtatggcttcttctttccacagcggagccaagcagagcagcttcggcgctgtcagagtcggccagaaaactcagttcgtcgtcgtttctcaacgcaagaagtcgttgatctacgccgctaaaggtgacggcaacatcctcgatgacctcaacgaggccacgtaagtctacattctttcttcttttagtatcttgcctcataagtaaggatcttagcaggcaatgtttatggtatactatattagtatagattttagtggaaatatgtttgttttgaacttattttatgatcatatttgactattatcaaagataaagattcatataccgtacattatatatctctatttttctagtttacatgtatagctctaagtttatttgatgattctgttgactacttttggatatgtgttttgaaacctttgataaatactaaaataaattttaatttgaaaatgatatagaaagaaagcttcagatttcgtgacggataaaacaaaagaggcattagcagatggtgagaaagcgaaagactacgttgttgaaaaaaacagtgaaaccgcagatacattgggtaaagaagctgagaaagctgcggcgtatgtggaggagaaaggaaaagaagccgcaaacaaggcggcagagttcgcggagggtaaagcaggagaggctaaggatgccacaaagtagggtcttacctaatcagttaatttcaagcacttaaactcgtagatatattgatccatatcctctctcttcatgtttaatagtacttacaataagatgagtctgttgtaatttctattaatttcacatcacaactgaaataagatatggtatccacagtcaccgtcacattctttaatgttttgcaaaatattcaatagacaaaattaaataatgagtaattataagtaacatcgccgtctagagtctttcaacggtgaaaggatgagagcatatgggagatcgatagccttgtctcttttgtgacgaaccaataaaagaggaactgctttttttcttcgcatgtccactatttactgtttggtatgacatcgaattggtatgatacattgttgtaccaaaaacttcaaaatttggtggcttgtaatcaacattgatccacttagccattccaagcagtgaattacaatccgtggaaggaaaaattatggtccggcaccaacaaattatcacctcatctcccgtcacaaacatatcatctagaagtcggtatgccacaccacataattaaggagcacattactcacatacccaaccaatgtgggacatatctaataagctcattcttggctggtacatgctctatttcatatttatcaaaaaaaaaaatattaggcattgtaaatagcgtttttgctgttgagcaaaatagttatatttgaaagtaacattggtatttataattatagtataacaattaggcattgaagtgtgagtttttgtttttgtttatttaacattggagtattaggttcttagaaatatatctatatactattagtagtttaactacagtttgtacttaattgaaaaaatgttaaaagttgttttaacctagctaattgctaaaaatgactaaatagacatacacaaagacttgtacattttcagcttaacgactaatacatttttcctttatatatatatctctatcgagtctagttattaatgttgaaagttgcaaataaaacagaaatgctaacatgtaaatatcgtagccaaaaatgctaacatgtgtataacggttataaccacaacttgatggccgacctcttttttcttttggtaaccatagaaatggttacacgtaactagtacgaaccaacgaaaactcttcttattcgatagttaaagataatagcaatgcgcaaaaatatctagcactcacacgtgtagttttggattctcattggtcgagagatctataaaacgatactattggaggttagatttttctcatctcactttctccatcttaaaactctttcttgtatttattttcctcccaaaaaacatctttaagagtcctcatg

SEQ ID NO: 30497 - DNA, 3000 bp, Unknown; identical to SEQ ID NO: 30496
  misc_feature (1)..( 3000): 2750-1469P.txt file - cDNA_ID_3032011; gDNA_ID_2214653; Annot_ID_136459

SEQ ID NO: 30498 - DNA, 3000 bp, Unknown
  misc_feature (1)..( 3000): 2750-1469P.txt file - cDNA_ID_3032045; gDNA_ID_2214654; Annot_ID_188734
cacatcacattttttgaatcgaattcacgttcacaatattcgtacggcatatatatatatacatcgtgaaggaagaaaattgtaagaaattccacatactttcaggcccttataggctaacacaactctatatatattgaatgagggttttctcaaagtcaagtactagagttccaaatatttgctagatatatgcgtaggctcctttctataaatgatggagtaatttatagttgaatatttgagtggttttgttgctaccatttatgagatgatctgatgatactttttaataatgacttaatcttctatataactgatttggtttaagataaagaaaaggataaagattgtttcatttagaaaccgaaaataaataattattggagttgttgattttggaatgatctaagatctcacagtcagctagttcagtctacggcccgacactctggttggtgagatgttggatcccttctcccagcatggagttacagtgagttttcatagttttcttctactattggaatattaaaaactagctaagtttaaatttcaaaaataacagaaaaagctagctagccaataagtttaatatataggtcaataaaataaatctatgagctcgagtaatatacaaatgttatattgaattgagtattgaatctctatatagagatggagatgaaaagctatatatgtacattaattttgaaactgatattagaggtttgacaatcagtggacgtgaagggccaccacacccacatgtgacttgatagcgactagaatggaaatgatatcatgtgtgtttgtaattaaaaatgaagtgcaactttcgtaaaaggactactggtcattaattatgattccaacactcatcatctttttcgctgtaaatagcatatcatatgtatatatgtacttggaacgattctcctgttaacttggaaatagctagggaaaacggtctactaatttcgaaaatcgccaatagaaacaacaaatcaaattcttgtgaaaataggctataaaattcagtatccccaaattaaaaggccaaaacttttatttgttacaaaaataatggtaatagatttcaattacaaagacacgaaaagcaatcgatttccaattagttctaacaaaacattccattacgcagtcattaactttggagctggtgttggagcttcaccataaccgtttttgtgtgtgtgtgtgtgtttacgtttgcatgtttatgttataacataaagttaaagcacaaacacaattacaaaaacgtaaagaaaaaaacgaagaagaccaatgctttgttgcggtggcaactggcaagagaccacaaacgcaaccgcgtgagtaaacttcaataattcttgctttgtaaaatttcatgaaaaaaattgtcactgttatcacaaacaattaaaccaatattttgattcaactggtggagtttattttcgttattattttggttaaaatgaaaaatctattttgttgtggatgagcttgtggtgagcaaacttttgtctttgttttcaactactagttgggaccatgaactgaaagctacagtttgaattcatttgctgttcctttctattactgaaaaacatctcttcatttgattttcttaacggtaataaataatgtccgagtttctcgtgggataattgatgatactccaacaatcaagtgcttgccgttttcatcgactcaatggggcacttgtaaagaaaaaaacttgggtcagaaatagtaagcctcataacttaaaataacccaagaataatgaagcttctaaaattttgggccagaaatagtaaaagaccaaatgtttgatgatgaagagactagagagatagactatgatctgcccaaaataaacattttagatctcgtgaataactatggcctcaaagtgaaacggttccaacgtcgttaaccggttttatgtaaaacgaaaatcttcctctttctgatttggttaaccgttcggttcatccaaatcgaaccccatgaaccgaacgaaaccgaaaaccaaaggagatcagaatttgtttttatttttattttacatcaagggaaatcataactgatttggtaatgtttttggatctgcatctgctgcataaatttttatgattgattctttgattattgattttaaaagtcaaacttatcatgaatttcgtgtggtttgttgtgtagctcctggtattgctatggcttaacgaaagtacctatggctatggctatggctaacaagaagcagtggattacaaagctctcgctaatatcattatacaatgcaaccttttttattactagttggtgaggtgttaattaatcccttctcccagcatgaaataaatgtggaatccaaaacagaacattttgaagacaaagttaattacaatgattttaataattttatcttctactgtattttaaactagctatgttaaatcgtggggtacgtatgtatgttcccatcacattttgattccttttggtgcttgtaaatagtttttcatatttcatatgacaaagagttttattctataatattctctaatgttacacccatgtggttgcacaacttgcagttgcatcttcccttttaaaagttgtattcttctctttgaataaattcggtcttagaactcttccacaagccacaagaggagcattcatttgttgacaactttgaaaaaggaaggttccaagacaactcaaaagtcttgtagtttccccaaaataaccccgttgacttcagttaatagatgctaaacaaatagaaaccggaagggtattctcgtatttcagaaaaacccgccgcgtgggttcgacggttacgactctctcaacttcattcattcatttgaaaaaaactcacttttctccttttaattctctcttcctctttctaagaaaccgaaccaaaaaaaaaaaaacccaactaaaaacttagtcttttgtcttcacaaaatg

SEQ ID NO: 30499 - DNA, 3000 bp, Unknown
  misc_feature (1)..( 3000): 2750-1469P.txt file - cDNA_ID_3032053; gDNA_ID_2214654; Annot_ID_188728
ttgataacttactttggttcaaaattggtcatcatttaataatacatgtatttaaattcaaaaaaataatacatgtatttttataaaggaaatttcaaaaaagaaatatcaaggcatagatgaatcaaatcaatcatgcaaataaatgtttgtttttcgggaacgtttccctcgcttttagttaaaggttcaagcaatatatataaccgagcaacaaaacaatgcaaagctaacaacaatccctagacttgtcctcttcacgcttgatccggcagatttgtgctcatcatcagcagctggagaatcggcatcagacgatgaagttgaggatttcggggcaggagctccggtgggagtggtctttgttccgaataactcctccggcaacaacacactgtccaccacgtaaactgctagaggaaactgttgccttaatgcattattgatccgagtctcaacaacaccggtggaaacattcacttggttgctttgtgcttgtcctgtgaaatttaacccaaaaacacctccgtcttgtcccgtagcctgagttctaacgggattacttgctaagagaagatcgcttagagagtagtattttggaatgatatggtagagcatgagctggatttgttgttgatatgtcagactgtttagggttccgggtttaagcttgttgaatgcgttatctgttggggcaaatatagtcatcccttggtcagagctattgagttgtacacttacctgaaacccgacttgagttgtgttgaggagttgtattaatgtggtaaattggtgaccagcttcaagaatcgctgtgagattgatgggacttttttcagtggttggagctggagcagtgggctggctttgaatgtatgggatggtgaaaaggaagattaagaggacaacataagagaatagtgacgaggacatggcttaaaatttgttatatttttctctatctctctgtgtgtgcttgtgctagagctaaccctttaggtattatatagaaagattttaaggagagatttaagacgacatgtatgcgtgacttgcaaaagaagttgatccattgtttttaacaacttagtctacattttacgataatgtttataattaagaaatgcaaaacaatactataagaaggttgacaaaatgtatatatatatatagaattgtatcccacatccgataagatcataagagatttgtagggcaatatatatcgtatatagtatacaaactcatggttcaccagttagattacacaacaacaaaaacaacttgaaaatgttagctggtcatggttcatgaatatctttacatttttctgtatttaaaatgatgtggatacgtgtatatagtcgaatatagtctggcattgataggcaacgtgggggtcatatatattataacaacgaaactgctctacatgacattggcatgggcaaaatttgggctggaactggaaaaatcctcgtagggcatgactataagaaaaggcccattaaaaacatgaaaaattaacaaagttggaatcataatcgactgacgaaactaatctgttaaaattatgtgactttcttaatacaaaatagcgttgtactggtttaggattaaaatcgttcggacctcttgtggccttgtgggcacatggtgcgccgtgcgtagctcacgtgaggactgacgatgacatgcagcaaaaataataaaaagaatacgtatttagcagcagattcagacaaactcatgtgcgtttcaaaaatgacgtttatatccccctaataattatattcactctatccactttgacaaaaagatcacgttaatttgaattctaagggtaaaagcgtcaaagtatgtctctttttccgaggtaatagcaataggcaactagaggagaccgataactcaagcaaactcagattcttgatagcgatttaatgaagacccaagagtcccaagaccaagggctgattaattaatgctgttttaaccatatgcatatcatggacacactttgttctccgagtcgactcgttctggtcaccttcttcctcctctgcttctttgccggagattcatcggcgacgaggcctggtttcatctacaccagacacagaggacgatgcacgccgcagtaaatcaatcaatcttgaatttcattttctttacaaaaatctttagctgagtcatatctcaactcgttggtggtgtttttgagcaggtattggagcagccagagggaagcatggccgaggatggtacctgagagatcaaccgtggagaaaatattcggagtgatggtagcaaaagaacggtggagatctgatctaacgctagtggaatcaacggctaggaatgacgaagaagggaacgcgtacggtgcattgctgaaacaggggatcgcagctctgatcaactcttacgcgagaaaaagtttctcttatgcaccatgggaagtgaagacgatgctgatccaagccatggtttcggagtcggcggctcgccggcaagccgaacatttcgccgtcgctaacgttgcttgtgactaaaaacactgagacagttacttttgtcgtctttaggttttgaatttaagctttttgtcgtgtaaccaaagtttgattccgatcagtttgctactagattatgggcctccgaaaggcccaaattaaacacagaccttgagcgctttgtagtgtttgggaacgactcttcttatatactctctatttacttattaacccgactcaggatatgtatatccgactttccaaacaaatctttaaaatatggtacagattcgaatctaatcccctcttcttttgtttgtttgtcaagtaatttttttgaactttccattttcttccaaacaatataaccagaaatatgtttttgtatcttaatcattctcgaggaccgattcttagggcttttgctgctctgtttcttcaaatcttgtttgtacaattcactacgaagaaggttgttctaatg

SEQ ID NO: 30500 - DNA, 892 bp, Unknown; identical to SEQ ID NO: 25231
  misc_feature (1)..( 892): 2750-1469P.txt file - cDNA_ID_3032076; gDNA_ID_2214654; Annot_ID_188717

SEQ ID NO: 30501 - DNA, 3003 bp, Unknown; identical to SEQ ID NO: 25238
  misc_feature (1)..( 3003): 2750-1469P.txt file - cDNA_ID_3032193; gDNA_ID_2214656; Annot_ID_188773

SEQ ID NO: 30502 - DNA, 3000 bp, Unknown; identical to SEQ ID NO: 13832
  misc_feature (1)..( 3000): 2750-1469P.txt file - cDNA_ID_3032205; gDNA_ID_2214656; Annot_ID_188765

SEQ ID NO: 30503 - DNA, 3000 bp, Unknown; identical to SEQ ID NO: 13846
  misc_feature (1)..( 3000): 2750-1469P.txt file - cDNA_ID_3032265; gDNA_ID_2214657; Annot_ID_188803

SEQ ID NO: 30504 - DNA, 3003 bp, Unknown
  misc_feature (1)..( 3003): 2750-1469P.txt file - cDNA_ID_3032281; gDNA_ID_2214657; Annot_ID_188799
cttggtgatctttccccttctctgacaagggtcctattgtgaccagagtatcccgaaacattgtaggccaccaaaagcctgcttgaagaactttggatactgttttgaaagttgcaaaatgaccaccatagctagagctgtgacaatacgatagtatatcagggacctctgttgcagcaatgcatctcctgtaaattccatcagaacaatgcttatatagataaggctcatcccaatgatatcgcctaatctctcgtaggaatctattcttgttgtaatctgtaaaattatcaggctgcacatctgcagctaggtaattaacaatgtcagcataccatgggtaatctttctcgaccgttgtgacggtgcaattctcggttggtgaccaatttcttgtcgatttagaagggtgtcgatcgacaggtgcaagggtgtcgatcgacaccatcgcgcaactacaaatatcaacttcctctgaaatatgagtgtcgatcgtcataatgggtgtgtcgttcgacactgaagcacgatcctgcaacctgtcacgtttgtagtcatcgtcttcagctgtatcaatcatgtatatgttctcttcaggcaagaaatcatttatagggacatcatcatcgatcctaatgcgtgacaaatgatcagatacaccattctcaactcttttcttatctctaacttctatgtcaaattcttgaagaagcaaaatccatctcaaaagtcttggcttagcatccttgttttgcatcaaatacttcaaggcagcatgatctgtgtgaacaataaccttggatccaacgagataagatctgaatttttcgaaagcaaacaccacagctaacaactctttctctgtagttgtataattcctttgagcatcatcaagagttctactttcatagtagattgcatgaagtttcttatccttcctctgtcctagaatagctccaactgcaaaatcacttgcatcacacattacctcaaaaggtaaatcccaatctggtggctgaacaattggtgtgttgatcaaggcctgttttatctgctgaaatgcatcatgacacttctgtgtaaactcgaatttgacttctttacagagtaaagcagtcaatggtcttgcgattctgctgaagtctttgatgaatctcctataaaaaccagcatgtccaaggaaattcctcactgctttgacattatccagcgcttgaagactcgtcatgacctcaatcttagctctatcaacttctataccatgctcagaaatcatgtgtcctagaactattccatcctgtaccatgaagtgacatttctcccaaatcaaaactagatgtttctcctcacatcttgctaacactttgcagagattctctaaacaatcctcaaatgatgatccataaactgaaaagtcatccatgaaaacctccatgatatcctcgatcatatctgtgaagatagacatcattcctctctgaaatgtcgcaggagcattacaaagaccgaagggcattctccgataaacaaatgtaccataggggcaggtgaaagtcgttttctcctggtcatctggatgaatcgggatttgaaagaatccggagtatccatcaaggaagcaatagtacttatgatttgctaacctctccaacatctgaccaataaatggtaaggcgaaatggtctttcctggtagcagcattcagctttctgtaatcaatgcacatccgatgtcatgtgattgtccgagtaggaattagctcgtctttctcattcttgactactgtgacacctccctttttagaaaccacatgaactggactaacccaactcctatctgagattggatagataatccctgcttccaacagtttcataatctctttcgtgaccatttctttcagattcggattcaaccttctcttatgttcgactgaagacttagactcatcctcaaggtgaatcctatgcatgcatacatcttgggatatacctgcaatgtcatcaagagagtagccaagagctttgcaatgattgcgcagcttgcttaggaataaggtgagctctgcgggattaagagaaacattcacaataacaagataagtagaattttcactaagaaaagcgtaccttagccctgctggaagtggtttcaattcgattttaggagctttggctggatcccaatctgaagtaggagtcggcgttgaagtcaaagatggaagagcttcttcaactgtaagttgcatcacatgttcggtctcatctagcagcttagtatatgttgaagtttcacagtccaaatctgcactatcctctatggaagagaccaaaactcgcactagtggtttttttaattccatctctcaaatactatctgaaactgaggaggtgaaaggatctgttaagaaggttttcccttctatgatcggtttcttgaccaaagtgttcatatcgaattgcatagttagatcaccaacattcagccctatgctcccttgtcgaacatctatgattgctccagctgtgtgcaacaaggatctccctaggattaatggatccttagagcaggtccattgggagggccttaacagatccttaaccaaaatctttgagtaattttgagaaaaaataaataaaaattttgattaaatgttaggatcgcacctaattttaggatttttgatgatgttaaggatcggatacgtggcatgttttcattggttgagcttttttgacaaaacaagtttttttcttctttgcctttttttttcatttatcgatttctctctctctcttgaactcggctgtgcaattgaacgattgattatcgccggaagatcttcatgcttttatatgatcaaatcggaagagattatcgcccggaagtcgtctctaatccactgtgctcatcatctcaaccgacggtgctcaacgtcgacgagtttggtgaacctaatcggagaggattgtgaatcatatcggagtcttgtttgaaaccatg

SEQ ID NO: 30505 - DNA, 3000 bp, Unknown; identical to SEQ ID NO: 13849
  misc_feature (1)..( 3000): 2750-1469P.txt file - cDNA_ID_3032291; gDNA_ID_2214658; Annot_ID_188828
  misc_feature (46)..(46): n is a, c, g, or t

SEQ ID NO: 30506 - DNA, 3000 bp, Unknown; identical to SEQ ID NO: 13853
  misc_feature (1)..( 3000): 2750-1469P.txt file - cDNA_ID_3032291; gDNA_ID_2214658; Annot_ID_136510

SEQ ID NO: 30507 - DNA, 3000 bp, Unknown; identical to SEQ ID NO: 13848
  misc_feature (1)..( 3000): 2750-1469P.txt file - cDNA_ID_3032295; gDNA_ID_2214658; Annot_ID_188826

SEQ ID NO: 30508 - DNA, 3000 bp, Unknown; identical to SEQ ID NO: 13847
  misc_feature (1)..( 3000): 2750-1469P.txt file - cDNA_ID_3032302; gDNA_ID_2214658; Annot_ID_188822

SEQ ID NO: 30509 - DNA, 3003 bp, Unknown
  misc_feature (1)..( 3003): 2750-1469P.txt file - cDNA_ID_3032325; gDNA_ID_2214659; Annot_ID_188852
cattttatggatgttgcagatattggagtgatgagtggagctgcaattttcataaaagacgatttgaagctgtcggacgtacaacttgagattcttatgggaattctaaatatctattctctgatcggttcaggagcagctggaagaacttccgattggatcggaagacgatataccatagtgttggcaggattcttcttcttttgtggagccctactaatgggttttgccactaactatcctttcattatggtcggccgttttgtagccggtatcggtgtcggttacgctatgatgattgcgcctgtttataccacggaagtcgctccagcctcttctcgaggcttccttagctctttccctgaggttcaatagatccaaattttactagtttatatgatataaaaaaaaagaaaattaggtttatattaatgtgatatgattttatatgcatgcagatatttatcaacattggtatactattgggatacgtatccaattacttcttcgccaagcttccagagcacattggatggaggttcatgttaggtattggagctgtgccctcagtgtttctagccattggagtgttggcaatgcccgagtctccacggtggctcgtcatgcagggtcgtctaggggacgcttttaaagtccttgacaaaacctcaaacaccaaagaagaagccatctcaaggctcaatgacatcaaacgcgcagttggaatccccgatgatatgacagacgatgttatagtcgttccgaataaaaagagcgctggaaaaggcgtgtggaaggaccttctcgttcgaccaaccccgtccgttcgacacatcctcatagcatgccttggtatccatttctcccagcaagcctccggaattgatgctgtcgtgctttactctccgaccatcttctcaagggctggactgaagtccaagaatgaccagctcttggctacggtcgctgtcggagttgtcaagactctcttcatcgtagtaggaacttgtttggtggaccggtttggacgtcgtgccttgttgcttacgagtatgggtggaatgtttttttccttgaccgcccttggaactagtctcacggtgatcgacaggaaccccgggcaaacactcaagtgggctatagggctcgccgttacgacggtgatgacttttgtcgcaacattctcattaggtgcaggccccgtgacgtgggtctacgcctcagagatattccccgtgaggctaagagcgcaaggagcaagtttgggagtgatgttgaatagactaatgagtggtattataggaatgacattcctatctctttctaagggtctcaccatcggtggtgcattccttctcttcgccggagttgcggttgccgcgtgggtcttcttcttcactttcctcccggagacacgtggtgtgcctttagaagaaatagagagtctcttcgggagctacagcgcaaacaaaaagaacaatgttatgagcaaagggaaacaagtagttgatgaacaatgagagtgaaacaaaatttgcttccatttcattatttggttaatggaacgtcgataccaaaagactcggttccgatccgagtcttcatcgggcgagtgtgaccaataagaaaattaataaagaattttacttgccatctctaaattcatgttgtatatctttaataagttgtttgcagagaacgagattaagaattaaacttttataatctgccatttcaattaataaatgcaacataggtttgattacaaccattttttttttttggaaaacttattaaggtacgtacgtttcggttactagattatttgctagtttagtttataactcaaaagtgggtttgatgatctacgatccttccaattagtctaatactcctatacaaaggtggtgtgatgaaattgttggtggaattatatttaatatcttattatcgttatgaaatatattgaatacatttgttaaaattagtaagtaattaactttatagatgtatataaatgtcaaaattgatatatgtggtaataaactttgtgtttatatgataagtctttgttaatttatcgaagcttgtagaattgtcgtttctatttaattggtttagggtttttgttgggttatgagcctaaatttatttatttttgttaaaaaaaagataacaaagtataataaattgcataaccacacatgccgactaaaaatcatttacacgtatattatatttacttcaaaagatgagtttgtacggtgacatgcatcatcaacaaacatatgttatatgaccagcaccaggaccatcaatccggtcactattctcgtgaaccgtccggccgtcagattttctttgttatgaataaagtttgctagttacacaaagtaattagagtaccctcattaagagtatttaacttgttacatagctacacataacaactaaattaatgtataagtaccctcattcttagcaacaaaaaaaataaagtaccctcatcaaaaattggattattacaaaatgacggacaccaacaagcataagttatatgaccaacattataatcatcaattaagtcactaatttggtgtacctcgcaagaaacttggtaaagattagaacctaaaaatataagagcaagtccaacggtgcatcttaacacatatcttagcataatatcttaggtttaagtaattaaaattaaatcaaaaatgacttaaatgctaagatttacatcttagctaaaatcttttatgtgtgctaagaagcatggacgtgtcctgaaatgagtggtccaaattaaagacaaaaccaaaaaataaaatcacgcgttcatcttctctttctctctttttttttttctctttctctcgttctcgagacatgcaaaacaaacacaaaaacttcaccatccgactcgatccgatgaattgagaagagatttgagtcggaaattcttcgttcatctgtggtcatcatcattaaccgaatatg

SEQ ID NO: 30510 - DNA, 3000 bp, Unknown; identical to SEQ ID NO: 13855
  misc_feature (1)..( 3000): 2750-1469P.txt file - cDNA_ID_3032337; gDNA_ID_2214659; Annot_ID_188847

SEQ ID NO: 30511 - DNA, 3003 bp, Unknown
  misc_feature (1)..( 3003): 2750-1469P.txt file - cDNA_ID_3032341; gDNA_ID_2214659; Annot_ID_188844
gatcgcttatcgtatactactcaccattccggtttcagttgctttggcggagagaactttttcaaaattaaagctcataaaaaaatatctacgttcgactatgtctcaagagcgattgaatggtttggcgctgatatctgtataacaagaactggttgagaagctcgattaccaaaaattgatgaatgaatttgcaggagcgaaagctaggaggattatgtttcgccaggaagaaaactgagatttctatttattttttttcttgttaacaatttttatgttcaattttcttaaacaaaataaatttcatattattttattttgcgaaaaaaatatatttgggcatcaattttgaatttgctttaagcatcaaatatcctcggaccggcactaaatctagggttaccattctgcttcttcttccatcttttcttctgctttcccatgatttaatttcctttgaaaattttccaatggaaacaatgtcctattctttccgctgcacgctgcattttatagattttttttagattcacccgtataactatgattaaataactctttatacaaacaatctcgacttggcccagtggtctaagtctctctcttttaccctacgcgcctactagcgcctggtttgaccttttacatctacatctttttctctctttttttttcccttcatttaaaccagatcgaaccagtttcgattcggttaaattatcgaaatagtcaattacaacatcacaatatcgactttttctactggttcacttggtatttttaaacgacacttatatgtaagatcattgtttctattattgttatacgaaccaatctaaatatgatttaattagctacccaatcaaacccctttctttcttaaaaacatgttattttgttataatctggataagtatggatcctaccaaaaaatctggataagtatggatgtaattatccatcactcatctatatccataagatatggataatgcgtatctctatccattattttctccctaagtctattatttcctcgctaagtctattacttctttgttaagtctattacttcttagtaagtctattactttttcgttaagtctattactttattgtaagaagtacagagaagagaagagaatgagtaagcaataagaaaactctcgtttcggtctttactctttttagttttcattcttctttaaatattttataacaggttatcagtaagagcgtctctccgggtgattgtctaaccgaccgatcgtctatttgttcaagcatcttttgaggtaatatttgaattatgttaaattcattttaattcattgcggcggacccataaatactttttaccgaattaaactacaacttaaaagaattagtaatttaaaaaaattaaattactaaataaaattatttccttaaaaaagaccacaaagtaggttaaatatttatgggtgaatcaaacaaaaaggctaaaacatgtcaaaaatagtatcaaaacacaaagtagaagaaaaatatgatcaaatttaaagggtttcgatacaaatttctaatttcaagggggtcaacagagaagaaatataaataatattttaaatatttaaagggctgtaatacgaatttagaattttccagggcatctcatcccttcccatctatactctttaccgtgtcaaaataaaacttaaaataattaataactaaaacttttaaaaaatctttatttactgaaaattaccacaaattaggttcaaactttattggtgaaacaaacaaaaacaaatacaaagagtaaaaacatataagaaatagtgttaaaacacaaagtagaagaaaaatatgataaaaacttatagcgtttacatgcaaatatgtaattttaaggagattagaaccgaaaaatataattaatatcataactattaaagggatataatgtaaatgtagaattttagtgtggttttcccctttaatcatctttgggtctgcccatacatatttcttatcctgaaatttgaaatagacatgcgcgattttcttaacaacttataaacaaatatgttcttatacatttttcttacacaacttttaggatatttatcttaggattttatttatttattttacgtttaaagattacaaataatttttagacgttaccgccacaaaaaacttatccacaaaatattttacgttattttattttacgattaaagataacaaaaacttatcggtttattaataattgtcttgtggatcgtcgtataccgtaatttgataacaattctaaactataaattataaatattctataaatagatacaatttggaaaatttaatatatattaactttaaaaaatagtgttaaaaatctagttttaaggttaatagttgagttatgttctaaatctttccaagtttatatatttttgtactttaatgtttactcatcaaaaataaattaacaaaaactcttatttcaaaagcaaagtcaatagtacaaaatatcaagttttttcagaaaaaaaagtgaattagcgtattgaattttaaaaagtgaaggtttttatatgagagatgatttttttttctataattaccataaatatctgatccttaactatgtcagcagaggatatacatttgttttttgttacaaaagagttgggttctaacttcaaaagagtgaaggtttcaaacagttaaaaaaaaacatttactgttaatatttataatttcatcaataatgggcagaaagttttataccaattaatattctacattcttattctcttatggactttcttacatttgcagcaacttaaagattccacttgataaactcccatctttctttttggatgctccaagtcacttgattaaagcttctccagaatctcctctataaattatgattcataccaaactcttgtagacaaaaccgattttcaaaaaaacaaaacataaaaatattttttaaaaacaatg

SEQ ID NO: 30512 - DNA, 3000 bp, Unknown; identical to SEQ ID NO: 13861
  misc_feature (1)..( 3000): 2750-1469P.txt file - cDNA_ID_3032436; gDNA_ID_2214661; Annot_ID_188877

SEQ ID NO: 30513 - DNA, 3003 bp, Unknown; identical to SEQ ID NO: 25247
  misc_feature (1)..( 3003): 2750-1469P.txt file - cDNA_ID_3032467; gDNA_ID_2214662; Annot_ID_188913

SEQ ID NO: 30514 - DNA, 3000 bp, Unknown; identical to SEQ ID NO: 28220
  misc_feature (1)..( 3000): 2750-1469P.txt file - cDNA_ID_3032530; gDNA_ID_2214663; Annot_ID_188925

SEQ ID NO: 30515 - DNA, 3003 bp, Unknown
  misc_feature (1)..( 3003): 2750-1469P.txt file - cDNA_ID_3032538; gDNA_ID_2214663; Annot_ID_188922
ctattttgaagtttttaatttttgaatttcgccaaaacgtttaccaaatttgtgagacttgcataaaacacgagtggtctattcagcctataaattagttgaatgctacaagcctacaagcttaaaataaatcgaaaattttatatattaattaaaacttataatttgtttagttctgttttctttctcagtgactgttgattttatatataattgtgtctgacctaaattgtattgcgtatgattgaaacttgtatgatttgtagaaaagagagagaggaggagtgtctatatgtttttatttctttttgtcttggatccattaccatatctataggtctcagattctatgtttacaacctaaactgttttcattatctatgaaatatttacaatttagcaaaaaaaacaatgacaatctactcatcaagaggactagatgatgactttcaaatcttttttttttggttttttttttttttggcaaagatgactttcaaatctttgcaaacaaaatcaaaatgtaaaaaatgagagagagaaaccaaaaataataatgagaaaatagtctattaagaaaagatgtacgtaagaattaagttaaaatgtaacactaaaataaaagaaaaaatcaaatgtatgataagaccctcatcaaaccattatattgaagtaaattatatatgtatgaaaatgaaatatcaaagagttcttttactctcacttatgacacgctaaattaaaaccactaaaaaccataatattaatttcacggctacaagttgatgcttcctcaaacttactacgttccaatgccgggcactgattaaatatggacttcacatctttttttttttttttagatattcatttccaaacggtctattgacagatgggctaagaatttcacgggttacaaaaaagtggtccaaatcggaacataatagaaacaagatcagtaaaacgacggttcaccggccggagacgcagccttcaccttctatatccgatgcaaatttaacatatttcgaacgaatctatgagatctatatgagaattttgcttcttgggttttatacggttcgggaaagtggatgtatcaagttgtgacaagaagcatcaaagaatatgactttgtccagtcatttttatggtatagtgatgatcgtcaatgatcataattggctaggaagaaagagcacatgtgcattcatatgattatcataattgtgcatatcatatgcttttatgggcatagttgtcgatagaaacaaaacatgcgtcgaggaaaaaacaaaagaatagttaaaacttagaatctttgattctcatgagccatgaggccatgtgctttttctctcccacgttatatgttttaccatccttataatttgctcccccgacttctctcactttcagacgaaaagaactgctgtcgcgatttttgaacaattatggaaaataatttagatgtgaaggaagccgtaaaaatagttattatactttttgtccatatatatagaattcgtgatgattatgttgtggatgacaattggtggtagatagaaacctttactatcgccattgttatgggctaattaatcaagtttggtaacaaatcaacataataggaccaataacaacaactactgcagatcttactattattctttttattaattcatcagtatattttattattttttcttgattgtttatccgattgatcttgtaagagataacttttgattattacataacttacttcaacatgttaaatgacacaataaaatagacaatttatttttgatatccttttgaaaaatattaaataaatatttgtaatgactgtgttgcactaaaaaatcgagataaccccatgagtgataatttggtaacataatctaaacttagagacaattaactaattaagttattatctgagaaataaattagacaatatttttattcgtgtgtgtaatttttgtggtataatattttttcttatattgtttcaattctacggatgttttggataaaaaggttaatcaaatttataaaatgtaaaattttgcttgaacaaatgaaccaaaatgtttactaattggctaattgctggaaaaaaacagttatataatttttgttaacaaaaaaaatgtttgatgtaaataattaattcacagctaaaagtcaatttcctcatttatttttgattaaagaaagtaataaaaaacaattaagtataccattcgctgtacaagagtcgtttagttctgtcggctcgacaaccgactcaagccggctcgagtcgctaagtgaatccactcgctgtctgtcggtggacaaagccggctccaatctgatcactctctctcaccagcacacacacagctctctctcttccctctctctctcccccgctttatactttgttgagtcaaaatcacagacgaagaagaagaagaaacctctctctcactcctctctcctttctctcgtcttattcgcttctcttctacgtaacagattgttcatcttcttctccttgttgcattgaggtgagttcaatttgatctatcaatgtctaaatgcatgctttttgaattatcggatctcttgtgtttgatttcattgatagagatccaattatgatctagatctgaagaatcctgttttttgagttcctattggttaaaaagtttcctcatttagctttagttcgaatctggaatgttaaacgattcggatcgagatttagcagtagtagaattcagttaggtagagtgatatttttatactattagtcttcaattataatataattgcattgagcttttcctacttcactgtatcgttttctattgtaaagattgatcctttttatatattatgcagggggtgttgttgatgttctgacgatctgatttgagtagatctgggtagggggcaaggtctctgggtctacttttgatttgagaattttttaagtgaagtgaagatatg

SEQ ID NO: 30516 - DNA, 3003 bp, Unknown
  misc_feature (1)..( 3003): 2750-1469P.txt file - cDNA_ID_3032569; gDNA_ID_2214663; Annot_ID_188937
tcatgtatgatttttaaaatattgtttattcactcaaattggtcaatttaaaataaattttaattaagctctaattttagttatattatggtgaagaaataattatgttttcctttaatttaatcaaaatataaaaggatatggtattcttaagtaattggatagatttttgtaatttctcatccgtaaaagttgtacatataagattaaacttcttcttttgttgggtcaacaaaaatataatacattcttattatattattttcttataaataaatatttaaatctcttaaatcatttaccttactaggaaatgtttgctaaaaattaaacatttacataacttcatgagataaggttgaaaatgatgtattacataagcttgttctattatatatacagatacaatctcatactgaaacatctattttcatatctaacttcaatcaaaaacttaattaggttttatcatgggttatcaagcagatctaaagcaaataagcttcttcacagatcaatgtggtttttgcaagaaaaagatttgtccaaagcttgatgacatctacatgtataagtacgttttttcatttttaaaaagcatttgatttagctgttttatcgtaatttatctaaattgtttttttgtctcgtcaatctagtgacactcccttctgtacggaggcatgtcgagaaaaacagcaggaggctgataaagggaaacataaattagagaagataattgaaaaagaagatgaaattagataaaaagttgaaaagcatactcataacaatgttgattgatttcatatattaacatcatcctaatttttattcttgtcaaaaaattaggaatgacaatagttttttccccctacattttagtagttaatatttcccattttaaaaagtcaaaccccatcatgtatcatatatattgtaagataagatatggtgaaatcttcttgatatatgtactagatttctatgtaagaaaaaatttataaagcacatattttattcttttggtaaaaaatttcaaatgtaaatgtttgagaccaaaaaaaaactttattttgactagttgtagattttttcttctttttccttttttttttttttttttttttttctttttccttttactatcttattctctatcttcttttttaatataaatatgggtgtgacaggtatgaaaaaaataaaaaaaattagaatttttttttcttctctcattttagtttatttctgaaaaaaatgagttaatttgataacaaataaaatttgtgtggattgagaagaatttagacgaaaaaaaattcttcaagagtatataccagtgcacactcgtaaaatcgaacactgttttgaaatagtattaaattaaattaaaaactagtctatagtattaaattaaaaactagtctatagtattctttcgcccaaagaaaaaaaaaaagaaaaaagtttatagtattaaactaaaaactaatctataatggcatgtcggaatttcttttaatcgatatatgaaacattgttcagggtgattttccaaatagataaatagggttcgagctcccgaacttatagcttttgggccttcctcgtcttcagtttggacagctacgtaggattctatataaaatcacaaaactttagaggcaagtgatgttcgtcttgcgttaggactgctccattgcaaacaagtattgtttatggatatttgtgaaatttctgagtgaaacaaacattttccttgttttcaaatttcaaccaagtctcatggtctgttttactaatattagtgtttaaaactctataaaacacatccttagtatttttcggattaccacatgtttgctttttgttgaagaaaatttatctctagtggctagacatacgaacatcgaaaatttagcaaaacgatttcttttaaatttcattattttcaaataaaacaaaaatcttaaaatgcttggatttttaaccatttaaattatcaccttttagttttttttcttttttttttcgtgtgcaaggattttattgattaaatgcgtttgagttatacagagccgaaaatgaaaaaatcttttcggatacaaagccgacgggtacatagaaacccccagagacatgaggccaaaaaaggcgaacaaacaaaacaagccttaaaagaaaatatacaaagataacagttacaagtaataggtaaagcctccaaaacaacaacactgaaaattcttcccaacaagcagccgattaacactttcatggaacaggtaacagctaccgaagtaatagttaaagtctccattttcttctgttttatagaaaatttaggtaatatttcatatatatatatatatcactcagaaattacacaaatattcaaaaaaaatctgaacattgggagcaaactttttgaagcaaatcagatcataaaattagataacccgtagttacaaaaaaaatacttattgttctataatataaactcagctctaatcagattccatttgctaatttaaccgtataaagatatttctaatttacaagattttaaaatacgagaatgacagtaggaattagaaaaaactaatataaagcagaagaatataatcgtcaacacgtgataaaataataacccaatggataatttaatactattacagaaccaaaacaatcaataagcaaaaaaaaaaggcaaagtcccggaacttgcgtcagaagaattttgactagaaagaaaaaaaatcaatttcgacggccatttttttctctcatcgtacggattcctatctctcactactcagatgcttccttcttcactttaatcacccttttcgattttcgttttccagctttttgattcctctgtttcaccaagtagacgaagtagaagaagaagaagaagaagaaagttttcacctttactctaaaagtttcactttttatgtctgctttgaagctctgagatcggagaaagcaatatctatg

SEQ ID NO: 30517 - DNA, 3003 bp, Unknown
  misc_feature (1)..( 3003): 2750-1469P.txt file - cDNA_ID_3032577; gDNA_ID_2214663; Annot_ID_188934
cgaaagcacctataaaagaaatgaacgaaacagagttttgttttccagcttaaacagttcagcaaaaacaaactgacttaaaaagaccaaggaggcgttttatgctatataccagaagtcttggatgcttagcaatgatccgtgcaatctcttcgagcaaactcttggggtaaacagatccagtagggttggaaggagagcagagaataagaagtctagatttttcagtcaatttagactcaagatcctttggatccaacaaaaaattgttagaaatcttggtaggaataaccacgggcgttgcatcagccaatctcgcctgttctgtgtaactcacccaatacggtgcaggaattataacctagtgaaatacaattcattgttacaaacaaaatcacatcgaaagaattcaacaaaagctcgaaagacacggttttaattacttcatctccaggagaacaaactgcaagcactgcttgtaagagactttgtttagctccattactaaccaagatctgatcaggcgcataagacaatccattctcctctgaaaacaaccagaatacaaacaatttgactccgtttcgacataactgatttacaaagcaaaagcgtttctttataccttttagctttcgacatattgcttctctgagttctgtaatacctgcatttaacgtatacctagtaaaaccttctcgaatcgcgttgatcccagcctatacgaaacaatcgattcagaacaaaccacagagagagacagaacatggcaaaaccagtaggagaaatgtattaacctcagctacgactttgggagtgtcgaaatcgggttctcccgcagctagtctaataaccggaacaccggattgaacaagagtggctgcaagatcggttataaccatagtcttggaaggttttaaggactgaactcgcgggctaagtgacatatctactgatgatgaaagagtctcagcatcatttggtttggccatagcgcagattctagatgacatattccctgacttacagtacctaaccattacagagacctaagtcaactacattgaccagtgattggagcaatgattcagatttctaatcaaaagagtgctcaaaagtgacgaaattgaatcgaagattagaatagagacgaaactcacgagaaggagagacggaggggttgttggaaccgaactgacccgattggtttctttgaatctgggaatgattcacctctggcggcggcggaggaaatgacggcgactgaactctgagaagccattggagaagttgggttggtgagaagagagataaagagtcgacctttgaggtgggatttgtaaacgagagaggcggagagaatgtgggaggagttggtggaacaatgttaagaaaatgaaattaaaaatattttaaaatgacatttatatatgttcaaaattagccaccaaccaaccctttgaatttgcaaaccagagttagaaagctagtcgccggcggctgatgatgtcaccgggaaagatttttcgtttgtttcattttatcagtcacacacttgtataactatattattcaatcattaaaccctaatcttaatcctaaaaatatgggaaaatatatatctatagctataaaaaaagttaatattcttaaggcattaggcataatctagttaatagactccaatcttgggatcaagtaaatgcctaaaataaggattataacttagaagctttggagtgagattgctacgagaataaacaaggatcacaacaacagacactcgatgccaaacttacttaactcttaatttaacaaggagagaagagaaacgaaccagggatcagattcaggaaagcaagtaactaagcaagctcttttggagaagaaaagaaagacaaggacaagtttctcggttttgggattttacgttttaactttacaaaacaggattaaaccgaaattgaaccgtacaaaacctgtgcttaataccgtcatctcaaatattgaaccgtaataaatcgacaacaatataaaattgattttggttcactaagaggaccagacttttctctcggacttgagacactggagagactgaatacgaccatgtcctcttcgctccattgctcgggtaaacttttaacaagggttcgaaatcgaatacacgaatatctcggtttgttcaattactgaaaccaatcgaattttttaatctgtttcgattttctagttttagcatttccggtttagttcgatttaaattattcggttaccgtttttgtttagaatcacagaaaaaggtgagattaaggaggagcgaaacatgacgaatccacttaattccaccgccgctaatcgctctaaccaggtatgttttccggcgataactcatcgtcagttttgattatgttccgacaaaagtgtgattccgttctgattatccattttctcagccgtcttctgatggaatcagcgacggtcaaatcaccaatgaggaagctgaatcactaattaacaagtaatgacttcatctttttcatgcgaatgtttcttccggatttactaattgggaagaagcaatgttgcttaaactaaatttgcatgctttaggatttagtctgcttttgaatgtggttttcttcacaaaatggttttttggttccaagccttttcaatgtttcatataggaagaactgttcagggcacaagctaaaagaagtaactgatagtgacacattctctgacaatggtaaagatgattcagataccaagaaaagattccattaccatcaggatcaggtatttgtctcattcaattactacgtaaaagacaacttgtgcttatacactaaatatgagcttctagagaagtaggcctcctttctgagtgatgttgtatgtttgctgtgtagcggaggatgagtttgacatcgattgtggcggtggagtctccttcatcgagcaacgctccctctagaaaaaccattgatcttggccatg

SEQ ID NO: 30518 - DNA, 3003 bp, Unknown; identical to SEQ ID NO: 26487
  misc_feature (1)..( 3003): 2750-1469P.txt file - cDNA_ID_3032579; gDNA_ID_2214663; Annot_ID_188933

SEQ ID NO: 30519 - DNA, 3000 bp, Unknown
  misc_feature (1)..( 3000): 2750-1469P.txt file - cDNA_ID_3032581; gDNA_ID_2214663; Annot_ID_188932
agtgatatttgcacttgatcaagtcatttctctaggggacaaggatgttaaagcgtcatgttgtttaagagagggactacacaagacaagactttgccactcttccttatcaatcttcccgtccaatttgcttcttgaaatgtctacaccaattgatgtttatagagaattaagatgagaagcttagaatatgtcaatggagaccaagatcaagcccaccttcttgcatatgatgctcaatttacaaaacaagcctgaatgtgaggttgatacgagtgccctctgcctttgcacgctttggcacagaatgaatccagtctctttgagtgtatcctctcatcaccagcaacgatccatgtttcaatgtcaaactttgttgatcctctctgctgcttctctttaacctcttcttagctggtccactgtctcctgttttccctgcaggttcacaccaaacaaaagttggcttgttcctggctatgcaggaaaacactttagcatgactcaaatgtcccattaccttgggaagattcttcatctttctttttcttcaacacaaaatcacgttcacatccaaacgagactgaagcaatttctggagttggaccataaatcttttcatcatctgcatgccaagccacataatcactggcacctttgtatctatttaagagcaagctgttgaatctgcttccaggaagcaccttgtaaatctgacaagacgaaatagaaacgttttagttcaaacaaccactagaacacagggacatagcatagttgttttcaatcttacagcatccagaatctccttgagaggtgggaaatcatcccacgaataggaggtaggtcgatatccactgtacaccaacgcagtcaatccgctacttgcaacataacaagtatctctcggctacaggtggcaaatgcatatgtattagaaggccacaaacacaagttatacaggacttcacatgattgtgacttagatttctgagatacaagttgaatccaagcatggaaatggccctggcaatctttgttcctcacattgcacaatactcaatgtaacccgcgaggagacacaataaagcttcaatggatcatatgtatacaaaaacaaatgacagagaaagaggaagtggggaaacctggaggcaagatcgaccaaagacacgaatagtaggcctggtccaaggaatatgcttgtcgagataatcgaagaaagtccaagattgttgaaatggaagaaacctctgaatgtaaatgaggtcgcttccatggccaagatcaatggtttttctagagggagcgttgctcgatgaaggagactccaccgccacaatcgatgtcaaactcatcctccgctacacagcaaacatacaacatcactcagaaaggaggcctacttctctagaagctcatatttagtgtataagcacaagttgtcttttacgtagtaattgaatgagacaaatacctgatcctgatggtaatggaatcttttcttggtatctgaatcatctttaccattgtcagagaatgtgtcactatcagttacttcttttagcttgtgccctgaacagttcttcctatatgaaacattgaaaaggcttggaaccaaaaaaccattttgtgaagaaaaccacattcaaaagcagactaaatcctaaagcatgcaaatttagtttaagcaacattgcttcttcccaattagtaaatccggaagaaacattcgcatgaaaaagatgaagtcattacttgttaattagtgattcagcttcctcattggtgatttgaccgtcgctgattccatcagaagacggctgagaaaatggataatcagaacggaatcacacttttgtcggaacataatcaaaactgacgatgagttatcgccggaaaacatacctggttagagcgattagcggcggtggaattaagtggattcgtcatgtttcgctcctccttaatctcacctttttctgtgattctaaacaaaaacggtaaccgaataatttaaatcgaactaaaccggaaatgctaaaactagaaaatcgaaacagattaaaaaattcgattggtttcagtaattgaacaaaccgagatattcgtgtattcgatttcgaacccttgttaaaagtttacccgagcaatggagcgaagaggacatggtcgtattcagtctctccagtgtctcaagtccgagagaaaagtctggtcctcttagtgaaccaaaatcaattttatattgttgtcgatttattacggttcaatatttgagatgacggtattaagcacaggttttgtacggttcaatttcggtttaatcctgttttgtaaagttaaaacgtaaaatcccaaaaccgagaaacttgtccttgtctttcttttcttctccaaaagagcttgcttagttacttgctttcctgaatctgatccctggttcgtttctcttctctccttgttaaattaagagttaagtaagtttggcatcgagtgtctgttgttgtgatccttgtttattctcgtagcaatctcactccaaagcttctaagttataatccttattttaggcatttacttgatcccaagattggagtctattaactagattatgcctaatgccttaagaatattaactttttttatagctatagatatatattttcccatatttttaggattaagattagggtttaatgattgaataatatagttatacaagtgtgtgactgataaaatgaaacaaacgaaaaatctttcccggtgacatcatcagccgccggcgactagctttctaactctggtttgcaaattcaaagggttggttggtggctaattttgaacatatataaatgtcattttaaaatatttttaatttcattttcttaacattgttccaccaactcctcccacattctctccgcctctctcgtttacaaatcccacctcaaaggtcgactctttatctctcttctcaccaacccaacttctccaatg

SEQ ID NO: 30520 - DNA, 3000 bp, Unknown; identical to SEQ ID NO: 13877
  misc_feature (1)..( 3000): 2750-1469P.txt file - cDNA_ID_3032585; gDNA_ID_2214663; Annot_ID_188931

SEQ ID NO: 30521 - DNA, 3000 bp, Unknown; identical to SEQ ID NO: 13872
  misc_feature (1)..( 3000): 2750-1469P.txt file - cDNA_ID_3032585; gDNA_ID_2214663; Annot_ID_136547

SEQ ID NO: 30522 - DNA, 3000 bp, Unknown
  misc_feature (1)..( 3000): 2750-1469P.txt file - cDNA_ID_3032595; gDNA_ID_2214663; Annot_ID_188927
gcaaagctgttagaaagagctgtacaaaaaagatgagaataaaattttttataacgtttttaatagtttttgtgattgataactgttaaagtttgaacaaaactgtactatgttaccattcaaaccctatgactttcacaaatgtagtaaatcttcacacagttcaacgtaattttaaaatttcacaagcttttgacatgtagacttcaataaaaaaaaaagaatgttttggtgtaggtctgtatgatgagacatttaatccctaatgtagataaaaagtataccaggaaatgattgcaaggcagaaactattgtggccgttgaaagaattcacgtggcatgatgattcttttgtgtcgatcccatcttaattatggtgagcgtttggggataggattccgttagcagcctttaataattaagttcatgttctcaaggaacaacagatccagattaaatatttttcatcatgattttagcgcaaaaaaaataaaaaaatcaggaatctgttttaaaattcactaattgtttttaaaggaactgaactgtcctggtaattaattaatggtgcttggttgttctttagaaaaaaaaaattttttctaaagacgacgagaagtaaaatgatagaatccttaaacaaaaagaacaaaaaaaggtaaaatgataatgattaggttatatattcctcatgcacgacatcttcctacatgttttttacgtcgcagttctaagcatttcatttctctattgattattacattattgggtaattcattttgaaattgagaagttccttttctgcaaaccctaattgatgataatgtcacgataaaatttgaacttttttctatctttcgatgaagtggatagtacttgctctatgtctctgtagatatcggtcacgttgtgggtggagacaagtttgattcgttgcacgtgaagtcggtaaccagtacgaatagaatcaattatagattttttagtgtaggcatttgtggattttttaaaaatgttatttttacctatttgctatttttaagatacttaaaaatgtatttatttacgattagtttttacaataatatatattttatactaaatattatatttcaaaaataaatgaaaccgattaaacataaatataacgaataaaatacatattaaatcatatttttatatttttaaaagaagcaaaattcataaattcttttaaaaatcaaaatccactgatgccattaaaaatttgataaatccgtaattgattctttattaaggcaacataaaatttgatgtgcatgcaaatcaagtctaagatatcgtttgagctatcgttcaaaaaacttgaccaacaaaaaaattactaaaacttatttttattattataaaacaagctagcaaaacatttgagattaagttgtaatatctgcatcagaaaaaatggcatatccacacatgcatgtgaacatgtgagatttctctttgtcttctatttaattatacaacatgtaacataatttttccaaaatattatgtgaaacatagtataatctgatttcactgcgaaataaacgaagtgacttgcatatatcaccaccaaaatctttacaatattagttgtgacgaaaaagtaaacaaacattaaaagaaagtagtgtcgacatcatcattcatcatatatgtggataaaaatatctgaagagtcaggatctcgtgatcacgaactcaagaatatgatgcgtttacctcaaatctcaattaatcaaattttttttttccctaacacacaaaaactacattatgagattttttttcaaaaaacactattatgggaatttgcttaattgttttcttttggactaaatgtactagacgctgactgatcagtagaaagctgttaactaccttagccatgtggcgcttattaaactacaacagctagcagtgaaacctaataagaacaaaacgtgttcgattttggtttggcgatactttgtctcattataaaattgcatgttttataaataaagatcaaataaaatatggtgattatatatatatatatatatatatatatattgctgaaacaaatccgtgcataatatatcgcaagtcttaataaacttaaaaaaaaaaaaattgtttatagaataacaaataactaacactaggattgtttttgttttttttaccgtcatagttttatcatactttttccttttgcaaagtttcaataatattaaattgtaaatggttcaaaccaaaaaagtgtaaaaacaaagaagcaagcatgtgaatgtgaattgttgggaaaaaaaaaggagatttatatactcatgtttcaaactcccattaccttgcaccaagatgatataaaagagcactatacaagatttctatcttacaaacatgggcttccgaaatttaatgatattaggaggcagtaatatttttctatatagatctaaagatgctataagtaaagtttctctattttagaattcaccatcttatgtgttgcatgcatgatgcattgcatatagttaaatccattaacgcgtcatagacaataatagatcattggccctcaagttcttctcttcagcagtaaagttcgacttcactttcttacaagaggttagtatatggaccagtggaccaaacaaagaaaacatttgattaattaccaaaaacaaatatctcaatattcttttgtcagcatgatcaaattggaagggaccacgtggcgcttgatgggaacgctccaacgccaaataaccaaaagatatccaaaggaagccaacaaggaagtatagtggaactcgcactcaatggtttcgactcggacacacacaatatctgattttacttttcttttttttttaattgcaagtttgccactataaaatcagtccatacccttagttaacaacccacattcactctcatttccatcaaaattataacttcattttacattttgattaatatcctaaaatg

SEQ ID NO: 30523 - DNA, 3000 bp, Unknown
  misc_feature (1)..( 3000): 2750-1469P.txt file - cDNA_ID_3032619; gDNA_ID_2214664; Annot_ID_188968
aattacagcaaggctctaaaatgtattcagttctaagaaaaaggtacactattcagaaatataatttgttgtttggcccccaaattttctggaccgctaactctaatttcacgtctgactacaggctatactgctatagcaaccgagccactaaaaataaaattgttttaaaacaaacttaaaccaaaacataaaccggagtgtcacttctattctgaaccgtaaatctaccctctaaacccaaaatttcccattttttactggttatgttagattaactggaatctaccttaaataagttttttgatttcaaatttttttctggttatgatcaatttctcaagtaatcagtttttttaagtctcaatattattcgttatcatatccaccagacgtattggaccattgttgtcgaatcgcaaaactaaggtcgagaatgtggctatcaaacttgggagtgtattatattcaccactatgaacaaatggtatggtcttaatactgcacttcgccgtatactcgagggttataacattgcagttccagagagcgctatttgttcgacaaaatgccgaggagatattgatggttgctaatgttggaattgttgtcacaagctgcagagattggtttctttcagtaatagaatggataaagtactctcttttttttttgtcttaggtcattagatcttttaagtagtaaaacagtggcagctgtatcatctagaaacatttttgccagctatcgatgttgctttctgccttaagtaatgttggcttattagttttgtttcttgtttcacttgatcaagtatgcttacactgatcacttgaaattactctcagagatttgttgccacgtgaaagtgaccgttaatctgctacaaacattgttatcggttctttactgatacaggttgctgtggtttatcatgcaacggaaaaggctttgttgcggcttcaactgtatgcatatgatgcacaaaagagaaccgtttctgatgacaatttacgttttggtgctccatgaaggcatcttccgcgtattagggatctcagagggagctaaaattcagctgattgatttttcccaagttctcctcaaaacagaattagttgggtgacaatagccttgagatcaaagttgttctttgttttaccttaccagaaaagaaaccaacgatcatagcatcactgaagaataaactggtcttagccacatggcccacatctacttttagcaaaaccctaattatgatctatgtggtttttgctgtgacttggagtgaactcaatcctctcagaacaacaaatctgttttattagatgtacgtagcaagtgttttctatcattcatgaacagagtacatcgtaagcaaatcttgataaacaaatctggtttgactcaaactcagaatagtacaaaccaaagcagattaaccagttttagctaaaaacccatcaagaatttaagtataggcattctaaacacaatgagagaacaatcattcctcaacgaaattgacttaagcaaactaaacaaaagactatacaagtatgaaaactcatacgtgtcagtcaagaaacaaaataccaaaagtgtaactgaagcatcatcttcactggtagtgaccggaatcacgaatcgagccatcatcgttgaagccaaagtcttcatcttcgtcgggaagatagccttgactgtcttcttgatcaaagaacaggtggtttaactcgtaagactcgtcgaaaaaagagctaggttcaacagaatcttgaggaagattgtcgttgtggccgtcgtgaccagaatcttgaggaagattgccgtcgtgaacagaaacttttgcaggaaccagaacaaaacagagactaccttgctccaaaccgtcaacaacagagtcggcgtggccacccgaaagattgacgccgtcgtgaacagggttcactcctccgcaacggaaaacccagagagagaaaacgtcgcccaccttgaacgttttgtcgttcttatcaaccaccttattccaacctttaacaaaggcatagctcttggtccacttatgtaactcaagcacgtactgttgcgattcaggatctataaaagctactctcaaaccagccgtccgtcgtttcttcatcttttgtgcctctatggttcgtttttcatcttccgttaagaagcctgaattttccatatgcatggaagaaacttggagtcgtgactgtttgtcatcgagatcacacttgaagagagtcttctttggaatgattagttgtggatgatacccattcaatttattcatggatttcagcagtaactccggctgttgcatctctgcagaatctgacattaaatctagagcacagcaaaagagatagaatgatcgtgtttttttcttgcgtttcaagaaattatgtaaagagaagaaagatagaatgagagtgtgatgtatatatatactgtatgttctaactacacccatttagaaaacaatatttactttgaataaactttgaattaattacaggtttcttgacccttttctttatttaaacttgatctccattggaagtatctcaatgagatacccaacaaaaaaaaaataattaaaaaagaaaaagtatgagagaggtgagaaaaagtaggagagaaggagagttaagtttctcggaagagaaactttgagaaactattttcatccaatttggacaggtgtcatcatataattagttcaactattaaataataattaatatatctgttttgattaaaatattaatatattttttttttagaaactttccttatttttattgaggagatggtcttaacatttaaaaaaaaaaaaaaaaaaaaaaacgttttgtggtttcaatttatgggggagaaaacgatttcaattcatataatttgatgaagctttaataataacaatgttgcaaattaatatattttcggcaaaataaaaaacaaatgttgcaatttccttgaatg

SEQ ID NO: 30524 - DNA, 3000 bp, Unknown
  misc_feature (1)..( 3000): 2750-1469P.txt file - cDNA_ID_3032623; gDNA_ID_2214664; Annot_ID_188967
ttctctctctcgctctgtctgttcaaattccttggagattgtgtgttgctattagcgtgactagtatgtttcactagaactagcctatggagcttctgggtcggagactcgagtgtatacccggaaaaaaaggctaaagcaggaaccttttgagcctctggagaaatattccggcaaaggagtcaatacccacaaagtaagtttcctcaattgagcgtttagcattttgtagaactgggttctggagatttatctctcaagtgtgataatttctctaaagtgtgttcttacttggctcagattttgtcttatttgtccaaatgtcttgagttttaagttaatctgactcagccctatgggttgttagtgatcctagtgtttttaaatttgttcgccctgtgcttcagcaaatgagagaaaaccttgattagtgttgccatttgttccatgaccatatatgaccttgtgttagtattttactatttagagtcttatgtgttgcttaatgtaatgtcttccatcttttcatgtctaatgatgcatcagctgtgtggtttacccgatatagaagattttgcttacaaaaagactattggatctccttcatctagtaagtctccttttataaactcacaactttcacattcccaaccattcattaaacttaatatcaatcaccaggttgaaaaaatagccaaagaacctgactactttctaaactagttgcatgatatgttcttgtcacttgaatgtctcaacagatttaatctgaatagaagttggtaggaaaagttctatcatcaagaagattctttaaacggtcaagagatattaattatctagcttttgcaggcaggtcaacggaaactagcatcactgtgacttcagtcaaaacagcaggtatgttatcatgcaccgagtcccttaatgatagggttggtttggtttttactttacagatttcttcacacacagtaacttgttatgtttataatccaggatatccgcctgaaaactgggtcgaagtgctcgagggtattcgtcaaatgagatcttctgaagatgcaccagttgattctatgggatgtgataaagccggaagctttctacctcccacggtataattattttcctcaatttagtgtttaatttttgtgtggaagtatgccatgagatacactgagtttctgctcttttggcttgagcttttttgtttaccgtataaagcacatgtgtccttgagtttcgtataaaatttgatgtagttatagctagtgaatggcttacgaaaggattcttattgtctgctcaagaaagcacctttttctctttgttgttttctcattaaaacaagctatgcttgaaagcagagggatggattgttcttgttttaatattaatcagttttttgctatccctaggaaagaagatttgctgtcttgctaggagcacttctttcaagtcagacaaaagatcaagttaataacggtgagttttgtgctattaagaaacacttatttcacttttctagtttacactcaaatcatctgcatttacaagttcatgattgtacatggatacttactattcagacgctttcaacatgcagcggcaatacatcgtcttcatcaaaacggccttcttactcccgaagcggttgacaaagctgatgaatcaaccataaaagaattgatctatccggtatgttatccaagtgccgtcttacttcttcacgtcattgcctctaacatgagccccttgatgtgctaattttatgccattttctcataaaaaggccttattcttagtaaaatcttggtttaacagtttgcctttactttcaggttggattttatacaaggaaggctacctatatgaagaaaatagctagaatttgtctagtgaaatatgacggagacattccaagctctttggacgacctgctgtctcttccagggattggtcccaagatggcccatctggtaaaattcgactatattattacttatatcttgtgagttttagatgaaatgttttcaaaaagcttctcaaatttctcttctgttctctacatggcagattctgcatatagcatggaatgatgtccaaggcatatgtgtagacacacatgtgcatcgcatttgcaatcgacttggttgggtgtctcgtccaggaaccaaacaggtacctctaaattggcttcaatcagaaatggtattgtgacataccgagcagattgtctccgattctgtttgcctggtctttgtcacccatttgcaatctatgactttctagaaaactacatctccagaggaaacaagagtagctttgcaacaatggcttccaaaggaagaatgggttgccattaacccgcttttggttcgtcattctcgccaattcttctaccttaagacacacataagactatacaaatcccatgatagtattgagtaacatagctgccctccctgatcttcattcttgtcttgtctgacaatcatacacaggtggggtttggacaaatgatttgcacaccaataagaccacgctgcgaagcctgcagtgtcagtaagctttgtcctgctgcattcaaagaaacatcaagcccatcttccaagttgaagaaatctaaccgaagcaaagaaccatgatccgaagtccaagacttttgtattttgagtaaaacaaaaaaaaaaaccattttttgattagtttctctttgcatccaagaaaactgttagagcttcgaggcttgcaatgttgataatgaaaacttgtcgatgtatattaattaggaagcttgcaggtaattaattaattaattttctggtgttaaatcttaagtttttcaatgaaggatgtgaaacgtcagatttttttggttccagaaccacaaaaaaagactcttttttgtcaattgattcgattcaagagttctttcaacgtttggagtagagagagtttgacctatttgaaagtctctgagaccggtgtggcatg

SEQ ID NO: 30525 - DNA, 3003 bp, Unknown
  misc_feature (1)..( 3003): 2750-1469P.txt file - cDNA_ID_3032628; gDNA_ID_2214664; Annot_ID_188964
caattgaaatactcctaagaacagctaaaatcaccgcatttcaaacaagaggaacggagaacaaactcatgggatcaaccctttatatggttgtcactttattgagaacatatcagaacatagctatcgaaatgaaaccattaatcaaagtcaaacaccaagatccttatcaagaagcagagccagatatagcaatggacacactacatataactaatgtgcgacagattcaagtcaattacacaatgataatcaaaatccaatttctcaatggagtgaaattgaaactgcaaacaaaagatgggttcttatctgttgaagcaaaacacagtttctcactattaaactttcataacatttagttcttagctgcagattgttaactaaacaacatcgaataaacctcatgaggaaatacaaaaaactgaaaacacttgcctttaaagagaaggaacaaaaaaccactaattcgtgatactcttcttgctaccaccactcaacatctcgtcaggaattttcttaagctgcttcctctgcttcttagacatagaaattttcttcaaagtcttgggatttgtaatcttctgcaacttagtaccagttctcaaaacattctccttcttccgcttctctctctcttccttcttcttcctcttctcaaccttattactcctaatctcttccttcagctcattcaccctctccttatacgctttcttaatctccctttgcctcttcatctcctccagatctggtttcctgttcttcacaaacctccctgaagatctatgagttcgcggctgtttccagttccgtccggagactttcccggcgattacaccgtcgtaggttggtctctcgacagctagagcaataggtttgtctggattttcagaggaagcgacggcgctacgtttcgcggcaggaggagcaccatcgatgtccatggaagcttcatcggcgattgcttcggcggcggcttgttcttgagattcgcgtttgcgtttgtaggttttgccgccgaatccttcgtcaaggcaccggaaatctacggtgcaagccatttcttctcttctttgtgtggctgtgaggttttggcagaaatttagggtttctcgactatttatatgagtgaggatggagacagggttaaaattccggttttttagccgaccacataattataaccgaaccgaaccggaaattatgtgattcatcaattactctgttttagtgcaaacaccttctcttttaaattgtagaaaaccaaatcaaatcttttaggttgtgaatttggatagaattgggaataaatccatgttcgtgataaaatattgattcaagctattaacacaagttagtaccgcaacaataaatccaaagtaatcttttagaaaaaaattgttaataaatctacattattaccaagtcaatttaaaataaataaataaattcagaaaaataaggtcattggacaaacatccaacctctctagttgactcaagggagaaaatatccaatctctctacaaaaaaaaatcaataaaccataaaaaataatgaaaaacaaattcctaaagttacttgggtctcaagcaacattgtgacattatgaggaatgaccagagctgcttctaccacaacgggttggagaagagagagcaaagcaaagttttccacttccatctcgaaaggaccagatttcaatcacgtcattgactttgaagatttttttatcaatcacattgttccaaccatgacttaacacatatttccaaactgtattaccattccacttctttaaataaacgacatgcttatccgattcaggatccaccaaaaacactttcaaaccatcccttttagcctttaaaaagtcttcatctaagaatctggtttcgtcctctgtcaaaaaatctgacttctctaatttgctgagatgcattgagagacacccctggtttttacggagatcagtcgtacacagcaccctcctctttatgatcagctttggatcgtatccattctcttttctcatcactttcacgagccagtctggtatcgaagaattgcatgtttcgggactatcagcaggacataacgaaacgatgtcgcttttgttctgctgagaggggctcgggatgtcgaggatgattttcttttttcctttgagaactatttgagaaaattcttccaacatatccagcttccaaaacttacaaatatcataagcctccattgtgcggccagagaactacaagaaattaaggaagaggtttaataacaagcttaagagagagatagagaatattatataacagaatttttaattacgttcttactaaggatttgctcttgtttttttcccaatcttccttaaataagttatatatatatatatatatatatattctagtaataaattcttattttaataattttctagtgataaatttttattttagttctcactattttaatttttaattttaataattaggtgaaatccagttaattaacgttttttaatcaaatttttgttttatttcatttatttttcccctaacataaataggttttagtttccaaaagtaaaaaaaaattggattagtttatttgtttatcttgatgaattttatttttttgtgaaagattagtttctttatttcccaaagcaaaacatgtttatcttttgtcatccatgacccaagagaaaaaaagttttgtgtacaaaaattaaaattaggagataatggaatggtctagtggaaaccgaaacattaaactgccattagtattttcatggttattaatgattgttaattactattttgatgaactaccgttcaaagtctttgactttcctaaaaatttcaggaatctcattctcatccgtatattatcatcacctattttagctttgaatttaactataaataaaatgtttgaaacacaacaacggaaacaaaattaattaagaaagaccttctttgttcacaatatg

SEQ ID NO: 30526 - DNA, 3003 bp, Unknown; identical to SEQ ID NO: 25254
  misc_feature (1)..( 3003): 2750-1469P.txt file - cDNA_ID_3032632; gDNA_ID_2214664; Annot_ID_188959

SEQ ID NO: 30527 - DNA, 3000 bp, Unknown; identical to SEQ ID NO: 13885
  misc_feature (1)..( 3000): 2750-1469P.txt file - cDNA_ID_3032638; gDNA_ID_2214664; Annot_ID_188956

SEQ ID NO: 30528 - DNA, 3003 bp, Unknown
  misc_feature (1)..( 3003): 2750-1469P.txt file - cDNA_ID_3032705; gDNA_ID_1972175; Annot_ID_179979
agaaagttacatcggtaagctaatggcctgaggctcatatcaatcatcattttcttctcagaaaatattttgatatattaacttctttgatgcggatttgattcaggggaagttgcctgactcattccatctaatccaacacacggaggcccaacgttttgttggtaaatgcttggaaactgtgtcaagaagattgcctgcaaaggagctcttagcggacccattccttgccgcaactgatgagagagatttggcgcctctttttagattgccgcaacaattggcaatccagaatttggctgcaaatggaacggtggtagagcatctgccgtcaacgactgatccaactagaacaacagatatgtcaataacaggaaagatgaactcagaagaccacaccatcttccttcaagtacagattctagatggcgatggtaagttaaagttctacttactacaaatgtcttgcctggtttgattggaacatgaaatttgttgcgttgctagaaacttgctcagctgaaccgggctacaggatttgtagcacctttagtattagctattcatcataagatagaaatggacgattgtaaccttagcttctgatttttgtaaaactttgttagaagaatcaccaatggaaaatgtttttatgaatctgtttggctgtggcacaggtcacatgaggaacattcagttcccgttcaacattttaagtgacacacctctagaagtagctttggagatggtgaaggagcttgagatcactgattgggatcctttggagatcgctgcaatgatagaaaatgagatatctttgctcgtccccaactggagggccaatgactcttctatccggcacgaaagctttggtcatgaagatgatgaggacaatggcgacacagagggaagaacgcgccttttctcctctgcttcttcctctcacgactctcctgtagcagttagagagaacaatgacgattctagtaacgatgtgatcccagatatggatgatggcaatagaagctctaacaggttgctgaattcttcaacataccactactcacctgccattgatgatgatcaaaatcagcaacaacggagacgagtaaggctacaacagaaaatgagatcgctggtggacacgagaacacaggtgctacaccgatcgctcatggagttgatcaacaagcgtcgtgggcgtggctttgacccgaacacaaacgagctacaacctcaaccgtcgtccactgatttcattcgacgatgttgaaaatagtatgatgagagagcctatttgtgactctttcatgataaagacagatcttcatattggtactagcattttgatttgatgatactatatgaaataattgtttagagtgctttgtatatatgatattcttagggaagtgttacctttttagctctatctcgatttgaaagcgatgcaaaaccgctcgaattcgatttcaagtacgaaggtagcttcttccctgtgttaaagagacaatttagattacattttatgcattttccattacagtggtaacttaatattcaaataatcataggaattaaggatttttctaatcttgatacgaaagttgtttatcttctcgtatcaaacgtagaggcagttgaacaaatttacaaacgaaaatgttcttagattggtataaccattcgtcgaaaactataaagatttacttttatttaaccataagatgatatcatctatcaaaaagtgttaattatagttgatcatatataataagaacaaattataaaggctatatacaaaggaaatttgcgttaattaggttatctaaccgcatgcatccaaaacaaatcatgtatttaaaaacttgatcacaacttgagcaaaatatatggagagcaaagggccatcgccaatagttccacttgtgcttgtggtactcttcggatggttcctatgcggctcgtaccttgtctcactattagaagatgttgtattaccaatcttacaaaccggaacgttcattgtaggaatctttctcttgcttctccttttgcttctccatgtcttatcttcttcttggatctatccatggatcccttctcttcttcttttaccatctccggcttccacgacttctactgactcagacagctttggtcttggatcgtttcttttgttcacactttttctcatctctttctggttttttgggtcactctaatgtttattctacttgtgaattgtatattcctgattgatcatgcaaaatattgctatacactttatacatgcaaaatattgctatacatgttgtacatcatgcaagattccaacacaaaatgtttagcaagaatttgtttaaaattaatttattattaattactgcatcgctcttattccattttcaatgtaatacaacatatatcatccgtgaaaacaacataagagagacaacctagctactaggctactagctaggagcctaggagttgcataataatgagtcgaaagaagatgttatataataagtctccgtgcaaccacctttgacgaccaaccagcacgaagtacatgccacagacgaaagatcacatgcattgttttgggtttttacattataaatagggtcagattttgagtaatatgtgtgtttaaatgaggtaaaaatatataagaaaataaaattgcaagaaacttcttacttcattttattattttttccaaaacttttgtgaagatgtacaaaacatatccaagaaaataatttcaccaatttggtaaatattgcatgattggatatatgtgcaatgtgctatacaaatctttatcaatgcttaaacttcaaatagcttttaccaaactatgttataaaataactttaaaaaaaaaaaaaattaaaatgttttatatgtcatttgaacatttctttgatataaatgtccattattagtccattatatacttatgcaattttcacccaacaaaccgttggatatatg

SEQ ID NO: 30529 - DNA, 3000 bp, Unknown; identical to SEQ ID NO: 9729
  misc_feature (1)..( 3000): 2750-1469P.txt file - cDNA_ID_3032713; gDNA_ID_1972175; Annot_ID_179972

SEQ ID NO: 30530 - DNA, 3003 bp, Unknown
  misc_feature (1)..( 3003): 2750-1469P.txt file - cDNA_ID_3032742; gDNA_ID_1972176; Annot_ID_180014
aaccgaacaacaaaagttttaaaaactaataaaaatttaggtgaatataataataaggccaactatgaagaaaaggtctattttatactttttatataaccttttgtcacgggcactgtttcattcccttggaccccttcttcttcaagatctgtttcttccttctttctctctaaccagattttgttgtaccagagagagagagagagagatcccttaataattcttacacatttatctttcttgtctgaatcctaacaaagactttagttttggtcgatcttataattttctttttttattctatggatttctcttccgggtttcaataattgtcacttccgtagtgtaagtacgcgtgtattgtatactagtcagttacacaagtgtccttatgtgtttccttgtctttaattcatttctgaaactgaatttattcttctctcagattctgcaaaggttttggttttttctccgagtttttttgtccttcaaaaaaaactttggttgctctctctctgttcaagaagatccgagcttgattcctaatctgtgagttttatgcattccatttaaagctctgattttgtattcctgtatcaatgtttccccctaatgttatagattttggataaaagattaagtcttgatggatcttatgattaattgtaacaatttatatcatccttgggtcatgaatttacctctgtggttttgcatttgcagatcatttgagaagaagaaactaagaaatgggtaagagttggttttcagctgtgaagaaagcattaagcccagaaccaaaacaaaagaaagagcaggtctttatgctagattattcacattttttggttatctatatccataaagagaaatgcttctatatgtctttgatgtaattgaaaagctgatactgaaaatggtattgtttttgactccattagaagccacataagtccaagaaatggtttggtaaatccaagaagctagatgttactaattctggtgcagcatattctcctcgtactgtcaaagacgcgaaactaaaggagattgaggagcaacagagcagacatgcttactctgtggctattgcaactgctgcagctgcagaggcagccgttgcagctgctcaagctgctgctgaagttgttcgtctctctgcattatcacggttccccgggaaatcaatggaagagatcgccgctatcaagattcagacagcatttagaggatatatggtaacgtttttgttttttaacattttcaagtctagtaactataaaggtggttttgctaactaatggaacaaagttcatactttttggttaccctttattaggcaagaagagcattgcgtgcgttgagaggtcttgtgaggctaaaatctttagtccaggggaaatgtgtgagacgtcaagccacatctacattgcaaagcatgcaaacactagctagagtacaatatcagattcgtgagagaaggctccgattgtctgaggataaacaggctttaacacgacagctccaacaaaaacacaataaagactttgataaggtaagcaaatcaaatccttacaaagatgtttataattttagttacaaacttggctttttgttgatctcggatacatgagaaattcacaatgtgaaatagattatgtttcttgctacaaacttaaagattgtattacgttttgtgaaatagactggagaaaattggaatgatagtacattgtcgcgggagaaagttgaagcaaacatgttgaacaagcaagtagcaacaatgagaagagaaaaagcgcttgcatatgcattcagtcaccaggtattaaactagtttcctatcttactttagtgtgtctttacaccagaagaattatatatctcaaaatggtgaaacttgttaatatgcagaatacatggaaaaactcaactaaaatgggttctcaaacattcatggaccctaacaatccgcattggggttggagttggctagaacgttggatggctgctcgaccaaacgaaaaccactcactcacaccagataatgctgaaaaagactcttctgctaggagtgtagcaagccgtgccatgtctgagatgattccacgaggcaaaaacctttcaccaagaggaaagacaccaaacagtcgaagagggtcaagcccgagagtgaggcaagtcccaagtgaagactcaaacagcattgtgagtttccaatcagaacaaccttgcaatcgtaggcatagcacttgtggatcaattccatcaactagagacgatgaaagcttcaccagtagtttctctcagtcagttccaggctacatggcacctacacaagccgccaaagcaagagctcgattctcaaaccttagtcctctaagctcagagaagacagcgaaaaaacggctttccttctcgggatctcctaagactgtaagacggttttcaggtccaccaaagctggaaagcaatgttactaagaaagatactaatcttgcttaaacagagaatggatatatatatatagtttatatctgacattgttgattaggcaaaagtctggtgcagaggtgaattcagagaagattctgttatgtctttgtttgtttttttggtatttttttttactacaacaaacttaattatttgtttgacttttttaattggttgaacatatttgtattgatgaagagacatatataattttccacatgctatctgagttccttctttaacatatttgctaacgccaaagtaatctaaaacatagaaccagtattgaaacttaatgggggtgttttttaggtcaattaaataataaaggggttaaattagaaataaagagaagtaaaagggcctgtaagccttttagggattctagggctttccttcattggtcagatcagacgacgttttacatcttcttcttcttcctcttcgatattcgtcagtgtgtgtattttggggaaaactttgtgagcaaagagcgagaaaatg

SEQ ID NO: 30531 - DNA, 3003 bp, Unknown
  misc_feature (1)..( 3003): 2750-1469P.txt file - cDNA_ID_3032745; gDNA_ID_1972176; Annot_ID_180013
aaacgacatatacttccaaacgctatatacaagtcgaagagaaaattaaatgacaataacaaaagatatattttttgacaaataatcaccctgaattcaaataaatagtttgtatttttaatcaaaaaataaataaataatgttaccacaccataaacttcttaaaaccacatcatatatgcagcaagccagcaaatatagatatatcttttgacaaatattcaccttgaattcaaataaataatctgtatttttaattataaataacataaaaatgtaacaacaccgtaaacttcttaacaccacattatatatgcaacaacttttgataacatgcgtttttaccaaattttgtttattcgtgaatagcatattgttatttattttattattattaattattagttatagtaggcatgttaaaaagtcttgaatggtgacataattattagaccactgttaaattgtttagtccgcacgattcatacacggtcttaacttaatttcgatttcaaaatttgaatttcacagtgaactaatataatctcagtcccttgacgagaattgtacatggatactggaacaccgagttgctaacgatgttgtatctgttagagctttccatcgccatctttgtgattcgctaacatctcgtagagcttatcgtacgagaaacaagatgttcaaacttgttttaaattaatcagcggtttgacacaagcggttcttgtgtaggtggctagaatcatctatgatccaagcatcataagccatatctacatttccgggcctaaagattgaagatgctgtatctgatggatcattggcttgctcggtgatctcctttacttttttgctttattttgttttgaattcgtttactttgttgaatcttccaagagtctgccttaaacttgtgaagtacttcatgaatttaactggtttatatcattggatttgttttgtttgagcttttttttttaaactttgaaattagaaccttgaagtatttgatgaatctagttcatttgatcagtgtcagaatttggttttaaaaaagtcacatcaaaataattggggttgattggctctttcccctcatcaatacttgcttcttttttatacccaaaacaaacaaacaaaaaattgttaaaaggcttctttctgtttttttcttttactatttgacttttactttcgtcaaaaaaattaaaactttggcaaaaaaagaaaggggcattccgagaattgaactcgggacctctcgcaccctaagcgagaatcataccactagaccaaatgcccttttgttcaattgtttggttgacatagtatatttatcttcgacatattttgggacataacctaaactaaagtatgtttaagaatgttcttagaaccaactaagtaacaaaagaaaaatccccacaaatttcccacagaattcttaagaatagaaacataaatggcaatggtggtggacctgatgggtcaagagccatggaggagctggtggaccacatgtctatcttattggatgaaaaacgacaaatctttgtacaaagagcgttttgagaattgaaccccggcctctctcattcagaaaattaatacaaatgcaaaacatataatttgtttatcaactgcttatagatttcccaaaaagaaagtagaaggttcaacaatttcatgttactagctaccataaacattaaaactggaaattaaactagaaaaaaatgttcatttcatggatatgaattgcttctgtagcctaactgggtttagatatgtttctagttagtcctccaattaaacagatcaattcgattaaattttagaaactcaaaacagatgtctgtcacatcatccatcacaagaacttaaaaaaaaaaaacacatttctcatatgtcaatttaattagttttttttttccaaccaaattggttcatgtacttgattatgtatacactatacacactcatataaatggataaggtagttttatagtccaaccaccgacaaaacgtgcattccacttcttcttcttcaattgccatgccgtcgtcaatatctcaaacttgactaatataaaccaaagaagaagaagtatataacagaaccaaaaaatataaaaattcatgttcgttgtattaccaaatttaatttacacttaaataaacctaccaaccaatcactcaaaacaaataccagttcgttacacaatggacacttgaagttgaaagcaaccgaacaacaaaagttttaaaaactaataaaaatttaggtgaatataataataaggccaactatgaagaaaaggtctattttatactttttatataaccttttgtcacgggcactgtttcattcccttggaccccttcttcttcaagatctgtttcttccttctttctctctaaccagattttgttgtaccagagagagagagagagagatcccttaataattcttacacatttatctttcttgtctgaatcctaacaaagactttagttttggtcgatcttataattttctttttttattctatggatttctcttccgggtttcaataattgtcacttccgtagtgtaagtacgcgtgtattgtatactagtcagttacacaagtgtccttatgtgtttccttgtctttaattcatttctgaaactgaatttattcttctctcagattctgcaaaggttttggttttttctccgagtttttttgtccttcaaaaaaaactttggttgctctctctctgttcaagaagatccgagcttgattcctaatctgtgagttttatgcattccatttaaagctctgattttgtattcctgtatcaatgtttccccctaatgttatagattttggataaaagattaagtcttgatggatcttatgattaattgtaacaatttatatcatccttgggtcatgaatttacctctgtggttttgcatttgcagatcatttgagaagaagaaactaagaaatg

SEQ ID NO: 30532 - DNA, 3000 bp, Unknown; identical to SEQ ID NO: 28228
  misc_feature (1)..( 3000): 2750-1469P.txt file - cDNA_ID_3032753; gDNA_ID_2213619; Annot_ID_180907

SEQ ID NO: 30533 - DNA, 3000 bp, Unknown; identical to SEQ ID NO: 28228
  misc_feature (1)..( 3000): 2750-1469P.txt file - cDNA_ID_3032753; gDNA_ID_1972176; Annot_ID_180003

SEQ ID NO: 30534 - DNA, 3000 bp, Unknown; identical to SEQ ID NO: 9740
  misc_feature (1)..( 3000): 2750-1469P.txt file - cDNA_ID_3032757; gDNA_ID_1972176; Annot_ID_180002

SEQ ID NO: 30535 - DNA, 3000 bp, Unknown
  misc_feature (1)..( 3000): 2750-1469P.txt file - cDNA_ID_3032761; gDNA_ID_1972177; Annot_ID_180041
ttgcatggcgagattttttatcccgaaagttcagtctaagaatgatgtaaaattcctctgttaagaaaaaaatgcctttaacaaaataaagaattcgatgttgaagaagaagaatatatatattttggtgctaatttgcagcacaagatataaaaattagaaagtataagccaaaaaatcaaatcatgattcgacaaggttgtttttaattctttcgtgattcttgatgttatacccctaatataacttaccgataacattgaattagtgaaaaatatttcgaattatgatcaccagtctctatattatatttgatgattttatggttacgaatgtgaggggtacgtaagattagtaaagacggacatgttgtaggaaggtgtcccagtccgcgatttctaaaagaaagatttgtggtccaaacgtaaaatttaatcagaccttctttttaatggacctcactatgtcgacacacaacatcaaacatatccctaactatatagttcataatcaagatgttttttaccagaaaaatataacatcaaacatgtctctctctaatcattatatttataagtttttcgtatcagactaagaaagtatatatcaacctgagacaaaatgatccggtaagaagaacttcaatttagatgacaaaacttccaattaatttgaattacttagaaagggatgaagttgagacacaaagaaagaatataatagatatattgccttagcttgtaattcacagtttagttgtttcaaagagcaatatcattggaatttcgtagtaaccaatatatattgtggttatatatttgtggggagtgtgtatatgtatttgatatgttgatatttttcttcaaaagacagatgatagagctaaaacgattttttgtcgatatgttgcgcttcgaagtagctgaacctgagtgataatgtcttcatctattggacaagtagggaagaagctagctcgccgtatgcaaatacataaagttccatgtttcacttcttctaggggtgaatagacgaggacacacgatacagtttgtcatgttaatctttcaagctcaaaaaatataaaaattgtatgaaaatctgatacggtaaatctatatattcttttgcatgtttttaaaggagcacttatctttatttgttatagaaatttattatttaaaagaaattcgtctttatagaaatgtgcatgtgttttttttattagtaacacattttcatgcaacaggaatcttcgcttatctgtagtgtacatctcatgagcccatattcatagttgtaaagcaacaccttctctgcagctttttctttcctattgttttttgtatccatagttcacatctacacactatataaggctattacaaacaatgatacaatatatgttctcatataatttgatcttaattttcaagatatttaaggtgggaaaatatcgagatagtatacaatggaaatcgttaccacgtgcatgccaatctttagtagaagaagattcctagattccaacaagaacatgcgcattttttcacgaaaggctggaaagtttaatatataatggtcgaaaaaataggcataatctatttaagtactagcttaagtgttttacgctagatctggtgttgacacttgtacacctggttttaaagttgcagagaaaactagattaatgctcaaattgtagtaagtagattggataatttacactcggaaaaaacaagttttttcagaagaattagactgttgctcacttgagaaaaatctagctagctttgttaattgaggatagttagttatagtatttgaatgacattaaggtgtttgaatatcgcatgaattgtcgccttggtatttgggcaattaccggtcattattttgatctttgtgatgtcaactaatcgatcccaaccatatatatcataaactactgtctcttaattgatccattgtgtttttaattttatcattactttttttaactagttgagagaatgattatctaacccctttcatattcagaaaacttaggttttgagtttttgctttatttgctgctctcttgaattaatagagctctcgtatgcgattgactttgggtgatttttttttgttggaaaagcaaatttcattgaccaatataactaaactaacacactacttccatgtggttaagggccgggatcatttattatttgcatcttttatacgacaatgacaaggattcgttctcattactccatcccattttgtggtatgtaaaatcctaacttttttactgcattgatacaacattttattttagcattagatcaatacgatggacatatgtcatcaagtgagggggtagaagtttgcaactaatgtttttgtgctcatgaatcaatctcttctaggtaacattatttcactcttttctatagcgaatactgcaatgcttttacgttttaactaaacatgactaaaccaaataccaaaaaaaaaacgagtaacactttggtggttcctatctaagttgaccggatcactcgatttgataaaaaaaattatagtaaaagtttttgtttttgaatacaaattatatatttgactaaaattcgaaacttaaccgaaactaaaaccttagcagataatctatagtatagtagattcataaaccgaaaaaacaaaaatctaaacctaaactgagtaattactaatggtggatccttaaaacaaagccataatttgcaattgcaacaaatgtttttgtttggagtaaaaaccaaaaaaaaaatgatggggagcaactaaaaatgtaaaatggtcccaatctaatcgcataagttgggaagatagttagtagttctcctactcccaactacatcctcttcaatgctcaatctcgtcttcttcttcctctctatttaatttcccttgtctctctatctctctcaatttcctcatctgggtcttcctcgtttgctccgcttaagcaccatg

SEQ ID NO: 30536 - DNA, 3000 bp, Unknown; identical to SEQ ID NO: 9751
  misc_feature (1)..( 3000): 2750-1469P.txt file - cDNA_ID_3032798; gDNA_ID_1972177; Annot_ID_180049

SEQ ID NO: 30537 - DNA, 3000 bp, Unknown; identical to SEQ ID NO: 9747
  misc_feature (1)..( 3000): 2750-1469P.txt file - cDNA_ID_3032802; gDNA_ID_1972177; Annot_ID_180060

SEQ ID NO: 30538 - DNA, 3003 bp, Unknown
  misc_feature (1)..( 3003): 2750-1469P.txt file - cDNA_ID_3032810; gDNA_ID_1972177; Annot_ID_180055
tccaaagttagagaaatagatggtactggccgaaattagtatttttctagacaaatatttagaaagtagatggtgaaaatataggttcataaccgtttgtgatctttttattattattgcaatgagatgagatctttaatccgattaactctgggatctattaataatacaatgtgagattaacttcaaattaaaatagcttattggaaaatgtccaaccacgtagaaattatatcagtcatacaatataaactaacaattaactggttcgttcttgaagcaacgatgatgaaataattaaacaacgtaatagagaatttgagttgacatcatatgcatgactttgtctttctagtgttcataaaataatttcgaagttctaccaaaaatatgaataatgtgcatatgtataaactctgccatggttgaacaaaagtttatattttcgacgcttttcaaattaatacattgatactttaggtatatacgccgtacacagcacgtctacgtagccaacttttgtcatgcatgatgcatttatacaaatcgagttatttgtaagtaatatcgtaaatttctatttaaatccagtgcaatatatttttatcattaaaaaatgcaaatcaaacatgaagcatatgaaaaaaatacaccagaaccatacattttatatttaaaaaattatctacaacaactatgcaataaaattatgaaaatgtaaataatcaatccattgggatagttttcataattaacaataatatgttggcaaatcgaagtgagtgaagcatgagatggaaattaaaaaagaggaaaacagttaggggcggtgacggtggaagagcattaacgacatttggtgatgacaaagcagatctatgcaccaaccagatcttgtatatctgccacatcatccacgccagcaaaaaatatacatacgtgttatgtttaattaatcaaagtttatagcttctcgtggttacagatttttctttctttttttagtagatatgataatgtgaaataactataaatcataagtcgtatctaatttagttaaaattaaagtgagatacatttgacataatagtgtatatatacgtgtaattagtgacgtgtattatattttttccaaatgcacatgaacgcatacgtaaccacttgcatgtgaatttattatctacctctactctctcccgacgatttctcgtcttttcatttatttcattctttatacaaaaacagttttcacttctagttatgtctatctattgttcttatgtattttattatgtgtatatagatgccaattctcaatttttcatctccaactaacaaaacaacttgacgatcgatatgctaaaacattgtaaggcatgtccgtgtgtattgaatggtatcacagtctacggaagttgcacattaatgtggaaaaatgtatgtcgaacaaatataaagtacataaatagatctgacccactgctccaagaggactagggtctagggcatgtacggcgtacgatcatgtatttgatcatctgacaatgaaaacatgatatatagcacaacccaaaagatccaatctgatatgatatatatatatatatatatatatatatatatgaatccaaatatatgtcaatgaaaacatgatatatagcacaacccaaaagatccaatctgatatgatatatatgaatccaactatatgtctttaaaatatcgattcatttcacatatattgagcaagtatagtactcctatagtctcctactgtatatgagttaattcacttattaagttgttactattgaactttgacatggtattagtgtatggttattaatccaagtaaagtttgttatctaatcctaaaatgatttataaaggaatctttgatttacataacacttgttctttgatttgatttgagaaacgtatctaggaacctttgttttgggaagaaaatgatgtgtgcgcttaattaatactaatacaaagcgctgaaatcatgaaataatgtcacaaacatgtacatgcgcagcaattccttaggcttggaatacaagtaagtatagatgctaattatgaactccaaatcaagcaatacatgaaatcatacaaaatgatttataaaggaacctcggattttagcttaaacatgatgactttttatgtttgtgcataaatgaatctttggtttatttaaattaaacatgatcctacatatatgctccatcgaaatttgaacactaatatcatggacaaccgatgagatatttgttaattagaattttcttaagaaatagctaagaaatcattctatagagaaagatgtaatcgaaaatgtaaaataagacagattttaagttcaagatatagtattgagtgttatatatatcatctctaattcacttttgacaaaactaaaattaaatctgacacatagtcacactgtttaacataaacagatttcacgagaggatttgtagcataaatttgataattataattttatcaagtaaaaataataaaatacctataattatgtcgcaccatattcactacaattgtttattctccaaaaacaaacaatctttttgctgtaaaaatgtttagatttttgttaattttcctttttttttgtttttggtttacagattttgtttgtatagacaaggtcgggctgacccggatattcggatccgtattgtcgtattgacaccgtgaacccaaccaaccaaaaccctaaacccttttttgacttgtctctacttgttacttcaccgccgcgttctcagtctctcaaattcctctgtgctttcgattcttaccagtgaatttttcttattttacttatcttatgctcgtatttggaggaactgagcaaaaccctagttgtttaattgggtcaaatttgtagattgagaatccaaatttatcgacctagttattgaatcccgagttgatacctagaaacccttttgcagtcgcagtaaaatg

SEQ ID NO: 30539 - DNA, 3000 bp, Unknown; identical to SEQ ID NO: 9744
  misc_feature (1)..( 3000): 2750-1469P.txt file - cDNA_ID_3032814; gDNA_ID_1972177; Annot_ID_180053

SEQ ID NO: 30540 - DNA, 3003 bp, Unknown
  misc_feature (1)..( 3003): 2750-1469P.txt file - cDNA_ID_3032821; gDNA_ID_1972177; Annot_ID_180051
taaattcatgattttggtttttgacctctatcctacatttgtagttcgtcggagacaaggttgcctatgcacttgctcaaggtttgaaagtgattgcttgtgttggtgagactcttgaggagcgggaagctggatcgaccatggatgttgtggctgcccagaccaaggctattgccggtatgtatattgtcaaacatttaatctctttttgctatctcagttcgttctcgtttacagtgagacctgttttgatgatagtgatgcccgtttctacgcactatactcccttagtgtgtgattcaaaccccacagaaatatttgttggctaaaaaactctttttgttggtaatggcagatcgggtgacaaactggtcaaatgttgtcatagcctatgaaccagtgtgggccattggaaccggaaaggtcgctagcccagcccaagctcaagaagtaagtggttctcgatgcgcagttgcactgtaacgtgttgcatatggtcatgatttaataggaaaaccaatgctgttttccttacgagagcttgtttcgtttatgaacaggtacacgatgagctgaggaaatggctggccaagaacgtgagtgctgatgtcgctgctacaacccgcatcatttatggaggtagatagatgataacacgatctttaattaaacacccctatatagttttctatgttacttagcttgattatgcaaattattatcaggatccgtcaatggtggtaactgcaaggagctaggtggacaggccgatgttgatggtttcttggtcggtggtgcttctctaaaggtacatataatatggtttctcttgtaatgatatctttcgtttgtctctttcaaaaccatgactaatgttttcattcttggtctttttgcagcctgagtttatcgacatcattaaggccgcagaggtgaagaaaagtgcctaatgagctcattaagcaatttaaaagtcctttgcttttccagtcgcaactctgaaaaaatgaataagttggtattatgatatgatacattttgcttcagttgtatttggcaaaagtttctctcttactatattgttttgagaacgcaacaatcattttcttcgccatttatttagctgtggacttgcaatttgcaaatcccttccttttacagtcttctcaactcttcagagaatctgtgtttggagttcataacccctcgggccttttgatcaaacccctatttctaatgtcgtccgatcataaacctgtgtgttatataatatgttgtttgttccattttagactttggtattttgtcatgcttgatctctgaatcatgctgtcaaccactttgaaaatggctttacttgttaaataaatgacgagagaatacaggagaagtgggaaatgactttattttttcccttttatcgctttttgcctattggtctgtcatttttgacattttagcttttagaacattattattttcaactttattgtcatcatcttgaaaaatgtccaacattacgaaattattatgtagagagtaaaaaaggaaaagaaatttcatggagaaactcattgtattaggaatgtcaatgtttgtagaaaacaaaatgcttatgtaatttgagtaaaacggctcagtggaactaaagtgataatgtaaaagagacggttaagtccaaaataagagctcccgtatgtcagaattgttcaaaccatttattaaaaaattggactcagtatgatgaaaatgtgtatggattttgatccgaccacgaaaatccaactagtgccaataaaaactccacaatatgtgactcagctacaaatgtgataacgtattatctcccaagtcaacccacatttctggtgacttatattttatttatttctgagtaatatttaagaaagtagggattgaatttttatgagtattatattatatagttgaccttggacttatttgcgtaacgagcaaacaattgtgaccttagaaatggaggtttgactaagtcatcgatcatttcagcaatagagtaattttgggtccgtatgactcaaaacaagttttggtaaaaaatttctctgttttaaaaacttgtatttataaaacttatgtcccatcccatgatactaaatttaattacattatacgtatgtagtcaagcataattttttcctgaaaaatcttatttttcttacctacttgtaaactttaatttaattcctggttaagtagatatttttcttagttcttacaaatcttatattttcttacctacttttataaacatttttgagaccactattactaaacccgaatctgtttcatcattccacacccaaagcatataaatcgaaaatatctatgatcacatgaatatctatcattttcgacaaaatttgtccttttttttctttctttttgtatccaaccccaccacggcgaatttatttcaggcctattaaagattccaaaatctcatgaccatctgactcagatgtcatatctattaaaaacgttattttgaatcttaaacatatatcattagtgatctttttgcacgtttactcagatgcttaagatcatcaaaatcaatctatgaatttcaaaagttttaaaaatcatacaatagaaaagtcccactgatcattaaattgttattactaattttatttagaactcgtttattatcttttggtcaaaaatataacttttgtctgaattcgttttttttttgtttggacaagaaaaagacctttcttcttccttcggttgcctctaccatctcatcaacacacatcttctctttctcttctctcatcctctctcttcttcagtgtttactttttctctttctcttttttttttctctttattatttcgctttaatgagttttatctgatagaatctgctccacccaaaaacagcataagaagaaattcattgtcagagaaaagtgcaaaaaaaaaaaacgatcttcttcatcattctactaaatg

SEQ ID NO: 30541 - DNA, 3000 bp, Unknown; identical to SEQ ID NO: 9752
  misc_feature (1)..( 3000): 2750-1469P.txt file - cDNA_ID_3032825; gDNA_ID_1972177; Annot_ID_180045

SEQ ID NO: 30542 - DNA, 3000 bp, Unknown; identical to SEQ ID NO: 9759
  misc_feature (1)..( 3000): 2750-1469P.txt file - cDNA_ID_3032855; gDNA_ID_1972178; Annot_ID_180108

SEQ ID NO: 30543 - DNA, 3003 bp, Unknown
  misc_feature (1)..( 3003): 2750-1469P.txt file - cDNA_ID_3032859; gDNA_ID_1972178; Annot_ID_180112
tgcacttcattgggtctataaatgttgaagattgaaatttaagacttttaccaattacaatacatttgaaaaaaaaaaaaaaaacgtttgcgtttctcacaccatcaaccttacatatggctgttatatgagcctcgagagacttggctttcttcaaacacaataaatagatctgaacgaaaaaaaaaaagatgtgaacgagttaactttattgattcaaaataatattcagagtcggctaaaaggctttagataatgacaacttcttcttctaccacattcttctagctaggtattaataatattattccaataataagtgagaagttttgttggtgaaaaaaagagaagagtaaaataaaaagaaactttgaagggaaactttgatttggtcaaaagccaacgacatgcattggctctatatatatgtgtctttaagaactcatttattactcttcacttcaatcaaagacaagaagaaagttagccagaaaaaaaaacagataagaaaatgtctatctttctttgtttcctcttacttcttccactctctttaatcttcttgaaaaagctcttaccgtcgaaagggaagcttcctccgggacctaagggtcttccgatcatcggtaacttgcaccagtttggaagatttcttcacaaatctcttcacaaaatctcccaagaatatggaccggtgatgcttctccatttcggggtggtccctgtgataattgtctcttccaaagaaggagctgaggaagtgctcaagactcacgatcttgagacttgtagccgacctaagacggtggggagcgggttgtttacttacaactttaaagatattggttttgctccgtatggtgagaattggcgagagatgaggaaaattgcggtttccgagctctttagccagaagaagctcaaatctttcaggtatattagagaggacgagagccaattgttggtccggaaggtatcaaaatctgctcttgagacaccaacttcatcagttaatttgaggaaggtcatttttaccttcgcggcaagtatcatttgtagactttcttttggacaaaatttttgcgattttgtcgatatggagacagtggaagagttggtgcttgaatcggagaccaacctcggctccctggcgtttgctgacttcttacctgcagggtggatcatagatcggatctccggtcagcattccacggtgatgaaagccttttccaaactcaccaatttctttgaacttgtgattgatgatcatttgaagagtgggaaaatcgaagatcactcagacatcatcagtgtcatgttggatatgatcaacaaacccaccgaagttggttcttataaagtcaccgatgatcatctcaaaggacttatgtcggtgagtataaataatacctttagtaaaatcttcaaagttctacattagaggtaacttgagggacaatattatagcttggaaagcaagttaacttataagtataggcaaatataccgttttgttcttatttttctgacttggttcataatgctccctagatttatattgatgtcctattttaaaaccaaaatcatgaattattttccatgtcattggatcaggatgtgtttttggctggagtgaacgcgggttccatcacaatgatatggacgatgacagagttaagtagacatccgagagtgatgagaaaacttcaagaagagattcgagcagcgctcggacccaacaaagagaaaatcacagaagaagacctcgagaaagttgagtacttgaagatggtgatcgaggaagcattcagattacacccaccggctcctctcttactcccaagactaacaatgtccgacatcaatattcaaggctacagcattccaaagaacaccatgatccaaatcaacacgtacacaattggacgtgaccccaaaaactggacaaaacccgacgagttcatccccgagaggtttgtcgataaccctatcgaatacaagggtcaacattttgagctattgccgtttggagccggacgtagggtctgtcccgggatggccacggggatcaccatcgtcgagcttgggcttcttagccttctttacttcttcgattggagtttgcccaatggaatgaccactaaagatattgacatggaagaagacggagcttttgtcatcgccaagaaagtctctcttgagctcgtaccaactcttcatcgctggtgaagcatgcaactataactatgttaaataatgacaagaattctatatttatgtccactttactaccggtttggattttgctttgttcatgtaatccgcatgtttcatgttatctttcaagttctgtttttatgttattgtcaaaaaaaaaaaaaaaaaaaactgtttttaagttgacaaaagaaaaaaaaaaaaggttgacattacattacattaaagtatttgactcccgaagatccagggtttgttatgataaataattggttttcaaaagtatgaaggctactttaagttacttgtagaagaccaatactacgtagtcaaaactgctctaatgcttttcattcaatgattgaaccgtgttattaattagttaattagatgtatccaaaacagtttaattgaaaaaacatataatagtaaaactttaaaatttggagttcttttcttctaaaacatatagttattggagtaaacatccaaaatattatgacttttcatattctgttattagtaaattttgttttataattattcttttagaacttggagacataatataaataaacaaacctgacatttcgttgataatttttttttttttttaaaccctagttgaagataaacgacgtcagtaatcctctgcgttttactctgtttttgagcttgtctttgttccagttctctgtttcgatgttcttttatctttatttatcatcatcagctaaagaagttctcaagactcatgacctagagacatgcactcgacctaagatg

SEQ ID NO: 30544 - DNA, 3003 bp, Unknown
  misc_feature (1)..( 3003): 2750-1469P.txt file - cDNA_ID_3032866; gDNA_ID_1972178; Annot_ID_180106
ccgggaagtaattgtgtgggcatgatcttcttaagtggatacctcaattctgaaaatgatctacagaagtataacaaatggatgaaagatgtcgacgaactaaattgctttgattttggattattttttgttttctgcataaaatattttttttataaattaataatttcgaaaccgtgaaattctattaatttatcgataaataaatatatattatcagtttgttattgtaaaactaaattagtacaaagaaatgattatttttaagaacatctataacaagctaagcattcaaaccttcaaatttgaaggtttttttaactccaacaaactctcaaacccttattttttgaggatgtgaataatgaagtttcaaatttcagggtgcatactattcacacattcaaaatctcttctaaattttattttagtccttatacttaatatatcttacaaataattctattacatttaattatgacaaatatatgcatataaattcaaatatattaaaatattaaaaaaataaattaataaatttatacaacaataatattacattgagcatatatgaaagcattatagacataattacattgaatatttttgtaattttacatgtaattttataaatcattttaatgttttatgttatgtttcttttctaatttatatttaattttatataaaaaattaaaatattatttaacataattattttgataatatatgttttatatttatttatgaaacttttatcattatcagtgattattgttactattaaagactataatgtaaataaagaaataaaaaataaatttgagggagtatcatcggtggagatcaccctcaaaccttaattttaagggtttattaccttcgtagataacgtttttttattttgtttttttcatctattgccttgttggtatgaaaggacctggtttaattgatgtcaagaaaagaacccggtttaatttaatttcggtcagattcaccaatctcgaatccattctctcgccgtctttcaattctccgccatcgaacgaaacacagaatcttcaggatgtgacaacactggattcctccgccgtcttctccttcggtggagaagcgattcgaattggaagaatcggttggcttgacattgattcaacgatgaggctccttcaagctagtcccggtaatgaaaaagtccttattgctgcatttgcataataaattgttgcctgatatttcttggagatttggttacttgctttagctttttgatgcaatgatctatagtagttagtgggaatttggtgaaagaatgtatctttcttttacttgcttggttagttcaggggatacatacaactaatcttgaagtagctattgtagtactttaaggaagaagctttactggtaatccaaagcatggcgaaaactaactgtaaagtactaattttaactacacctaatttccatactttctgtttatgaactcactcttatgagtgttaaataccattcattcatcacatgtgcacacctcaagtcttatcaaaaacatatatatacttaggattacatcacaaaagcagaaaacataggcttaatatccgcttcatcacatcacagtctttacatatactgatatacacacatatacacgtcttaggagctcctttgtcccaagtcatatcttttttctcgtgttgctgattctaacctgttccatcttctccaccaccaccacctcctcctccgtttgcaccccaattgtcaaagttttgtcttggaatgttatggtggttgtctactcctcttgttgatggaatggcggatctgtccttctgaacatggtgaagcctctgatcttttgtgtatatccctctccctcctccctccacagttaaagagctcataaccaccattattaccagcaccactaccaccacgacatgccttgtctgaatttgcatttttgttttgtcttgtttcatgcaatagctttcctttttatagaattgagaagtaaggtttaggtatgggaaatcttgcaactgttttctgtgtgttccactaggaaaagacaaaacaaaagattgattgattagcctttaattgatgtgtttgtttgttattgttgtgacttgtgacgatgatacaaaaatcaaaagaaataataatcactcatccaaataggaaagttccaccgttaaagtggtgaagacgacataagaatcaatgagaagaattggttagttgcccgaataggaaatttccaccatttctagtggatcacctttcttttaatcatagacttttatatttgtttgtgtaattaaaagtcaatgggatggtaacaacttacataaagtaaaatttcaagcaatttacataattttcattcaatgatttcattcttctttctaatagcatgcgttgatagccgaacaagttgatgacaagtgtcttttaatctaacccacaaagctaccatctgaattatctatggttaaatgatcagttacaaataattcacttcgctaattacatcaaaagatttggtagagacaaatcattcagagaaagtaaccatcatgatcatgcattgggtctttgttgggctgcttaaagctcgtaatgaagctctgtcaattgctcttggggcttaattttattttggaaacggcttagtattatagtgaagaaaatttatatggaatgtaatgtatttttcaactccttaatatgaggataaccatgtgagtttcttcgtctatctgaacactttttaagcatagtttgcagagtttttaatgtttatgtttatatttaaattgatacccattgattaattacaggtcatctatttctactgctgtgacactcttttgacttcatcttcgtcttagcacattgcatcacatgccttgatgtctaaactataaaatgactttgaatcatcattacatttgatatttgcacttaatgtcttcctcgaagttaatg

SEQ ID NO: 30545 - DNA, 3003 bp, Unknown
  misc_feature (1)..( 3003): 2750-1469P.txt file - cDNA_ID_3032872; gDNA_ID_1972178; Annot_ID_180100
tattaaaaaatggtatgtctacatacccttttgttttcttctacttttggctttaactttattctttttcttttgtctaacttctttttaccccactattttcataattaacctcaaaaagtcaaaatggagctaatttagggtgtttgatttggtacaggaataacaatctggggatgtggactactactggatcggaaggtactagcggtttagattcttataatgactataccgatgaaatgtctggcgctggttcaaccaaccggttatctttttcagttcttgttttcttgctaagttcgatatcatatttggtcgtgttcacttcttcaacccaaatgtttatgttgtaacatgaattgaatttacctattttatcaaggaacaagcaaaaagttgtttccatactcattcttgtgcattcttttcttctatgatctttatgtagttttaatggacctcataatttgtagttttacaaaatgttatagttcttaataataataccacgtgtgtgtttattgtatacgtatatgcaatcgtgacgttgtaatagtcctatcctatctttaattaattacataactaatagtctaatagagattagatattaatctttagcattatattatcttcttccttgtcttttctaatatacaagagggcgttccatacatgcatctacacttcattcggatcataccaatataatctactttaggatattgtaatttagtatattgaacattaaatacttttcccttgaaaaaataaaatataaaacatttttaacaaatcatttggcacaaaagtacactaaaacaattaaaattaattcatattaaaggtgaagcccatcaaccaataatgttaacataaaaaaacttataatttttcatcattggagcatggacttctcatgtttttgttgctgtatataacaagactatacacatcaatgctatatttttacttaatttgttattatggatatgtacctttatttttattttattttattttgtttaggaaattgtttattgtgtgaagattaacaactttatctttgaccttgactaaacttgcgattcaaatttcatattgataaccgattcaaattgagttcaaattttacatatttgtgtacattaaggttgaatattggaacacttgttactttaatatagcactttcgaattcaattatccatcagttaaaaagtaaataaaccaactttagaattatgaccatagagaacatgaaaactcctcaaagtccctagtctcttgaaaccaccaagtaccaatgttaatattgttctcactgcagctattgctgctgtgatcttctgaaagatttgcttcactctggtcagtagaaatctctgatatccaatccgaaatccgattttcatacggtgatttcataacaccgaagctttctcttccaccaacaccaccgttggcttctttaccactttccatgctcacaacttcaacaaaaccatgttcttgagacgtcgtctttgtcctagtgatctctgtttccttatacttgtgcaacaattcttctcctgtatttcctctccactcaaagagctttcctgcagaaaaacacatcatttttttcaatgaatgcttatctaaaactaacatacatatgcaacaatgaaagaatatctaccatagttttgagcttcctgtttctttctataatgagttctccaatagttctttatctcgttatcagtcctaccgggtaatcttctcgcaatcttcgaccacctattgatatacaatatttgattaatcaaaccgcaaaaaacaatcatgtaagtacaagattcaagggttttttttgtctctcacttgttaccccatagagcatggagctgaaagatgattctctcttcttcttgactcatcggtccacgcttcagagtcggattcagatagttcatccaccttagcctgcaactcttaccactcctcttcaaacctatacgtatgaacacaacaaacatatatttcggacatgtaaatttctatttttggaaagtgacacaaaataaggtttcaaagtgtaccggaaactattgctaaagaatcccaacgacgttctcccaaaagactaatgaccttcactagccgttcgtcttcttcttcgagccatggccctctacgaagtgtttcttccttcttaaaatccatttttctttcttttactctgtttctttgtgttattatacttaattaaatcctttctaaaattgtgctttgaacttgtaagcatgctttggctttgcttaaatagtaaagtcatgagtttacccaaattgggaaaaatgtccaaaaagctgacgaacacaaatagtttagtggataataacatcatgcatcagttagttaggttcttgtttttccttgatctaggtcatcttttaagttatagattatagatttggattaggttccaagtatctttccttttgaatcatcatcaacttgtgattttttattatcattgtcttcagggattatggctttcatcatcttaaaatttaattaactaatctaagtatccaatcgggtttggattttggaatttcaatatcttagggacttaaaaaagaagatagaaagagatgaaaccagatcttttttccactcacttaaaagtttaagccaacgaagcactcttaagtatgattagttaagtaaatcccagtgttaagcctaatctcatttttgcaacaaagagagtttaaaatcgacgcatctaattgagccggttaatgaaatctatcaatgttgaaaatggctttggttaaaatcggtttagactattcacatttcacgtgagactcagacaacctgcacatgacagtcttatctctgtttttgtcgttttcaagaaagtcgccacaagagatcattcgaactaaaaaaagcaaaacagatctctcctgccgtctttggttacttccggcggagaacgatg

SEQ ID NO: 30546 - DNA, 3003 bp, Unknown
  misc_feature (1)..( 3003): 2750-1469P.txt file - cDNA_ID_3032876; gDNA_ID_1972178; Annot_ID_180098
ctcattcaccgatactaatcctttgagcatctctatgatgattgttggatcatttggttttattgtggactttgtgtcacatgaagggtcgtatttgcaaaatacttgacataaagatgtggttcagaaaattaataaactaaatttcatatttcgagacgcatgctcatgctggagtactatttgtatttcttactttttcgtcccatgctttcaaaagcctcaagaatatacagagtattttcaataatacggagtagttcttaatcatttacatttgtctatgaattgaatttgactactaatactcggaaacaaaaaaatgattgtagtattaggagcgcaaataccctttaaccattgttctttccatgttcttagtccggctattgttatctaggtaggtgcctgatccctttttttcaaatctttcttattcattactttgactaattaacctatttaatcatatttaatctccctttaatctgcaaactaaagcacatgtttttttttatgaaagaaaaggttagtatgacattcttttggtaaatctcatcatattatttatttaattttaagaaattggagtttaaagtgtaattaagttatgctacctagctaatttccttaaaatatgaacgataagtatagaaattaaagtaaagattaggtttatacggtacgcttattatgctcaaacaagtggacgaacaaaatccatctccatgtgactatggaagagaacttattaataagtccaaatttttttcttgcaaactttatgatttcattcacactagacaaattaattgttcgtaagaaggtatacgtacaacataatgagcttttactgcttccctttgcaaacgaatcagctaaaactttacagatttatatgttcaagggaaactataactaagatttgaaggaaaaatctaacctttctactacaacaataaaagtcaatgcaaggtcctttgaaaagaatcttgttgtcgcatgcatgtacgtaattttgtagtcaaatgtacgaatgatagatatatggggtcaaaacgttaaaatccagcctaagaaagacagagatttactctaaatcttccaaaccaacgttatcaattttgttgttaacattcaattgactttgctgttaattttggattgtagaatcgaattaaaatgaaaatacaaggtgaaaacgagacaatagcgtgaaactgctttgcgtatatatcaagtatcaacagttttgtttcgtttttgttggtttgcgttgggataagaaaccggcattttgtacatggttcaattttgtaatacctaaaccaatttccggtttaagtggtttattaatatgataaaataaaataaatattttttacaaaaatacatagataggaccatgggtccatgacgctttgacaagagccaataaaggatttactgtaaaatcagtaactttattgacaaacaaaaaatgcagctataagttgtccccaccgtatattacaaagattcgaatactttaataatacaagctaaagaataaagagcaagagcctttgactatttccacttataagttttcctccgagaccgagagagatcagagatggagcagattatttcaccacgctccggtcaaatatatatttcttctgttttaggcctcagcaaaaaccacctccatagttgttatgttggatactacgacaatttagtgaagaagtggtctcaatctaaattatcattctggataatgacaaattgataaaagatgcatactattacaaaagttgagaaaagaagattactttacgtaatgtaggcgttttaatgaactccttaatttcatcgttcgtggaaaataataacacaagcaaagcaatgacttttatggacactatgattggttacaatgatcttattgaacatgtgaggaggcaaagtgtatatccttatatctataatgtttttttttctttcttctccaaagatgtcgcctaacatcacgttatttaacactacatttagcttacattagtaatctaaaaacaactttaataataatccaacaatcacgccttatttaaccaatcctaatttatgaaaacatactcatgtatgattgtttgtgcgcatgtgtatatgagtatatggacacagtaggtttctttccttggttggatagatatggttacaaacttgcaatagtggcaggtagttagacctgcggttcctaaactccgaataaatacgtgcggttcaactgcaatgcagttctaataataacgaatatatatatatatatagataattttgttactattggaacatgtggttaggttacaatttcaaaccctaattattgattttggtaatttggatgtattcatattcctgttggttttggtctactcaaaatgttagtaaatctcttatgggatgtatcgaattaacttaaaactcttttttctggtccagaaacccattaatactagcattcatattgtatagcactatagctcgtggggttattataacgtcacatcacttttttgtaataaaagttgaaaaacctgacaagaattcaaatattaaagcctatccttagttaaaatctgttaaggcttatgaatatccttatcttatgtgagtaattaggttaattagatattagtacaataaaagaaaaaaggaaaaattgaagaccgtttcctcgagacaagcagattctcaatcctcgagactgtcagtggaaaacaacttcactctctctcttcaaaaagaaaaacaaaaatacaaaagccaaggaaagccattattacaaaagcaataacacactgtaaaaaagccactcacgaacactcctcagtaaccagagagagaagaagaagaacaacaagccatgtcttaactcttaactaatctcttcttctccctccatttcaccaaccaaaaaccctaaaatccttaaaatcacaagtttcttcagcaatg

SEQ ID NO: 30547 - DNA, 3003 bp, Unknown
  misc_feature (1)..( 3003): 2750-1469P.txt file - cDNA_ID_3032880; gDNA_ID_1972178; Annot_ID_180092
aagttttgattaacaaaacgtagtcgttttatgcatcgtcgtccttatccacgcgtaacggttcgcgtttctacacagagtcaaatatttctgcacggaagcttcgaaaagaggtcatcaatggagtcttcactcttttctccatcttcctcttcttactcttctctcttcactgcaaaacctacgcgtcttttatcaccaaaacccaaattcacattctccatcagatcctccattgagaaacccaaacccaaactcgagaccaattcatcgaaatcccaatcatgggtcagtcccgattggctcacaacactcactcgtaccctttcctcaggaaaaaacgacgagtcaggtataccaatcgcgaacgcgaagctcgacgatgtcgctgatctcctcggaggtgctctcttcttacctctctacaaatggatgaatgagtacggacccatttaccgtctcgctgctggtcctcgtaatttcgtaattgtgagcgacccagcgatagctaaacatgttttgaggaattatccaaagtacgctaaaggcttagtcgctgaagtctctgaatttctatttggttcgggtttcgctatcgctgaaggacctctttggacagtaatttcatctcctcctatctcaattttgaagtttttggaattgtggaagtaatgtgtgactgtcttgtatgataagtaactctaattttagggtttagattccaatcttctctattgggcttagctgaagtctgattttttacataggcgaggcgtagagcggtggttccatcgcttcacaggaggtatttgtctgtgattgtggagagagtattctgcaaatgtgcagagaggcttgttgagaagttgcagccttatgcagaagacggaagtgctgtgaatatggaagcgaagttctctcagatgacacttgatgtcattgggttgtctctttttaactacaatttcgattctttgactactgatagtcctgtcattgaagctgtttacactgctcttaaagaagctgagcttcgttctactgatcttctgccatattggaaggcaagtttcctgtgttttttctgtggtttgttgattgtgtggaacaattggattcttgttaattgagagggtttggttgtttttttcagatcgatgcattgtgtaagatagtcccgagacaggtgaaagctgaaaaggctgtaactttgataagggaaactgttgaagaccttattgctaagtgtaaagaaattgtcgaaagagaaggcgaaagaatcaatgatgaggagtatgtaaatgatgctgacccaagtatcctgcgtttcttgcttgcaagcagagaagaggtttaaacttttttccttaagtttataagcaaatttggcctttcattatcgcataatcgaagctgatgttgcattgtgagggttttcaggtatcaagtgtgcagttacgggatgatcttctctcaatgctcgtagcgggtcatgaaaccactggatctgtcctcacttggacactttatctcctaagtaaggtaccttaatgtatcttctactttgctatgctagagaatttacttggatgggagcttctctgttctcatttacctcttcaaattctctatgttcatagaactcatctgcattaaggaaagcacaagaagaagtagacagagtgttagaaggaagaaacccggctttcgaggatataaaggagttgaagtacatcactcgttgtataaacgagtcaatgcgtctctatcctcatcctcctgtaagcaatcaagctcatctctctaattattcatgaactaaattttctgattgatttgtttcctggtaggtcttgataagaagagctcaagttcctgacattcttcctgggaactataaggtcaataccggacaagacattatgatttcagtctataacatccatcgttcttccgaggtacagttctcttccttctctcgtccatagtataacataggggagcctaatccttctcttcaatgatctttgtgtggttcggatatctaaccggagtggacattcctagtattacattcatgcccacatttcttatgtgtttgttgtttgttattccaaaggtatgggaaaaagctgaggaatttctgcctgaacgattcgacatagatggcgcaatccctaacgaaacaaacactgatttcaagtaaactcagtagaacacatcttttgacacaaactactgaatcaagattagtggttttgattagggaatttaaaagatgattttcttttttcaccagattcatcccattcagtggagggcctagaaaatgtgtaggcgatcagtttgcattgatggaggcaattgtggcactcgcggtgtttcttcagcggttaaacgttgagctggttcctgatcagaccattagcatgaccacaggagcaaccatacacaccaccaatgtatgccaatgttctcacactcgagagattaatgagagtgtctgttttgtttagaatgattccaatttctctaatgctgatattttcaatttcagggattgtatatgaaggtgagccaaaggtaaaaaccagaatttatgttttcatgataattgattggtgtgaatggacttgtttcatagtactcttgagaaataaccacaaaaaaatgaattatggaaaatagttgtaccatcggaaatgtgaattttgaacagtgagatgctagtaccattaaagtttggtaattgtgttatcatttcaaatcaaactttcatacagcttgtgtttgttctccatttttcagtaattacgaaaatcaaaattttatttttttttgaatttctaaataatagactaaggtctaaaaccatcccattccatatggaccacacgtaacattaaccttaaaaaccatataaaaccatataaaaccaatactagtgggttctatagcgatgtgtagtttcactttcacgtacgaggaagattaaaaaaaatg

SEQ ID NO: 30548 - DNA, 3003 bp, Unknown
  misc_feature (1)..( 3003): 2750-1469P.txt file - cDNA_ID_3032884; gDNA_ID_1972178; Annot_ID_180089
acttaagcttagaaatgtatgtttgatattctgtttggtaattttgttttcttacttttgtgctttttcatcttctgcaggtctcttgtgatacctctctttgggctgctattggaggacaagatgtagaaagacttccatctgcttctacgtgctacaatactcttaaggtgaagtttcaatagtccaattatctttgtagtctacatgtgaatattcctatatcttttttgttcagtctttctttttggatttcttcagcttccaacgtataaacgagcaagcactatgagggaaaaactattgtatgcgattacttcaaatgcaggatttgaactctcgtagagacctctaaccaggtattcatcttgttatgcacctagaccttttatcctttattctattcaatgtatatggcttctgtcaagttaaactagtaaggctggtgtaaacagtgtgtttggtttatcttaagattatgggaacttgtttcttcttggtagttgtatatgaatatatgataatcaactaagctgaaaaaatcttcttaagctttaccaaaattcttgctgtaatcaaccttagaaatgttaaagaggtagattcggaacaaaaataaaataccaaagattgtgatcttctcaaacaaatcttggacctatagacccatcaggccatcacacagtgacacagaccagattggtagtttctacattcagtcacacacacgcacacacaatctgtctcttatttgtgagttacatatatagagagagaaagagaaagagagaagagagagagatagagagagagagacaaactttggtagctatttgtaggtatacagtttgaattcaatccaactggaatgaagctcaattcaattgattagagaaatcccttgacccagtagttgaccagccaacagctcgtttacagcctctgtgggatgaaatccatcccaaaacacatatcctgtggcatttacacacgttccgaaggatagagaattgcaaaggaacgatgtttctattgtccctgttccgcagcatgccctttttgtttcaaagaatcctagaatacatgtagtttagacatttaataagatgttaatggtatcttgttagttgctaactagattaaatatctgagttcttcttcctgtgaatagctcactctatcatggtctaaagttgaatgaggatttagattttgcaggtgtgtaccattgtcagttgggttggtgatgatgtccaggaaaggttggtagacattaaaggcgacgagtctgaggcctgagtgtctattcatcagtaaccgggttgtgttctcaagtttagtattgaacatgatagcatcattgttcagtctctcaacacaacttttgtttcctgcaccgaaaagagtgatagctgcaggcaggcaacccatcggcggtagcgatatcactccgattctccttgctcctagttcatacagattctgttacaagtgacagtatgattcttgttcacacaaaaaagggtaaataactgatacgatttttttgtgtttcttgtaaatttgcacattcatatggttgccttattatgaatatcgagttctacaagttcgttactaaacttagaagtacctggatgaattctgagaaggatctcaggagaatgtcagcgaactgatcaggtgtatttaggatgttgagtagaggattgatgtaataattctgaagaaagtcgctagatcccgcactcaaaatgtggatacctctagagaacagtatgcgcgcgttccccctcccgatcattctcgttactctattttgatacgccctgtaatagctcagctgtcgtgttaaggagatcgagccctgcaaaaggaagagtaaaaccttatggatcatttcttgggtatgtgtgtaatgatgtttgactgtgttgtctcctttacaaatggaacagatgtggcatcatagtatcctgaagaagctgatgcaaagttggcaccgatcaggatattctcgttgcttgcttcccggcttaggaatgcaggtgggtatgaagagaaaccaaggtactcggctagacacaagtaggcagattaaaaaaccaattagattaggaagagagaaaaagtatttgaaggtaatacttgatggagagatagatatatgtggttttgtgagaaagactttacctgagaaatctacagcgagttttccgttgcagaatcttccggtgggtctttggtcgatgaagtctctaccgtaaggaagaaagttggatttgacaatgctgagtaagttattgttgttgccaacgtcaacaatggagtcgccaaacatgatgagtgcaggaacaacagctcctttggatttgcagaagaaacaagaaaccaagagaagaactctaaaccccgaaactctcatcttttgcattccttttcgttcctgtctaatgcaatcaggtcgttaggacaaatagagaagagagagaagcagagagaaagaaatagagagtagtggtgagaaaatggagacttaagaagatgatgcatgttatacaaaatataatcattctccccatgcttatgtttaagataaagaaaacgcatttgctagtgcaatagagtaggtggaaattgtttatgaggtcagtctctttggtcattgatcatgggaccatgatcagtaatatctttgcatcctcgaacataaacttccgtcatatcgcgaaatttcaattcgggccacgcgtggaggctttggtttgaagggtagctctatcaataaaaatatgggtattggggaaatcatctaatcttgattgattgattgctcaatacttcaataatctaattttggtttctgttgaaccgttggaggcatgaatataaaattctgataggatacagttttcttgataagagatgatatgtttgaggaaatcaaagtgtgagctccaccaacttttagttgttgttcttgtaataatgtattgggtaatg

SEQ ID NO: 30549 - DNA, 3000 bp, Unknown; identical to SEQ ID NO: 10233
  misc_feature (1)..( 3000): 2750-1469P.txt file - cDNA_ID_3032937; gDNA_ID_2213638; Annot_ID_181112

SEQ ID NO: 30550 - DNA, 3000 bp, Unknown; identical to SEQ ID NO: 10235
  misc_feature (1)..( 3000): 2750-1469P.txt file - cDNA_ID_3032939; gDNA_ID_2213638; Annot_ID_181108

SEQ ID NO: 30551 - DNA, 3000 bp, Unknown; identical to SEQ ID NO: 10232
  misc_feature (1)..( 3000): 2750-1469P.txt file - cDNA_ID_3032961; gDNA_ID_2213638; Annot_ID_181090

SEQ ID NO: 30552 - DNA, 3003 bp, Unknown
  misc_feature (1)..( 3003): 2750-1469P.txt file - cDNA_ID_3032992; gDNA_ID_1972181; Annot_ID_180152
atctttcacgtcattcgatattacaacactttctaaccaacggtctttttcttacatcattttaccgacgttaaatacgatattaaacaacgtgattagccatctttttgtagtgaatttcttacttcaattttctctttgacccatcttatttgatttatgcaatgcctagagtttacagtttttaattccaatattaactagtccctaccttcaaacatgctcctcttgctattaccatgcattgctatatctacccgtacttgcgccgaaactacttgcagaacttaaaaacgaagtttacggttttgaagtgtcatacttaataggcatttcaaaactatttagagagaaaatacagtgattggtttgcttatactttaaattttggcttcaatcaaaagaaatgaatttgtatttatagagtataccacgtcaagatcagataccggatcctaggctaacccgacgtaagttattgattggtttacctgttctcctcccatcgagagttgggttgttgttggagagaggttgtacgtacgtgagtcgtgacggtgagcttgttagtcattttccctttattctgccaacgtgtacataattcagttttggtatatagtaaattttatgcgaaacaaaagctgaaaattaacatgtttattatcaaaaaaatgtggctgaattctgaaatatcattattagttaggtgcgttttaggaaatcagtaatgaataatgatcgtgcacaacaataaactggacaaaatagcatttgttctttttttctgtcacgaataatttcatttaagaaaaaaatatagaaagtcatttatatgccaacgagagacaggacattgctaaatccagctcaggacattagaaagttattctcacaatctctataaaataatccatgtcaacaaaaaaaaaacctctattaaacattaatcgaatttctaattcattatgaaatataatcagaagagtcctcatcttattgatcaatcgtaatacacaagaaaccatgactttagaggagcagaagaaagtcataatgcccgaggccgtcgcatcggagccatcaccaccatccaaggaggagaagtccgacgattcgaaagctattgttctcgtcgtcgctgcaagtaacaaatcttttaaatttcactgaacaagaattacatatttaaattgcaaaaactacttcaactatttcatattgttcgttttctctaattttcttcttcttcttcacaatatagtttataacacttgttggtataattattgtttatatatctaatatattttggccatgtaaacaaaatgtttttttttcttttggctaaattaatactgttatattttcggcaaagaactgtaaccttttcaatttttgttgttgttgcagaagaacctacggaagacaagaaagtaggttcagttcaccgaggtaatcaacgttatagttagatcatgattgatacataaccaggaaaacaaaatattttaactttttatttgatttttttacctgataataatagttaatatcagtgaagtttatccaatatctaacttttagccaaaaatttcacctgcggaagaaaaaatattaattaagtttatctaatttcagtaatttacatgataatattagttcatttttctctagattttttttttctgataattcatggtgtgtgtgtatgaagatgctgttttggttagactcgagcaagataagaggatatctctaatcaaagcttgggaagaggctgagaaatccaaagtggagaacaagtgagtcctaaagaagtttatataatccattgttttgatgaatttccaaatttttagttccatgatatttttttttgtgttccctatatatttgtatgtaatctcatttattaactttatgaaacagagctcagaagaagatttcttcagttggagcttgggaaaacagcaagaaagcttctgtggaagctgagctaaaaaagatcgaggtaaaagtgtaattctttattctttcaattttgttgttttatttttaacttttacatgaaatgctttccacttttcacattattctaatttatccgctggaaatatgaatgataacaggagcaactaaataagaagaaagcacactacacagagcaaatgaagaacaagatagctcaaatccacaaggaagctgaggagaagagagcgatgaccgaagctaaacgcggagaagatgttctcaaagccgaagaaatggctgcaaagtaccgtgccaccggaactgctccaaccaagctatttggattcttctgatcggagaaatggtctttgatgttgcattgtggtttcatttgttattaacttgagaaagaagagattattggtagttgaagtggttggtgtgggtttcatttggcaacataaaaagttacatggccataatgtaacgtcttattatgtttggagtaatgtgttttactcatgtgtaatttgtacagcttaaccttgagagacttcttttgaactttctaaacttaaactcccaattatttcgtttcaagttttcttcttcaatctcatggtccaagtaaaaatacaccaataccaaaatattgttacatttaagtttagtaaaaacaattaagaaaaataaccaaaattttgcactatttaagattagatttttaatatatatttaaataatattattgttccaaaaacaaaaagtaaaacaaaacacacccttaccaaaattatgtcaagtcaaagcatcctcgttttagggattttctatacttgggcctaaatactaaggcccgtaattaaaggcccaataacgtttgtggtattgtacaattttcatgtagaaaatgtcttatataaagaggtcttgcaaattagggttttcatttcagtaatcgctgccgcactatcgtctcctacctcctttgcctacaagctttcacgcgggagctcaacatcagccatg

SEQ ID NO: 30553 - DNA, 3003 bp, Unknown
  misc_feature (1)..( 3003): 2750-1469P.txt file - cDNA_ID_3032999; gDNA_ID_1972181; Annot_ID_180145
gtttacgctaaaatattcggttcaatgagaaacatcaacaaaggtattcagagctacatcattgaaaaatgtatgattacaagattggttatggtacgaatgttgataccttcccctcagtgatgttgctattgtcatctgctaaagatgaattggaatcttcttcgaatataagtggaaaccttattgcgtcaactggagttgctgcttcaacaacttgttcctccaaggtttctggttctttaagaatctacaccgttccaagagatttattaatatcgaacagaatagaaataatatcaaaactgagagtcatgtctctgcaatttgtaggtctgatatatcagaccatgtataggtataccaaacaccagaaagaaattatcaattaccttggcagctttagcgcctcttctctttgccggctctttttctttgtttccaagaacaggttcgggagaaggaatgcgctcaacaaaacgggcagcaaccaatttctgaagagaatctctgattgcttcagaacctatcgtatttcctgaatctgatcatgtatgaagaaaacatatataacagcatggaatccattccgctcgaagcattactgtaatcaaaacgagatacacaaaggccaaaagccaatgcctacgatgacgagtgtaaactgtggtaacataacataagaggtacatatgatatcacgactcacctctatctctttcaataaactgtcccaaggtaagcctaccgttactaagtaaaccatcaagaactgcaccgcactaaacatataaatcaaacaaaagtataagattagcattagagtcttgaagcataaaccaactaatcaaaacactgaacagagagaagaagaagcacgattaaaccttggagtcaagttcttcgtttacaatcctcgaaaacttgttatacctcacacgatgcagaatgttgttaaacaacacaatatactgtacaatagctttgctctcagaaccatctacaaagtaaaaaaaaaaaacatacaaaattactttcattgagttctctatttctgtgtgttgctactaatcaaacaatatagagactaaccaggaggttcaatggagaaagcttgaacacaattgtgctgaatcaagagatagagaatatctttaactttgttatggttgatatctgattcagctaaacgagagatgtctcgtgaggaaagaggtcctttacgtagaagacattcacaaactttctgcaaccaaaaccaaattcgttatacagagattataaattcaacacaagtctcagaagggtttctcaatttaccgagacgacggagccgaattggacggtgatgatatggatggcgtagacaatgccaaactcagacatagacatgagaatcaatcaccaggaagtctctcaatactgatgaagcagcctctgcagagcttgacggagttatggccgatatagagatgtttgccaatcgattgtagcctactactactaaaaagcgaagcaatcgtaatctagcgaccctaaagtttaatttttccagcgatccacacgttcgaatccaaaatttcgataatctaacatgaacccaccaatataagtataagaaaacaccaacccagggctagggcttttgttttttataaggactcgggccggccttaaatatttagcccattttaacatccctaattgtaggttattaattgttggcctagagaagtttgggcctatcaggccctaataaattgaatgtatggtttgacccaagaaaaaaaattagtgatggaacgaaatgtacttgagaattttcaatgattgggccagatgacaatgctctacttaagaagaacaaacacaaaccaaattcttctattgtatttgtatgtgacggcttacatgaagaccatgtttttacttagttaggagaatggaaaatgactttttcagcttcatgaatatgacttatattttaaaacactgtcgttttcatctatacgagatttttgtatttctattcataatcatatacataattttaatctttaacaaataacaaggtaaactaaatctttgattagtaaattctactctgactctcttctaagctacgcatgtttagtggtttaaattagtttcattgttgaataattatccaaatccactattgtttagttagatagtgtgcatgtatcaaaccaaataaaataatataataatttgtatgtatagacaaaacaaaattgattacttcaaaaagatatatgtctcattatatttagtcttctactttttttctataaataatatatttattcttatcattcaaagtcatttttaccatttcttattttaattttacatttttaccttggtcaatttaatttattaacaatcaaaataaggacgttatcttctatttataatataaagtataaacaacgtcaagcatcttcgaaacgtgataatcctagtcaaagacacatgtgcaaaggccctaaaagtgattaaacactcataggctatttttttaatgaaactattcttttgtttgataatacatacacaaactatttcaaattcctatgaaataattcataaaccgtaaattactatcgcatgcttgccgaaaaaaaatattttcaaaagttaattaactagccgtttcggttcagtgtttgtaccggaatcgaaattaaaaaaaccacctcttcaaaaaccgaaacgtcggtctaatcgtaaggatatatatcagcgactcccaccgttaacaaaataattaaaaatgaaaacattatgaccacacgatcaatagaaaatccgctacgatgataacacgtggcatcatcttttagccattttttgcttccacagatactgtagtaattgaatataaatttataaatatcgcatttgctctcttctctgctttcacattctctccttcctcatcatcgttactctcgtgtttatctctccgacgtaaccatg

SEQ ID NO: 30554 - DNA, 3003 bp, Unknown
  misc_feature (1)..( 3003): 2750-1469P.txt file - cDNA_ID_3033006; gDNA_ID_1972181; Annot_ID_180142
ataaaataaaaatattatataattagatataatttacaaagttttatatatattaattttaaaaaatgaattgtctccgcggtgtacatctgaaactcatcaacattttctataacagacttgctttcgtctatcctaaaactatgcaacttttgtcttaagtaaaacctcttatgattccaaaacatttgagaaaaccaataagagatgttatttcttctcttaactgcttatgctctattcctcttgttctaccttttattttctttaaattatctttagaatctcttcctcatactgtaaccaagatccagcatcctatcgataggtaaagttgagttttacacttgccaattgccaaacattagaataaaaaagttcaataggttactcggattcgaacacgaggttacatgaatttgaagggctggcctgagtagccaactcgttaagcatctcacgtctctttcccaacttctcgagctcttcagatccgatgggttttgtggagagagttgctttcttcaagcatcttgcattcttaaggatgtatgtagccactgctttctcatcttctcgttgccactcatatcttgtccacacaaatgtctcaagatgaaacaacaaacattcaggaacacatttgggtcgactccattcccagcccaccgaacaatcttctttaggaaactgatatggctgagaacaatgcaattaaaatatttgaaagtagagctcactggaagaaaaacaaaatttagttgactaatgaaatggcttacatcgacgagcttaagaatttgtaatttgggagaactatcgagcatgaaccaaagtagattccaccactcatagctatatgcacgaagctccagcgataaaagctggtagaagattttaccagtaggatactttatctgtgcatgaggcaacacagaacattaatgttagcccaattacagataaaccccgtgaaaatcttaaatcttaagtttaccttgaaaggtgctaagtgtaaggaaagacatttggctgaagttagagagtccataatgttctcattggctatttcaaaaacggcactaattttagcctccactagctctggcgccttctcaatcaaacaaaactcaagaccattaaacccgtcgatgttcaagtatttcaaagaaggagcatttatcacatagcctccaacaccttctccatagtaatcatcatatatggttagtctctgtaatgatggcaccgcaatagtataactctccacatcggtcgtgctatgtctatgcacgaccaaatcttcaagactagggcagccacataaaaggttgcaaacggattcttcgtcgttaaatctcacatggtagagatacagctttctaagagacttcaaacaaaccagagaaggaaaatctaaaagaatgcaatacttgagttccaagatttcaagtgtatcattacaactacaccaagcactcggaaatcttacaaagctttcctccagcaatgtaattttcagtacaaatttacgcatatggcgggaaaatgcaattccaatcaatatcccaacatccaaagcatcatccttatcttcaactttcaaatgcaaactatctagaacaggagctttatgtgaaatcaaagacctgaaaacattatctgaaaacgtataatgataatgatacttagaatcaaacttgagatttggcaccaacttccaaagagatttccattgtttagacaaaacactagtggcaatcacagtttctgttggaagtgacgacaatatgagcagaagcaacgcttcaggcaactcactgatcctgtcctcctcattcactaaacctcgatttctcaaaccttcaccaccgattttgctgtgaaaaaaaaagtcagaagaaaacaatgaaagggattccgagaaaaaacatagacgaaacaaagaaacataccatttttgttccattttcgtttaacagagacatcaattttgctaaaaatccttgagattactaacacttcaacctcaaatgcaaacgcagccgaacacacagaatccagctagagcttagatatgataatggtgacgagattcatcttcaaaattatatccacttgtgtttgattagtaaaagaatcacctaggctagatacaaaaccctaacagaataaaaacagtgatcaaatccgagccggatcgtttttttccaatgaaaccaaaatccaaacccaagacatttacaagcccaaagaataaaaattgattttttttttttcggcccaccggcccaataacgaatagttaaactgagtttaggtcttcactatttaaagctcgtaaaccctagacttggatatacttcagtctagagccgcgcaagaagacgattctctctgtgagttttcgctcctctctacttgtcgtctctctgattatcttcgttgctactgtctcgttttgtgtataagtagggttcttgcttgttttctctcatcgtgtgttctgctgctagctcctgtagatttttctaagttccttgttttgttcatttcgagttttattgatctgatataaatcgtccgttgatttgttattttgttatgctttattgattttgcagaaagtatcgtccttggaatgagtaatattacactttcagtgatgaaacttttcgtttatttgattggttttgataacatccttactgtattacgactgttaatgtaatgtgcatacaaactctcgaaactttgattctttaagagtttgagattgtcacaagtctcacctttagtatagatttaataagagtgatctttgaaatacttcaagattcgtatctgttttactctatttatgttctctatatctttgagatggtcttttgtttttgaagtttgaggttttatcatttgatttccttgagctgtttaaagtttcatcatttgatttaaagtgtgtctgattgatgttttttggcagcttgagttgaagaaatg

SEQ ID NO: 30555 - DNA, 3000 bp, Unknown; identical to SEQ ID NO: 9778
  misc_feature (1)..( 3000): 2750-1469P.txt file - cDNA_ID_3033013; gDNA_ID_1972181; Annot_ID_180137

SEQ ID NO: 30556 - DNA, 3003 bp, Unknown
  misc_feature (1)..( 3003): 2750-1469P.txt file - cDNA_ID_3033017; gDNA_ID_1972181; Annot_ID_180133
tatactaaatgttttagacccaagaaaaaattattagtatagtcaacattattgttccagaatatgcatttacaagtggaattctaattggtctaatatgtatacccaataaattcaaacaatggaaaccaaaccaagcttattattgaaaataaaacaaacacatatttatacaacacaaaagaaacacaaccataaatgtattaatcttcgtcatattgaggattcgaaacagacaaaaaaaaacgcacattgtcacataagaaaaccgcttatttccacacaacataaaagattaaacggagaaactaaaaaaagaacttgcatagtcgtatagttctgatcaaaagagatgtattgttaaggaattaagaaacaacgtgatgtttcatcaactcaggatgtgtgaaaatgtcagtctctttgtagaaaacttctacgaccctcgagaggtttaggaatcacatgacgatagggaaaggaaaaggaaaagagtgatctctcgtcattagttctttgattaattaagactcttccttgaatcaaatgccatgattttgatctcttcttaagctttttccccatgaaataccatattgcttcatataacaatcaatggatgttcctacgtgctttctcttatgttcaaaatgtataagatagataccagatttaatattatattttgcactaacgttgtgacacaaaatgtatttgtatgtagggtgtcaactaaagcttaagttctaaggtctgatattattctcgaatcgtattgtatcgccccaaccgcccctaccagtgggtcccacaattcttacatttctaaatatacttaatttattttgtggaagtccccaaatcttgcgtgcatagtaacccatgacctcttcttgtgagtgtgtgtacatgacagtcatgaatgcgagttttgatggtactttggctggaatacggagaatcagcgagtgatttccattgcttgcaaactagtttggaagtggtgatgattctttgcggtaatctcgatatgatatttgctgatagatcatcggttaagaaaatcatctcgtttttcttctctgtctccatcataattgaccaggtgtttttctcttttcaaagactatctttagtcttcttactaatcaagctataaggagttggccaactttcaaaatccaagttaaaaaggttagcttttgggtttaggctaatccaaaagtgattaatcgatcaaagtgtaaaaaaaagtcgtaagctttagaacgaatcttgacaaccctaccatctcaaaatatcaaacaaaaatggatcaaaatcttgataccaagacaaacggaaaacaaatcttgagacttattgcttccttcctcttcctttcttggcaggctgtgtctccatctgttctttcccggtgacttctgagagatcgactgcattatacaaccaacataaataaacaaagtaagctataatacacccaatgttacacagcacaaaaggagctttccttttaaaggttgtgagatgatgcacattcaagttccattctttcaagattggtaggagaaaagcgatgttttgagaaaataatagccggtgacgatgtgatacattgtctcataatagaaataacctcatagctcaataaaacaaaggaggtttttttctcaaacactaagagatagatgatgcatgttctttctttaagttagatatgcagaaaatgaaatttttaccatcaggtcctctggccatgagggtgaaaaatatgttattcagtttctccatcttcttcgcttcttgtgcttggtctgtcttgaacttgagacactaagttaaaggaaaagtagaaataaatctatcatatatatacttcacataataagaatggacaagaatgaaaacaagaagactacaacaaggacatctagttaaccacagaagttgatacaatgatttacatcaaaactcagcccagcttaaagagttctaaagtatcacacttcaacctccaccaagaactattgctctgaagagaggactagatctgcttatctaacacatcgccatgcaagacatgttaaattcatcaagacgtacgaaaacataacctattagcaatcacattgaccaagccaaaacaaaagtaaccacataactacgacaaggtacgatgaaaactcaactaaaaaccaatatctctagtaatcaatcatcatggaaccctaaattacattctccaaaccaagcatcataccatcaaacctcgacgaatcagatatcaacttcaatagcaaatattgaattccatactattatataagataaactcaaaagaagcagtgatcatagagaaactagacacagtcaaattacctctttgttatcagtaaccttaagaaccaacttgccgtcacagtgtctatacttcatcacataccgagtctgcaccacaacaattgaaacattagattgcgaccaacacgacttgattcaaatcaattatcaaggttaccaaaattcccagtacaaaaatcgaggaactatgttcaattaccataaatcaatccaaatatctcaaaatcaaccgtaaatagtgaaatcgaaagaggagagcaaaaaaatagttaacctacagattccggatcagctcgaaaaagctgaacagatcgatcaacgaattcgtcccacgatgcgatataaaccatcttgattcaactagattagcgattcgatttgaggcgattggattctatgaaatctccgggagactcgacggagaaacagagaagcaaaaagacggctttttatttgtgttttcagaagaaagaaaaaaaatttgagtgatgatcaaaccggaataaaccgactaaaaccgaaccggttccttagtgttaagatttctaaaaagaaaaaccctaaccgttcttcttcgaacttctgcaactttgtttctcccaaatctgtgaatctcaagtgttcgtcttcaccatcatg

SEQ ID NO: 30557 - DNA, 3000 bp, Unknown; identical to SEQ ID NO: 9768
  misc_feature (1)..( 3000): 2750-1469P.txt file - cDNA_ID_3033021; gDNA_ID_1972181; Annot_ID_180130

SEQ ID NO: 30558 - DNA, 2016 bp, Unknown; identical to SEQ ID NO: 10825
  misc_feature (1)..( 2016): 2750-1469P.txt file - cDNA_ID_3033043; gDNA_ID_2214450; Annot_ID_182452

SEQ ID NO: 30559 - DNA, 3003 bp, Unknown; identical to SEQ ID NO: 26497
  misc_feature (1)..( 3003): 2750-1469P.txt file - cDNA_ID_3033047; gDNA_ID_2214450; Annot_ID_182451

SEQ ID NO: 30560 - DNA, 3000 bp, Unknown; identical to SEQ ID NO: 10808
  misc_feature (1)..( 3000): 2750-1469P.txt file - cDNA_ID_3033063; gDNA_ID_2214450; Annot_ID_182445

SEQ ID NO: 30561 - DNA, 3003 bp, Unknown; identical to SEQ ID NO: 26505
  misc_feature (1)..( 3003): 2750-1469P.txt file - cDNA_ID_3033067; gDNA_ID_2214450; Annot_ID_182440

SEQ ID NO: 30562 - DNA, 3000 bp, Unknown; identical to SEQ ID NO: 10811
  misc_feature (1)..( 3000): 2750-1469P.txt file - cDNA_ID_3033071; gDNA_ID_2214450; Annot_ID_182438

SEQ ID NO: 30563 - DNA, 3003 bp, Unknown
  misc_feature (1)..( 3003): 2750-1469P.txt file - cDNA_ID_3033075; gDNA_ID_2214450; Annot_ID_182437
cagtctcaccaaagttatgttcctaatgtgattcattacaacattgtgttaagagctttagggagagcggggaaatgggatgaattgaggctttgttggattgagatggctcataatggtgttttgcctactaacaatacttatggtatgcttgttgatgtttatggtaaagctggtcttgttaaggaagctcttctttggattaagcatatgggacagagaatgcatttccctgatgaagtcactatggctactgttgttagagttttcaagaactccggtgagtttgatcgtgctgataggttctttaaaggttggtgcgctggaaaagttgatcttgatttggattctattgatgattttcctaagaatggttcagctcaatctcctgtgaacttgaagcagttcttgtcgatggagctttttaaggttggtgcaaggaatcctattgagaaaagtctgcattttgcatctggttcagactcttctccgaggaagccaaggttaacttccaccttcaacactctgattgatttgtatggaaaggcaggtcgtttaaacgatgctgctaatctcttctcggagatgttgaaatctggagtacctatagatactgtaacgtttaacacgatgatacatacttgtggaactcatgggcatttgtcagaggctgaatccttgttgaagaagatggaagagaaagggatatcccctgatactaagacatataatatccttttgtctcttcatgctgatgctggggacattgaggcagctcttgagtactataggaaaattaggaaagtaggactttttcctgatactgtaactcatcgagctgttcttcatatcttgtgtcagcggaaaatggttgcagaagttgaagctgtgatagctgagatggacagaaatagcattcgcattgatgagcactctgttcctgttattatgcagatgtatgtcaatgaaggtttagtcgtacaggcaaaagctctgtttgagaggttccagttggattgtgtgctttcgtcaacgacacttgcagcagttattgatgtctatgctgaaaagggactgtgggttgaagcggagactgtgttctatgggaaaagaaacatgtcaggccagaggaatgatgttttggagtacaatgtcatgatcaaggcttatggtaaggccaaacttcatgagaaagcactttctctcttcaaagggatgaagaaccaagggacttggcctgatgagtgcacttacaattccctattccagatgcttgctggggttgatttagtggacgaagcccagcggatcttggctgaaatgctggattcgggctgtaaacctggatgcaagacctatgctgctatgatagctagctatgtgcggcttggcctgttgtctgatgcagttgacctgtacgaggcaatggaaaaaacaggggtgaaaccgaatgaagttgtttatggttccttaattaatgggtttgctgagagtggaatggtcgaagaagcgattcaatactttagaatgatggaagaacatggcgttcagtccaatcatatcgttctgacttcccttatcaaggcttatagcaaagtggggtgtcttgaagaagctaggagagtgtatgacaaaatgaaggattcagaaggtggcccagatgttgctgcatcaaacagcatgctaagtctgtgtgcagatcttggcatagtttctgaagcagaatccattttcaatgctctcagagaaaaaggcacatgtgatgttatttcgtttgcaacaatgatgtacttgtacaagggcatgggcatgctcgacgaggctattgaagtggctgaagaaatgagagagtctggtctactaagtgactgcacttcatttaatcaggttatggcttgctacgctgctgatgggcagttaagtgaatgctgtgaactgtttcatgagatgttagttgaaagaaagctcttgctggattggggaacatttaaaacgctcttcacgctcttgaagaaaggtggggtgccaagtgaagctgtgtcgcagctacaaaccgcatacaatgaagctaaaccactggcaacaccagcaatcactgcaactctgttctcagccatgggtttgtatgcatatgcgctggaatcatgccaagagctcacaagtggtgaaattcctcgcgagcattttgcatacaacgcagtgatatacacttatagtgcatcaggagacattgacatggccctaaaggcatacatgagaatgcaggaaaaaggtctagaaccagatattgtcacgcaagcctaccttgttgggatatacgggaaagcgggaatggtggaaggtgtgaagagggtacatagccggctgacgtttggggagcttgaaccaagccaatcgttgtttaaagcagttagagatgcttatgtgagtgcaaacagacaggacttggctgatgtggtgaagaaagagatgagcattgcttttgaagctgaaagggagtgtagttcaagatctggagaagaagaagaagacgatgaagaggaaaattctgaagaagacgaggcattttgaagtgtagccacagatgtatgtaagaaatattgtagaatataggatttagtggaaatggactgtacagtttcacagaagccaaaggaaatatgcatacttaagcctcagattgatctctggtaaagaaatgtgtatcttaaaactgttatagaaagaaaaaaaaaggttccacagggtcaaatctataaaagcgagcacctttggctatggttttggtagaggaattagcatacgctccttacaacaatagattgatttgcatcatcgggttggtcttctgttggttttggtctctggattgaacatctttctcctgtcttgcttgctcttattttcaattgtatagcatcaaagcccatgaaaagagccagatgttctggaattgattccaatttggaatcttgtcagttactggtgatgaatatcaacatg

SEQ ID NO: 30564 - DNA, 3000 bp, Unknown
  misc_feature (1)..( 3000): 2750-1469P.txt file - cDNA_ID_3033086; gDNA_ID_2214450; Annot_ID_182430
gatcatatttaaccatgcgatttgaaagcgaaaaaaaaataatctagacaacacataatggatggtggttatgagtttcgacttataaagatgtgtagatagacaatgagaccatatattttttcacgtatcattttatgtataagtgggttcttaaagaaaaaaaattataagtggattcttaaaaaaggataaccacctcgacgcattcaacaaaataatgccatacttaattcctaaactagcgtgcatagatatagaaacttaaactaattaaaacacattagcaagatttttttcaatgatttaacgaaggaggagtatgagatagaggagaaaagtgataggtggggaagtggtcccagcaccaaaaaaaatgtgtggctgtcaccaattggaatgcaccaaattctttttacgacataaaaacaaaaactgaaagattgttttttttgttttgctttctgataggataactatgacgtggcatgcgtcactagacgcattatcattcgcgcgtccatttcacgtggtacagtcaaattagtcaaacctcccgggagaaacgaatgttcttttacggttttaacttttaacttttaatcttgctgctttggcctattaaactcttcttttctgagcaaaatcacacacgctatgttttatggttacgtaaacgcttttttttattggcttaaaccaaacataacgtgtagtaaatagaaactctccattcacttcttctttttttgtttgtttaaatgttactaagatttataccaaatcaaaaatattttcttatgttttcggacaaaactcaagccccatttacttttttttttttttttgtatgttttaatgttactataagatttattccaaatcaaaaatcttttcttatgttttcggacaaatctcaagccgcccaaaattgaattgttagccaactacccttgagcacttaaaacctccaatcgttttccttttttcttgttttattttatggaatacagatcctttatactataaaatagatttttgagaagtgtcatagttggaaaagtagataacatatttaagtcgaatggggggggggatgaatatgaaaaccacggtaatagtatatttttgttttttaccgtatttatcattccagtatataaaaattaaaatgtaaagtttaatttttaaaaaaaattacgtataaattatttcaacaaataatcatcttctatggtggaaaacaatttccaagacacataaagagttaccttaattaatgatacattaaaaaaaaattacctgatggtttctgaacctcacaatcgtgtggacactatagagttgatcactggaaaaatcataaatattcgtgttggtcaactattggctcatagctcacaccatttaataagttcaaagaagatacaatgattacctattacataaatcatacatgcatacgtgtggttgtccatattttgacattaatcatatactataataaactcatatattttgtgcatatatgacatacatagctatctctattgtaagttgtaagtcgtaaccactatataaactaattaattacatatgtatatagtgatagatatgttgaatgatcgaagagataacggtgtctcttcacgaaaatagagtttcatcaaaagcaagataacggagtactaattatctaactcgttaattaattgagctctatcttagtaagattcaccggacactgcaatatacaattaaccacgtgcttttcaagtgaatattcagttaaattctcatttgtcttttctttagaattgacaccttaagctatttctagtcattctcaaaatataaaaagttaatggtccttaattgccgtgacaattgctattcttcttttattcccaaaagagatacaagtataaaagatcgaaacgctatactatttattaaaaaaaataaaaatacagttttaattatatgaccaaaaagacttttgatatatttgatcgaaaaatgaaaattgatttagaacttgattggttctcctactaccatatgcaaatgttgagtttgcggttgctagcgtttaaaatgaatcaaagaaattgctttaaaccactttggatagtttttttattgttctaatgcaaaattttaaagaaaacattcccgtaagtatttttatttatatattagtgaattaaggacaaaaaatgtatctcacagttttctcagaattttcttttttgacatagtaatgaataaattgatgtagattctatgctgtttatagaaacaaaaagtaaccgttttaaatgcctcaattgacgttaagtctgtcttggtgcaatttaattatgtttcgtcatcatcttttcaagttcacgcactaagcttagtgaaaaagatacgccttttttcttgttctgttttgttttgcatgtcacagtaagtaactctcctcctcaattatcaaaaatgcaaactttaattttcttctagagaagagccactctctccacttctttctttgtccaactttttagacagagaaagtggcgtcagagatagatagagagatacatattcaagttggttgaaggaggagaattagcggttcatatcagtacggagaaaattgtcagtcatatgctttttttctttaaattctgcatttgagtgggtgtgtgcttttaaccattttggtgatttatcaaaaaaaaaaaaaaaattctgtgtgttttgagctcaagctctctacaaattttgctgtctcaagtttttgccttttgaagtccaataaagttgaaatctttgttctttttgattggtcttcgtgaattccggtgaaagtttcaaacttttgatttaaattccggggaggaattagggtttatgaaagtaaaagaagaaactttgaagaatttgggagatggagtggttttaagacctgttgatcattgttctagcatttggagtatgaagatgaacatg

SEQ ID NO: 30565 - DNA, 3000 bp, Unknown; identical to SEQ ID NO: 9964
  misc_feature (1)..( 3000): 2750-1469P.txt file - cDNA_ID_3033127; gDNA_ID_2096296; Annot_ID_195551

SEQ ID NO: 30566 - DNA, 3003 bp, Unknown
  misc_feature (1)..( 3003): 2750-1469P.txt file - cDNA_ID_3033131; gDNA_ID_2213359; Annot_ID_180741
tgcagttggggtaaactgcaaaacaaagccctaacttctgttacaagcttttattgttactgagcattctacaaacttgttggtttgatctttcttaggttgtcgtcgacggggtattgcacaaagagaaagaagccgaagatcgaactggtctgcgataactctgggagtcaagtggcttctgattgatggaatcgattatttttctaattctggttgtttaggggtctctatgtgtcttcttgtttctggctgttcttttgctttatttcatctcaagtagagttttcttaatgtttaggtggaacatttttccataatcaagaagggatttgatcaatcaataacattagattttcttagttaaagacttaaagttgcccacacaccacaccatatgtgattatgatgaatttacattttataaacaggttttcagtgatttcaagaaacataagcgtgcattcattttttttttgctttaactagaacccaaatcttcaatagttttcatgaatcgactttgaaaatacataaatccacaacattaatatgattaagcattcttgaaatcctaagttaggtgaacagagagttaagagtaaatgctcctagacatggtttagtcgattgcagataattcgggtcagcaaagaaatgtgatcactaagcaaatctgggttgcgtaaactcgttgacaataaacggaagcgtcttaccccttttttccggcccacttctttacttgggccaaataattttattttgggctttttttaaaaggatgatcttaattgtgtgtgggcatttaagggcaccgacaattcaaaggtagccgacggcttacagaaatatggctgctcagatcatcagagaccccatacaataaatatttatgtttcgagaaataaatcaccagatggttgacaagttgcggcagtaagtacatgttacttttcttgtcagaaagtacaacaacagtactttttttatagtcgacactaaaattaagactcgtatttagtaatgcagaaaaatctttacaaaaatatactatatactcctgagaaaaagcagctgatttgactgaaataaagaaaatgttagtagtctagtaatgatttgtgaactacaaacgttgtttaaggcgtttacagtaatattaacattacggaatacaaaagggtgatgactagtcgacaaataaaaatggtaatgagtctaaatgacgaaataattaaagaaatgtgtgaaaggaagagaataataagcacaagtcccggacctgaaaacggaaagatcagaagagccacgtgtgcaggagcttgaagagaaggttccaaatgagaaagagatccaccaccgtcatcaacacacacacacacactttgtttgttctcacggagtccccaacaaaagtcaaatcaccgttcattgagccccacttttatttacttacatgtttaatagacccgtttgtattacgagacacttctagtcgcatgtctccaccgtccgatcacggatcctagctgtaatcaagggggcagatttaatgaagtgggcctcttagtaactgccttctccacgtatcctgacaatttattgttttcttgttagtattttgccatttttggtttattataggatgattaatgatcttataactcttccataaactaatttagatagatacgcattgcatagtttgtttttaggtcgatgaaagctaatttatactatacctttgctttgtttggttttgtgtgtcagcgttacattaacttgtctttgttttttcacattgttaacaataaactccaaaatccaaccatagcattttcgaggttatatatacttgtaatattcattaaatttcagaaattactcataaactattaagaggatgttgcttataattcaacccccatttcagtagtactcaacattcaactgcattcaactgaatcttttggcttcaattactatttccattacaattgtccaaatgtaaaacgatttttacacaaaaatcaggaaaatgatattccataatgataaaccatgatattggtaaccaataaagactagtacatgtaatcgagcttcataaatcagaatacgtaatgaaacttaaccagtcaatgtaatttttttcatacaggaaaagtagactgagaacggtcaaactttgttttctaaaaaagaaaattaggcacatccttgaaccacgtttgacaaaatctctggtttaattacacattaacacacaagtactcactctctctttaaaaggctctatacactgaatttaataaggaaggttctcacttctcatcaatatgaatttatcatttcttatatactttgcactttgcgcaataaacatgtgatcgtattcataactaaagtaaaggcaacatactaaccctctttatttaccctttttagagcttaaaatgaaaacaatctccaattattttctgtaaaatgttaactactgtaaattttgtgaatatctcagtttattttacatttatctataaatacatttgtttttatcttaatagtaaacttagattcagttacatctctagatagattggatcttttaaattcacttttaaattctcttattctgtgaaagttaaataataacttcctctttattttgatttttctcataaatttttgaagttaaattaaaaattcgacatcatggggtcgttaattaacatccccttgatttaatatccacccacattttttgtcgtccccaaaaaaataatctgacccggaaaacccgacccggctttccttttcgttgttatcataacaataaatcaaaacagaacaaataattttgatgcaaaaaaaaacaaaattcgagaagaaagccaaaaagaaaaagaagagagaatgctctcagtctcagcctctcctcaccaccactaaccccagaagaatcctcacagacagagagagagagagagaatcagaatg

SEQ ID NO: 30567 - DNA, 3000 bp, Unknown; identical to SEQ ID NO: 10001
  misc_feature (1)..( 3000): 2750-1469P.txt file - cDNA_ID_3033147; gDNA_ID_2213359; Annot_ID_180736

SEQ ID NO: 30568 - DNA, 3000 bp, Unknown; identical to SEQ ID NO: 10005
  misc_feature (1)..( 3000): 2750-1469P.txt file - cDNA_ID_3033154; gDNA_ID_2213359; Annot_ID_180725

SEQ ID NO: 30569 - DNA, 3003 bp, Unknown; identical to SEQ ID NO: 26523
  misc_feature (1)..( 3003): 2750-1469P.txt file - cDNA_ID_3033158; gDNA_ID_2213359; Annot_ID_180724

SEQ ID NO: 30570 - DNA, 3003 bp, Unknown; identical to SEQ ID NO: 26524
  misc_feature (1)..( 3003): 2750-1469P.txt file - cDNA_ID_3033162; gDNA_ID_2213359; Annot_ID_180723

SEQ ID NO: 30571 - DNA, 3000 bp, Unknown; identical to SEQ ID NO: 10007
  misc_feature (1)..( 3000): 2750-1469P.txt file - cDNA_ID_3033177; gDNA_ID_2213359; Annot_ID_180719

SEQ ID NO: 30572 - DNA, 3003 bp, Unknown
  misc_feature (1)..( 3003): 2750-1469P.txt file - cDNA_ID_3033181; gDNA_ID_1972187; Annot_ID_180176
cttttttatggtgtggtcattagcaacatacaagtagaaatcaagctccttgttaatgaatgtggtgttgtgaatgatgtcaggaaacgtttttctgaagcacggatctgaactaagattgatcccgcgtgatagagttggagctgtgtttgtgatggatccatagatgatgtgtaagcaatgattaaaaactcagttccaaaaaaaacataataatatactgaaatgcttatgtacaacttcgttgaataaatatgtaatcgtcacaattgaagtgagttgaatttggtcaagttatatgtctgttataattcatatttagataacgtatgtgcactaaaaaagagtatggatctctctgtatatgctaactcttgtcaatataaatatttatcttgtaatatagtttttttattaaaatatatttttaacttttattttattttaaagttaaaactgtaaggttttttatattttttaaataatattttggataaactatttttttgaagtgttttaagttttatattttgtgtagactttggatacaacatccaaaactaagcggtgttttagatttaatatgctttacatataaagtttttaaaattcgaaccaaaaacttgaatattaaatttacataataataggaaaaacaaattgaatgtttgggaatcgctaacgactgactaaatgatggattcaaatccggttagatttcataccattatgtaaatttagtatacacagaaacaaaaaaaatttaaaaaacatacacaacgaaaaaagcttttaaaaattcgaaacgaaacataatcaaagttttaaaaactatttttaaaaatccgaattaaaaacttgaacattaaatctacataataataggaaaaacaagttgaatatttggaatcgctaacgactaatgccggatccaaaaaccgattagatttcatatcattatgtaaaattgacattcaaataaataaaaattgaaattaataatatatataaaaatttagtatatgattagggtttaagttttagggtttatatatattaaaagctattaaaaaattatgaagggatagaaattgacctgtttcttaatgggtaggtgaatgggctttttgttgggctgaatatgagaatccaatccaatctcctccaccatcgtgtctgtcaccatacctcctaaaccagagcattgaagattcgacgtcttttgatgtcaaacaaaacctcctacgacgaggaagagtgagagaagatatcaagagacgaagggagaataagaattagaagcatatcttcttccaccacgccacgaagtttgaagatgaaatagaagcacgaatcgagaaagaaaattttaaaatcatcgtttgacgtttttggttggatacttaagaattttaagaagtcatatttactaaaagtcaaacgccgaatgtaggaagtaaaatatacgatgtataaatcatacgatagtggttaaaatatacgatatacgataatgattgttattaacccagagaaaaatgcgctcctctacggaacctaaacgctttaaaactccacgattgcaaaggataggatgatagtgatgagtatttaacaacctaattttataatcgatttttaaaaattttaaaattccgtaattttgtaaaacgcagacacaattatgagtatgtcacaaaacaaagctgaaacagtgaaacgaaaacagagagctttgattttctttataaaaaaattcacctaaatgaaatctacttgctgccagaaacagtatttacataagaaaacgaaacagtcatgaacaaataaaattaaaattttatacacacagtctcggctataaaacagaacaggggcaaaacagagagatcatttgtggaaacaaagcgtagcttatctagacaaaagcatcaatacgtgaaagtagctaatctagatacggagcgtgtgtcaagtattaacaatattctatatagcaagcaagataagtaactaaactctaaaatgtacgaattcgtctattcgaaagaaactaatataattaggaagagatcaatcactaacgaaaacatgaagattataacggaacaaaaagagatgggaacggatcttacggagttcggttttaaaatcagagttggatcgtcgtgtttctgaaacagtatcttcagtcctccggggaaaataactgcaaaagagacaaaagcgattcatcactagctcgaactaagaaaccttaaagatcaagagaaaggatctgctatttcagtggagtttacctgaatgattgttcgagcagagcatgatcctgactgactcatgagtaggagtgaaggaagaaagagagaaacttgaccgagagatggtgacgacggtgatgtctctctctcattatcttttctatgagcagaagaatagttgaaatttgtaaagagaaggaagaaatgtgttgttggtaatgagattgatagcgtttaagggagtatttataggaatcttcaccaacggctatcttcttacgaaaagcttcaccaacggctataataagttacaacgttcgactgtcttctcattgatttgacaaaattagccgttgcattagtattactgatttgtaattttgtaaaccaagccaagaaaagagcagtactatgtgatgggccaattagcccaaaaacgcacatagcgaaggcccaatggaccttaaatctggtatcggattgaattctaagaaagaaggagaagcggcaataaggagttcgaatctcaaacaaatttctgggttttttctttcctccaaaatttttaaacaatttctgtgtctgtggatttctacttggacggcgatggcgagaattggggctaaacccagaaattgaggatttgaattctgctgctgcggcgtctctgtggtggtttggtttctcgtttctgaaaatctacggtgtagtaagtcggagatgcagttgagatttagcaatg

SEQ ID NO: 30573 - DNA, 3003 bp, Unknown
  misc_feature (1)..( 3003): 2750-1469P.txt file - cDNA_ID_3033187; gDNA_ID_1972187; Annot_ID_180172
cgaaaaaggggaagataatggctaagaaccatatgggtacaaccacgggtaatctagccatggctcttttgaacatgctcttcgtctcatgcacacctatcaatttctcccacacaaaatataacggtgtagacgcgaatccgaacgttataaattgatgaatgagcatgaggatcactgcggtatctctaaaaccagtcttagggagaagagagagcgcattggaatgagttagtagcttatcgccaaacgcccaataaaccgcagacgcggatggtagcgttagcgttagtacatatatggtcgctagtagatatatcgccttgaacttttgcggtttccacatagcgtgcattatctccctattatattttttcaaatttccaatacataattagttaagccattaattaagccattttatttttccaaacaaaaaaaaaatacttacactgtgacggcgtggccaccaaaggtgtagagaatgttggtggctccggtgaagtaaagcaccattgtggttggaccagagtgtttcacatcctcagccttttttatatgaaaaataaatatattaaacaacaataaccaggactatatgtctatatcttataataatcaaaacaagatttgtgttaattataatgacctggccatgaaggagtgaagcaatggtgagataccaagaagtgtaagtggtcatagcgagtccgaggaatgaccaaattctataattgtggaaggaaggaataaaaacagttgttgcacagcacgccccaaatatgtatgtccatgtcctcttgtccaatttgtcattaatataatatatattgctgcaaatcattttttatattaattaattttcaatatgaaaaaaccatataataaagaaaatgaacattgattattaatttacctagcacaagcaatgagctgaataacagatccaaagagaagaaaagtgcagttaaagatcaatccaaggttcctccaatgtttccccaacaatccatctaacacctcaaaccacttttttacacaaacaaaaaaaaacaaaaagttaaaattcaataataccaccaaaaaaataaaaaattataacgagtcacaagaattagaggtggaataaaacctgaataacgtggttacggaaatcgaatttttctcgttctttacgagttcgatattcaacgtaaagaacactaatgagataagcagtccaacttcccattaatccataaaagagttgaaacaaaattcccgacatcatcccaagttgtgagaacgagtatggtaatgtcaacagaacttgtgccacctgccatttttataacaatttagctatagaagacgatacatacacatctatatataagactaaatctgtgggaagtacatacctgatttgaagcacaactaaaccaagcatcgtagacagaaccaccatgccagaagaaattagagagttttgttttagttgaagatttcttgttaccacttatgttttcttcttccctctccatttctaagtaattccctgcgaccactgtctctattttctctgccgccatttttctcttcttctctcagtttctttagcttctttacttccactctttaaatagactagtgaaaagctttttcatttatttatttgttttatgggttttgtttcctttcttttgctctgtgtgcaattattgagtaacgagtgtcgggggacgaagtctttagtcacagctcacgagttgtcatggggatatcggtttatgattggttggtgactgagttatgtcacctacttgtgactgttactgttttcggcgagcgtggcgttgtttttttaatgggcttgatttgattgttgggcttatgggccatatttctggagcattacacgaacgggtaggcccggtttgagattgttaattatatattgaccccgataatatgcaaaaaaagagggttagctaattatagattttaaagtttaaagtagtgagagtagactaattgtaaattgaaaatagaagtgatgacaatgatgttttttttttttgaaagaaaggctaaactattattatcattaacaattatttgaatcatgatgattgtaacaactagaaacaatgaataaaacatattggtcctttcctccttcttgtgatgaggatgataacgatctttatgtagaataatcaattatatttctaagtttttatgttttgtccgattatattacatagctgttacctggaactcgaaattacataaatttatgcctttgtctaccatatggcatcgcacatccaaacgcttgatttagaagtagaaaaacttggttaaaagagaggaagaaatagtgatttgtgaggtaatcgaggattggagatggatccaatggaaagaatgattgctaatcaggtgggattagtggtaaacataattaccacacgtgtctagctgtctaagctttatttaactcactaatttcttagaaatgtctcctttttagccccatacttttacaatggatcgaattattaatgagaaggtatcatcattttagatctttatagctttttaacccggccaaaatggatggcagcggaaagaagactcatcgccaattgacattaaaatatgcattttcaaatgtttttttttttttttttttttttgtgattcaaccttatttaggctattgagatatctccaaaagatataatattgtcgtccctaaatagagcagatattcagatatcattggtaataatactgaaaaaatggcgagtcattgtagttaaataatttgacatcttgaaaccaggaactcgattctactggatggttacagatggttcccataacgacaaagattgtgagatttgttttgattttcatcaatttatcttcgtcagaaaatctgtttaaccaaaaaaaggatcatgactatacaaatttattaatggtgtaatattcaaaaagcagaatataagaatg

SEQ ID NO: 30574 - DNA, 3003 bp, Unknown
  misc_feature (1)..( 3003): 2750-1469P.txt file - cDNA_ID_3033212; gDNA_ID_1972187; Annot_ID_180191
cgtccgcttccgttctgcagatctcccacatgttcgaatccccatattataggccttcgcgttatcaacactcgtgtgcggtggatttccctccgtcggccatcccgtctccgccaccatcaccaccacgtttgcggcgttgatcttctccaacgccgcattgaatccgtcaaccatcgcctcaaacatattgttgtaatacaaatcaccgtctatcactaccggtgtattggatttgaaactagcgtaatcgagtgagatgtgatatggatctgacgcgtatgcgaagtacgggtagatattcgtcatgagaggcgaattcgtctctgagagtatcgatgtaatctccgtcatgatctcggttagatctgggaggaatgttgcagcggaaggtggatatgtattggtcaacgcggtcatagctaaaaccgtcgtgacagagattcctgtgacgccggaattcgttagcgcgacgttgacgttttttatcgcggcggcaacaaattgagcgatttctccggggaagacttcgttaccaattgtgatccatttaattgcaacgtcgttttggtaaggtgtaatccaggtggagacgaaatttgttgcggcggctggatcgtgagctagggattggatatcttcgtttcgtggaccaaacgcgactaagagacctgagccacgaagcgcttcgagcatgtctgcgaagggctcgtacatacggattgcgtcgatgttgttgcttttgtatagagcaactgtatctgccggcgttgggagattgttgccgttccggccgtaacaatctccggtgatgtcccctgcaacacctagaaggacacaaaatatagtaatcaaaccgtactcggttattgtttggtttaaaatatttaatcgtttccaaaaaacggagttagactgaaccagattacatccaaagaaaatcaaaccatgagataatgctttttattaatttaaacatagattgattaaataaagttgagtttttgttgttgttattattgtgaggttaattgtgatgaaaacaaaataaatcaataaatcagtttttacccgctgtgcaaaagatttggatggacaggagcataatcacaacagcgaaacggattagtttggaatccattgatgtatggtgcgtgtaaatgaactatttaggagagaattgatacgagattattctattgtgtttgtgtatgtttgaagatcttaatattggtgaatgtggaatgtatttaagggtggtttttttttttaggaagcatgcgtaattactactctaataataataggctctcaagcatgaattatttatccattaaatgaaatttaagtgtacctagttttgcaactgataaactatacaaattcgtgctacagctttgtcattaatggatgatcaaccattttttttttgtttaccaaaacatcatattattatgccacttgggttgggttaaacgttttctcttttggtggtttgcgaaaactctttagatcataggacttactcactatttttacattgtgtgcataaatacgtaattacctctgaagaaaagttacaggtgaagttcatcccctataaaaatgaagaactgtttggtaaaaacgttttaattaatcaccttcaaatacattctatcaatcggcgatatattaagaaagttaacaagttattaatttgtttactagatcaagatttcaattgtttactaatttgtcgttttgtgcaagagttatgcttaggtattaaaaatcaagacaaaaatttcattctacaaattgatttccacaagttttgaggttccagcttcgtaaatcattaggtattaatgcggtagttttatcatttcacaaaaaaacatttgaaataacattatacattaatacatccataaataattcaaacatcatgatctccttaattatatcaattaatctagttttttttttttttgctactcgatagttttaaagccaaaacattgtaaacaacggattctagtttaattggtgggcacaaagagtcattttcataataatatagaacatgtacatcacatgtaattaatacatacattctctttctgccaatcaatcataatcaaagcaatatttttttaaaaactaatatagagcaaatctaacaataaaaaagagagagtggtatcatcatcataaacaataagaaggctccaaaaaacagaaagttaaaaactaaaataaaagaaaatctaatttggatctaaatgaacttctgaaaaaagtaatgacctaatctccaattactacaaaaaagaaggatcaataaataattaaagaatcgagaggtaaaaaaagcattatccgtacgaatgaattaacgtggtcgtatctcgtgagtcatccaacgagtaaaaataaaacacgtgtcgtaacaaaggaggtgcacgagtactagcctacgcctcacacctctctatcatattctcttgaataaaaaagctgaaaaaataattaaaaaaaaattctggcaaaaatgaaccgttcctctgttgcctgcaaataacgcgaaaatctctctgagaaaaaataaaaataaaataaaagaaaccgaaccagtcgtgggaaggatccgaaagaagatgaaccagagaaatttgaagaagaaaccctaatcttagcctcgcttttattctatcttcttcttcttcttctttcttcgttcttaatctgagaggcgccaagattggtacgggcggagctaggctagggttaggattttaggctcgggaaattagggttagggttttgattttattggctgtttctttctcctgtggtttgggaggtgaaattgaaaggcggagttgtattggaggatttgggattttagggttagggttaagtgttttctcgttttttcatgggaggtgtgggagtttatggtggtggtttgtgtcggttatgaacgttgaccaatgccagtggcggaagaagatgatg

SEQ ID NO: 30575 - DNA, 3000 bp, Unknown; identical to SEQ ID NO: 9782
  misc_feature (1)..( 3000): 2750-1469P.txt file - cDNA_ID_3033216; gDNA_ID_1972187; Annot_ID_180190

SEQ ID NO: 30576 - DNA, 3000 bp, Unknown; identical to SEQ ID NO: 10980
  misc_feature (1)..( 3000): 2750-1469P.txt file - cDNA_ID_3033256; gDNA_ID_2214469; Annot_ID_182959

SEQ ID NO: 30577 - DNA, 3003 bp, Unknown
  misc_feature (1)..( 3003): 2750-1469P.txt file - cDNA_ID_3033319; gDNA_ID_1972192; Annot_ID_180231
tacttttttttatccacttatatcaataattaaatatacgtatgttgttgtcactctactcttttattactggtctttacttctgtcttcatttattaataagattctttaattttccattatctactaattaacaaaaaaaatcgacaaaggaaaaatacgaatcatattcttgtcgttgattttcgatgatgatttgatgacgatgaaaattcaacgttacgagtttcagaccctcatgttcttgtcgattgccgtcactttccaggaaacatatcattatcccttacttcttacgcatttaaattaactactgttttttctttctaactatattatgtgattttctatgtatagttttaccaacaacaaaaaaagaagaaatttaaaggaagctcacctttccaaaatacttgaaagtgagaaagaaagaaaaagctacttttgaaaaaaaaaactttaaatttaggttgatgaactttataagcggctttatctatctactaaacaaataatcgagtttttaattcatgaccagaatttcttgtataaactaactactcgtcttatctcccacgtaatagaccaccagggtgctatgattataccattccaaagaaacccataatgcactttggtgggttgtgtagatttatatatggtattaagttaatgatatgttttatgaaaaaaaagagagttaatgatatgttaattaagtgggttttgtttatatagttgttgtgtacatttatctcaaatattcaaacatacatatatgatgttttgtacaaaccttttttaaacgcatttatttaaagagcactaaaacatttgttaatacaacatttggcaaaccctgtagaatctcttaaacaaaattacaacttttgcttaatcaaatttgtagttctacacgaaccaattcataggacatgatttataaatcaacatcgcatataacatctatctatgttttcttatatgaaaatttagtagccgtttgtttatgcagcgcgtattctaacagtttgttgttatcgcaatatattttatatttgtatgtacctatatatagtaataaacaagtttgaatgcagtgaaatgcgatgcacatctcccaaaagagcttgtctcgaacactcgacaatcatcgtcatcgtaatagaatccacacggtgctccggagaacttatagctcatgttggattctatgtttcttctgcaacatgtaagctgtaacaagacaagtttgtctccatcgttaaagcaaaagataatggaaatttataactttccatttgtgtttagtcattctacactgaaattaatgtgtttgacaagtaaattagttcaacgattagtatggtcgaacctcgtaggatggagcatcgtgtcccactcctatcactatcaattaccaaacacaatgggaaagtagacactggtcaaagtatcatatgtcaaaaacatcatcatataactaccaacccaagagaagtgtgtgttcattgaatcttcttaaatggaataaaaattcgatttgatatcaaagatttggcttactcatctctactcaaagtcatgctttacataaatatggtgggtcgatctaggctatctaattaaagccaatttttagctttccttgggaagaccaaacaattgagagatggttaagttttgtagaaaaagacaaagatctccaattgttaggcttttgtttggttcttcttttaggcaaaccataagagtggttagctcgtcgggtaagaaacttatagtatctatcgtgctcgctacatatcgcttgctgatcaatctaacttgtgatcagttttcaagtacctagattagatgaacgcatgagtaattcgatttaacactcacagtacattcatttggaaatcaacaagggtgtcgaaattgatcacaatacaatcaatctgcacttaagttttagagaatcctacaaagagtttcgatagaactctaaattgaaacgtttatttgatctatgatagccataacaggcaaaagcaagcttcttttgtcttatcacttcattttctgctctgtaaagaggacatggcgattaactcgaggatcgtacttacggaactcgagcttctcaagaagtcccttggtactcttcctcttgacatagaagaatccagttccagctgctgaaactagacggatgaacatgaacgtcttcttcctcttgtctcccatttctttatcaagaatgacatcacattacattaccattcttttcattacagataactaaaatcctccgaactgatgaaacagaggtcacaaaacgtataaagtttccatttttttatagctataattcgaaaatgcacaaactttagaaatggatttgtttctaaatcatatgggacaatgacttttctttgaaatctatgaacctagagattcgaaaatcaagcggaaaacagatctaaaacctagaatccagcaaagaaatctcagttcgagaacaaactacaacaagacgaacacgatacaagcaaagaaatgaaaaattagcaagaaatgagtcaaaatccaagaagctagaatgattagcgtacctgaaaattcgaattcgacggagtccgaaaattgatttcgccgacgaagatgacgggtgataaaccctacaatgagaaatcgggttttgaatcaaaccaaatgggctattaagttgagcccaatatcagcccagcaaagcgacatcatcaaaacgcagcgtttaattgtcgagagccaatttgcttttgttgttgttcttcatcatcgcttttagttctctcagtggagaagaagactcgagtcatctgcagaaaaggtgagagataatgtttgcaaattttcatttagatttcgaaacttattttctcaaatttctgatggattcaattgatttttcagattcccgatcggattggatcatataagattttagggatttggaaaaaatcttgagctatg

SEQ ID NO: 30578 - DNA, 3000 bp, Unknown
  misc_feature (1)..( 3000): 2750-1469P.txt file - cDNA_ID_3033323; gDNA_ID_1972192; Annot_ID_180229
cttcttctccactgagagaactaaaagcgatgatgaagaacaacaacaaaagcaaattggctctcgacaattaaacgctgcgttttgatgatgtcgctttgctgggctgatattgggctcaacttaatagcccatttggtttgattcaaaacccgatttctcattgtagggtttatcacccgtcatcttcgtcggcgaaatcaattttcggactccgtcgaattcgaattttcaggtacgctaatcattctagcttcttggattttgactcatttcttgctaatttttcatttctttgcttgtatcgtgttcgtcttgttgtagtttgttctcgaactgagatttctttgctggattctaggttttagatctgttttccgcttgattttcgaatctctaggttcatagatttcaaagaaaagtcattgtcccatatgatttagaaacaaatccatttctaaagtttgtgcattttcgaattatagctataaaaaaatggaaactttatacgttttgtgacctctgtttcatcagttcggaggattttagttatctgtaatgaaaagaatggtaatgtaatgtgatgtcattcttgataaagaaatgggagacaagaggaagaagacgttcatgttcatccgtctagtttcagcagctggaactggattcttctatgtcaagaggaagagtaccaagggacttcttgagaagctcgagttccgtaagtacgatcctcgagttaatcgccatgtcctctttacagagcagaaaatgaagtgataagacaaaagaagcttgcttttgcctgttatggctatcatagatcaaataaacgtttcaatttagagttctatcgaaactctttgtaggattctctaaaacttaagtgcagattgattgtattgtgatcaatttcgacacccttgttgatttccaaatgaatgtactgtgagtgttaaatcgaattactcatgcgttcatctaatctaggtacttgaaaactgatcacaagttagattgatcagcaagcgatatgtagcgagcacgatagatactataagtttcttacccgacgagctaaccactcttatggtttgcctaaaagaagaaccaaacaaaagcctaacaattggagatctttgtctttttctacaaaacttaaccatctctcaattgtttggtcttcccaaggaaagctaaaaattggctttaattagatagcctagatcgacccaccatatttatgtaaagcatgactttgagtagagatgagtaagccaaatctttgatatcaaatcgaatttttattccatttaagaagattcaatgaacacacacttctcttgggttggtagttatatgatgatgtttttgacatatgatactttgaccagtgtctactttcccattgtgtttggtaattgatagtgataggagtgggacacgatgctccatcctacgaggttcgaccatactaatcgttgaactaatttacttgtcaaacacattaatttcagtgtagaatgactaaacacaaatggaaagttataaatttccattatcttttgctttaacgatggagacaaacttgtcttgttacagcttacatgttgcagaagaaacatagaatccaacatgagctataagttctccggagcaccgtgtggattctattacgatgacgatgattgtcgagtgttcgagacaagctcttttgggagatgtgcatcgcatttcactgcattcaaacttgtttattactatatataggtacatacaaatataaaatatattgcgataacaacaaactgttagaatacgcgctgcataaacaaacggctactaaattttcatataagaaaacatagatagatgttatatgcgatgttgatttataaatcatgtcctatgaattggttcgtgtagaactacaaatttgattaagcaaaagttgtaattttgtttaagagattctacagggtttgccaaatgttgtattaacaaatgttttagtgctctttaaataaatgcgtttaaaaaaggtttgtacaaaacatcatatatgtatgtttgaatatttgagataaatgtacacaacaactatataaacaaaacccacttaattaacatatcattaactctcttttttttcataaaacatatcattaacttaataccatatataaatctacacaacccaccaaagtgcattatgggtttctttggaatggtataatcatagcaccctggtggtctattacgtgggagataagacgagtagttagtttatacaagaaattctggtcatgaattaaaaactcgattatttgtttagtagatagataaagccgcttataaagttcatcaacctaaatttaaagttttttttttcaaaagtagctttttctttctttctcactttcaagtattttggaaaggtgagcttcctttaaatttcttctttttttgttgttggtaaaactatacatagaaaatcacataatatagttagaaagaaaaaacagtagttaatttaaatgcgtaagaagtaagggataatgatatgtttcctggaaagtgacggcaatcgacaagaacatgagggtctgaaactcgtaacgttgaattttcatcgtcatcaaatcatcatcgaaaatcaacgacaagaatatgattcgtatttttcctttgtcgattttttttgttaattagtagataatggaaaattaaagaatcttattaataaatgaagacagaagtaaagaccagtaataaaagagtagagtgacaacaacatacgtatatttaattattgatataagtggataaaaaaaagtaacaatgtcattgtcagtcgtggattcagcttaaatttaatgaatataaaccacaactatttcttcattactagatttatagatttgattctttctctctcagaatttttgtcgaccgaatttcatattcatatatagttttattaaataatctggttagatg

SEQ ID NO: 30579 - DNA, 3003 bp, Unknown
  misc_feature (1)..( 3003): 2750-1469P.txt file - cDNA_ID_3033331; gDNA_ID_1972192; Annot_ID_180226
ttgcccggtgtgattttttggtttgtggtgtgattttgtaaagccggtccgtttttcgttgtttgagtttgtggttttgttgaaaaattgtaactgtccatgtaaatagggactgatataggggtgacttgagtacacctagctcatatgcagacgttagcgtctgcgtttggagattcgagtttgcgttggtgggacgtgagcagattttttaatctaaagtttgtgtacactttcttgtacttcttatacaaaacaaagggacacgaatctttctaatgttcataatttattactgggttttgcaagaaacttgttgacaatatacaaataaactgataacttatatataaatataacttttgagaaatctaatcttatttttatgcttgcacgtatataaggacaaagtgagtgggtatcaatcaaccttatagtaacatatacaatctttcacgcataaaaccctataatgtgaaaacaagaaacgtcctttacatatttcttctcacctagatattattaattttaatattgagactttgaaaccccagaaataagataaagtgtgggacaagaaaagaaggcacctttttttgttgttgcttttagccgtgaggccagcatatgcagtaactcacatgcatgcgcctctaaccttgtggcattttaggaattatgcaataatgcactatacttaaatacgttaattcacaaagtaatacattcattcagttcataaacacgtctcaagattaagacaaaaataatcataaaaaactggtgttttacataaacttatgtcgaaattaattagtagtctacatataattactcaagtgttatttgcatgtaaacagtacaaatttttggaacgtttgattttgatactactataaactgcagtatactgtaaagcatgcatatgacgtcactttaatttgaaacgtaatttcaactttttcaaaaggttctttagcttagcgataaaaaaaaaaaaaaaagttagtgtatagtaaacgaacaaatgaaatgaaaagaagagaaaagtataagtcctcaaagtgtattgaatcacttaacggtaaattagtttttatttttatttttatccagagttcttaagttaattatgcatcaattatgtggttctgacgtaatatattacttgcgtttttcatctaaaccaatctaaaactgtaacaaaatgttaagtggagaacaataaaaaatacaaatagtaaaaaaaaattgaaaatcaaactaaatctaattttattcgttatttttaggggacaaataaactcatgaaaataatgacgtacgtggtctaaaatatatgaatgacctatatagctgaaacggcaagaagccggagcgagaaacaatagacggcggcgaagacaaagtagatgaaaactccgggagcttgagaagacagagaagcaagagatgaagccggaggagaagccgatggagcgaaggcgggatcaggatctgcggaaacgtcgtcgttttctggttcaggaagtgttgaagaagaagggatggtttgagtggaggagacggcgggtgaagggaggagaggagcgatctccggtgagatcttttcttcagagggagagattgtttgcgaagatgggattgtatttgtcgtcggcgaagagagagaaagtgaggagagaaagatgaaggtgatgagtgttagcaatatagatgaagccatcttttttggttactgtaatgatgaacaaatcaaagctgagttgtttttttccttaactgatgagagcgcattttgtgttgtaataatgatactgtctctataaaagaaaacttttagctctaatagtaaaatattataaattgattttaaatggaatttgtctcacctttttccaaaaagattattatttatcaatttaaaggatgtgttcggtggaaaagaaaatatatttgctgaattcttgaagatgggcgtagatcgagttttcactttttagtagaagctcttatatattgcacatattttcgaataaacatgtgctttactttttgctgaaaaatattatgttaatgcaaattatacatattgctaagtacgagtaaaggcatctccatccatgagaaacctacaaagtttctaaaacaaaaaaaatattaatattatattataatttaattatttgattaaaaaagtaattttgttaaaaaattgaatcaatagtgagatgagaattgtcatgatgggttgtagagaatatctcaaaatttttcaagtgagaaactttctacattttctctccttcattttcattatttttatttttttaattgtgaaaaactcttatgaaataccttcaatggagatggtctaattacgtttgttgttgcctcgttggatgttcaaataaaaagcacattttatattgggttgttcctaaacaaatattttgttgtcttttgtactaaagtttattggcgagttaagaaaagctttgtggtgtgtgggaattattattattatttattatttattgttctttagtttgctatgcaattcgagcccactaaagaggcttcctatgggcccaaaaaacgcagcccactattgtagtgcaaaacgtgctgagttttctacattgcatgcccaacaatggccaccagtgtagttaaagactcaagaacttgctgacctctatttgtttgactttcttttttgtgtgaacaaaatcacatattgttgatgtcatttgttctgctataattcttaacttcagattacagataacgaattttctcttgatgatttaaacaaacatatataattgtcaatatcagaaaatgaaaaggagatataaataatttttttttgcgcctaatcgaaacttcacctaccattttttagcgtataaaaacgttaaaaataccaaaatttagaaatccaataaaagttgtgaaaaaaagccgcaaagggtcgttgttgtttgtcgcctctcaatg

SEQ ID NO: 30580 - DNA, 633 bp, Unknown; identical to SEQ ID NO: 110
  misc_feature (1)..( 633): 2750-1469P.txt file - cDNA_ID_3033331; gDNA_ID_2720; Annot_ID_145895

SEQ ID NO: 30581 - DNA, 3000 bp, Unknown; identical to SEQ ID NO: 9794
  misc_feature (1)..( 3000): 2750-1469P.txt file - cDNA_ID_3033335; gDNA_ID_1972192; Annot_ID_180222

SEQ ID NO: 30582 - DNA, 3000 bp, Unknown; identical to SEQ ID NO: 9800
  misc_feature (1)..( 3000): 2750-1469P.txt file - cDNA_ID_3033343; gDNA_ID_1972192; Annot_ID_180220

SEQ ID NO: 30583 - DNA, 3000 bp, Unknown
  misc_feature (1)..( 3000): 2750-1469P.txt file - cDNA_ID_3033347; gDNA_ID_1972192; Annot_ID_180219
cttgtacggctctgtttgcactcttaacttttgcttttccgggcacttttaatatttaccgtataatgactgtgtagcctgctgtactcatattgtcctcatatatgcagaataatctccatgaactgtgggctcttctaaattttcttctgcctgagatttttagttcagcagagacttttgatgaatggtttcaaatttctggtgagaatgaccagcaagaagttgtgcaacaactgcacaaggtatggatgcacccattccttgcattgagtttattctgttctgtgtgagtcgtaggttaattgctttcatgtatctttttaggttcttcgaccatttcttcttcgaagactaaagtcagatgttgagaaaggtttgccaccgaagaaggagaccatacttaaagttggtatgtctcagatgcaaaagcaatactacaaggctttactgcagaaggatcttgaagcggttaatgctggtggagaacgcaaacgtctgctaaacattgcaatgcaactgcgtaaatgctgcaatcacccctatctcttccagggtgcagaacctggtcccccatataccacaggagatcaccttataacaaatgctggtaaggctagaaataaactagatccttcagatttctgtggaagttttttatgaagcatctctatattgttattttaggtaagatggttctcttggataaattgcttcctaagttgaaagaacgtgattcaagggtgctgatattttctcaggtaaacgctaatacagaacagctggatataatggtttcttacagttcatcttctctttttcctttgtctatgtaaagtctgagccttattcttttctttccacatgtcagatgacaagacttttggatattcttgaggactatttaatgtatcgtggttacttgtattgccgtattgatggaaacactggtggtgacgaacgagatgcctccatagaagcctacaacaagccaggaagtgagaaatttgttttcttgttatctactagagctggagggcttggtatcaatcttgctactgcagatgttgtgatcctttacgatagtgattggtaagtctctcatcattgtccactgtagtttatgaactttctcttcacgtttgacgagtctggcatattctggcaggaacccacaagtcgacttgcaagctcaggatcgtgcccataggattggtcaaaaaaaagaagttcaagtgtttcgattctgcactgaggttggtctcctctccgtgaatttcaagttaaaacagccatgagaggtttaaaattaattatgtgttgtttgtttacagtctgctattgaggagaaagtgattgaaagagcttacaagaagttagcacttgatgctctggttattcaacaagggagattggcagaacagaaaagtaagtgcgttatacagtgattgctttatgcattggttcatctctgacagaattggtatttatcttaactatgcagctgtcaataaggatgagttgcttcaaatggtaagatatggtgctgagatggtgttcagttctaaagatagcacaatcacagacgaggatattgatagaatcattgccaaaggagaagaggcaacagctgaacttgatgctaagatgaagaaattcacagaagatgctatacagtttaaaatggatgacagtaagggtgtcacttacctactatttcccctattaggttgtgtgaatattgtaatgttttgataatctgttgttttatttgttgtaggtgctgacttctatgattttgatgatgacaataaggtaacttgtatatttctttgcatagtcttaactttcatgtcatatccctagctttgctctgcattactgatgataaaatttactaatatatttgtaaatttgttcataggatgaaaacaagctcgattttaaaaagattgtaagcgacaattggaatgatccccccaagcgggagagaaagcgcaagtaatgattacttctgtcttatacattgtgcagtcctattttgccagtcttcatatctaaaagaaacatcccttttgttttatctactgtatcttcagctactctgaatctgagtactttaagcaaacattgcggcaaggtgctccagctaaacctaaagagcctagaattccgcgcatgccccagttgtgagtacctcaacaacctccatctcattgttgaatgccttttccctgttttgatgattttcttacactagaaatctaatttattgtccctctttcaggcacgatttccagttctttaacattcagagattgaccgagttgtatgaaaaggaagtacgttatctcatggtaggcctctctcaaaacgaaacacttgattcctttgatgtgcttaagagcgagtttttttgccttataaaagcaacttgcttctttttgtgctttttggtttcagcaaacacatcagaaaaatcagttgaaagacacaattgatgttgaagaaccagaaggtcaagcttgtacccactttgttaacatgtacccactttgttaacatgtttttcagcaaacctattactgattaagaatttttttgttagaaggtggggatcccttaactactgaagaagtagaagaaaaggagggattattggaggaggcaagtgaatatgtttgatgttagagtggtcttagacatttgatttggtaggctttaattaattttttgtaattgtcaatctccagggtttctcaacatggagcagaagagattttaatactttcctcagggcttgtgagaagtatggccgcaacgacataaaaagcattgcctctgagatggaagggaaaacagaggaagaagttgaaagatatgccaaagtatttaaagagcggtacaaggagctgaacggtaagtaacacctttcaatgctaagttatgcagtgtttttacatgtttctaagtaattcctacctccaaaaagagcttatg

SEQ ID NO: 30584 - DNA, 3003 bp, Unknown
  misc_feature (1)..( 3003): 2750-1469P.txt file - cDNA_ID_3033351; gDNA_ID_1972192; Annot_ID_180217
caccaagtcccccagctcgtcttcaagctctccaactcgtcttcaagctcttcagctcgccttaagctcttcagctcgcctttaagctcttcaaactctttagctcgcccttcttacaaaaacaaaaaaggatatcaattatgtagatcaaaacaaaaacaaaaaaggacttacaaggacgtagatatcaattatgtagatcaaagaataagcagtccaaattccagcgttgatgaaacgaactaacgatagccaaaacggcatgtacttgaaggtcttagtctccggcggcattttgtcctaattgtttcacgcattaaaaacttatcaaaaccagtttaatagtttacttatctatatattcatcaataagtgagagccagagagagagagagagcttactatggtaaataaaagatagatgataacaatgttgtaaacgttgcaaacaacaccaatgaatgtatgcttgccggccggataaactcccaaatccccagatagtcatacaatagactgttgccacaaaactaaactccaacggaagcaatagataaaagagtaatatctgcacatcaacatcgacatcatcaaaatcaatatacaatatttttctggatttgttttttttttctttgggatatttctatagaatttagtcaagattgtgtttgtttgttaccaccttttgtgcaccagtcaccaatccttatttttattattaaatctatttttgatactataattcgtgattttccttttagttttatatatatatatacttacagagatgcgagcttcatattattatttttatctttttgaacaccaaaaaaatagcctcgtattatttttaaatgatcaattatgtgatcatatttaaaaatacgatccggtttttaagggatttgaacggatcaaatgtgtttccggttcggttatataaaccggtattttaccatatccaaccgaaatgagtatcgacgggaattatccgtaaacagagtgacagtgaggtgtgaaggaagaagacgatggcgtcaatgtctctctccttttcttcttcgctatgttcatccagaatccccgaaggtaagcgtaggtttcgtcacagagatgtgggcatcgttagatgcgttttggctgcttcgaaatcttctccgggaagtgttacgaagaagaggctttggaaagacggcgaattccccggaatcacggagccggttaatcagagaagaactccgataaagaatgtgaagaagaaacttgacaggagaagcaaagctaacggatgggttaacaccgtcactgaaactttgtccgatctcatcgccaaaaagcagtggttacaagctctcgaggtatttcgattttctctcttctcgttcatgtttgattgaatttgaactcaattttgaatcacgagtataatttagctgaaagatgattttgattgaattgggtattttgttgatgatcttaggtttttgatatgttgagggaacaaacattttatcaaccaaaggaaggaacttacatgaagctgcttgttcttctcggtaaatctggtcaacccaatcgtgcacagaagctgttcgacgaaatgcttgaagaaggacttgaaccaactgttgaactctacactgctcttctcgctgcttacactcgcagcaatctcatcgacgatgctttttcaattcttgataaaatgaaaagctttcctcaatgccaacctgatgttttcacgtacagcactctgctcaaggcttgtgtggatgcttctcagtttgacttggtggattcgttatacaaggaaatggacgagcgtttgataactccaaacactgtgacccagaacatagttttaagtgggtacggtagggtcggaaggtttgatcagatggagaaagttttgtctgatatgttggtgagtactgcttgcaaacccgatgtgtggactatgaatatcatccttagtgtgtttggaaacatgggtaagatagacatgatggagagctggtacgaaaagttcaggaactttgggattgagccagagactcggactttcaatattttgattggttcttatgggaagaagagaatgtatgataagatgtcgtctgtcatggaatacatgcgaaagctagagtttccgtggacaacatcaacctacaacaatatcatcgaggcgtttgcggatgttggtgatgcaaagaacatggagttgacatttgatcagatgcgtagcgaaggtatgaaagcagacacaaagaccttttgctgtctcataaacggatatgccaatgccggtcttttccacaaggtgataagtagtgttcagttggctgctaagtttgagatacccgagaatactgccttttacaacgcggtgatatcagcgtgtgctaaagcagatgatctgatagagatggaaagagtgtacataagaatgaaggagagacaatgcgtatgcgattcaagaacgtttgagatcatggtcgaggcgtatgaaaaagaaggtatgaatgataagatctattacttggaacaagagaggcaaaagcttatggatcgcactgttgctacaaaagagatggagaatcttccggcaggatgattgcggtttgtgtgtgaatctctctctctctctctctgcaaggagagatcgatgtctcacttgaaagagtagaataaaagagtttgtaatacacttgattgttcttgcagctatgcgtgttatatattttgatgggcccaaaattatgaatagaggcccatagataaactgtgacgtgcacaagaaatcggacaagtccaaaaagtggataagtgcgtgtcgtctttctataaataatctcttttctctcatcttttaccgtttcttctcgaacaatcaaaaacgaactaaccaaacataaaattgaacacatcctcttcctctgctctctgcaaacaaaaaaacaccgattcggtcaggaatcattcgtcgtgaaatctgtaatg

SEQ ID NO: 30585 - DNA, 3000 bp, Unknown; identical to SEQ ID NO: 9802
  misc_feature (1)..( 3000): 2750-1469P.txt file - cDNA_ID_3033354; gDNA_ID_1972192; Annot_ID_180213

SEQ ID NO: 30586 - DNA, 3003 bp, Unknown
  misc_feature (1)..( 3003): 2750-1469P.txt file - cDNA_ID_3033361; gDNA_ID_1972192; Annot_ID_180208
gactaaaaagccgaaaagcaaggtcttggagatttggtgctggtaaggaaccttgatatttattcaaacagtgaatcaaaaaccaaaaaaatctgtctaaaagtcatttacttctccaagcaagaacctcaggaacatcggtatccttgtcattgcagaatggttacgtgggtttatagcagattatggtgttccagtaatggtggtagtgtggacttgtatatcatacataccttggaaaagtgttcctcaagggataccaagacgtcttgttagtcctaatccatggtctcctggtgcatatcagaattggactgtcattaaggcactaatcacttcctctacacttattattctctttactattaatgcttcatgttgatattcatgaaagtgcatgatgaataaactgcaggagatggtggatgtacctgtgctttacattcttttagcggttgttccagcgtcaatgattgcggttctttactactttgaccatagtgtagcctcgcagctcgcacagcaggaagatttcaatctgagaaagcctcctgcttaccattatgatctgtttcttctaggtttcttggtaagagatgaagtgtatgtttttcttgactgatttattgacttgaccagttacgaaatatgaaaggttggaactcttcttttgtagacaatcctttgcggtctcatcggaattcctccatccaatggtgtcatccctcagtctccaatgcacacaaaaagcttggcaacactgaatcaccaggtttgattacatattgtagtgtgttttatgtaggccttcaattgtatttctcaaaaggcatttaaaaactggttgatgtgcagttacttcgaaacaaactcgtggcagctgcgcgtaaatgcatcagaaacaatgcaacaattggagaagtctatggaagcatggaagaagcttaccaacaaatgcagagccctctgatacaccaagagccttctcgggtatgttggtatcatctatatattagtttataatttgacctttttaactcatccctgatcaagcacggtgcaatatcagattcaaggactcaagcagtcacatattcaaaaggcttcaaacgccgatgcactggtcgatgaaacagtgttcgatatagagacggaagtggagaatattctgccagtagaagtaaaagaacaaagagtaagcaactttcttcaagctatgatggtggctggatgtgttgcagcaatgcctttgatcaaaagaatcccaagctcggttctttggggttacttcgcttacatggcaatcgaaagcctcccagggaatcaattctgggaaaggatcgtgcttctcttcactgccccaagtagaagattcaagtaaaaaacaaacctttcttcatcaatctgaaaatcttgttgttggtgtattctcatggtctctgtgaactttggtctctttttttgtgcagagttcttgaggataatcatgctgtgtttattgaaacggttccgtttaagacaatggcgatgtttactctgtttcaaaccgcttacttactggtctgctttggcatcacgtgggttccggtggccggagttttgttcccgttgatgataatgtttcttgttccagttaggcaatatgtgttgcctaatttcttcaaaggagctcatcttcaagacttggatgctgcagagtatgaagaagcacctgctatcttatcattcaatctcaaaccggtaattaattctcttcttcttctcttcaaaagcttaaggctttatcgagaacataccggtaatatactggtttcttcgtggttgtgtgcaggaaggggaagtgagccgtgcgacgtcgtttgcggatagtggagaagtgatggacggaatgtttacgagaagcagaggagagataaggaaagtgagcagcttgaagctaggcggtggaggaagtggatcgacggtaggttcgccggcgggaggaggagtggagttgatgagaagagtggtgagttttcagaatccaagggtgtcggagaaagtgtacattcggagcttaagtgatttcagaggaggtggagagattagtccacgatcgtccgctggaagagctccgttcagtccacgatccgccacgggtggtggaggaggagaacagagactttctaatttaggaaagtctgtttagtaaacagtatagtgtagtctctctctctattcatatttgttctaaccaaccaatcctatatagccaagttattccatttgcctgtcattatgagatttaagaaatgaaaagaagattatctctcggagaatttgtttatttcaggaaaatttgaaatgattttgatctccaagtacaaaaaaatggacaaaaaaaattattagagtcctagttagtagtccaagagtacaaaacaaagcaatacaaaaaagttaaaacgacatcgttttcattgtaaataactgacatcgtttcgttgttatataaaacaacgtcgtttcctatagcaacaagatgctctctgcttcagctggccttcgtcgtctctgcctgggctctgaaactgcatttggctgatcttggatcttcatgaattatgtacttgaaagatcatcgaaattcaatataaaacgggtaaagcttctcaattttacaataaacacaacttttcagctattgaaacagtgactaagctgtttttcttttgagctatatttctttgttagtgctaagtaatagtaaacaacaatttactatgatcttgcttctgggtctccttatatccattaaagactgatcctttctgcaccaattcagtttaatctttcttcttttagcttaaatgtctctggttagttatgtctgaagtatacaacaccggttccaaagttcgttgaccattgtttgagttcttcttttattaggattgtgagaataagaatcggattatgctaactctaattcgtaatctgcgttttactttaggttactcaatg

SEQ ID NO: 30587 - DNA, 3003 bp, Unknown
  misc_feature (1)..( 3003): 2750-1469P.txt file - cDNA_ID_3033365; gDNA_ID_1972192; Annot_ID_180207
taataagaggaagtttaggcttggtgactgaaaattgtcgttttttcaaataaggctataggtttttaaaacatttgggcttagaacccatttcggtagggacttaaccaaagataactgaaacatttgaactcctaggccttgtcatctaacacacatttcttatttacataatggcttgtatgatttgaactacaagccaaaaaacttcaaaagggtgtaatctttttgaagatggatgttggtcttcatttcttggccagtaatttcttcgggagcttatcgaggggcgttgatttaagtaaaaatagcctcgcagctcgctctcgcaatgtccctctgcatttcagaccgcgtgactgaagctcagtcttcaatctctccatccccaaaacctccatatctgtggctgctttgaactcagcaaagttaagcggttcaacaggtttgcaacacactctttctttcgcagttcctcctctctttacgacaaaatcatcgtttccacttgatttctccaccttttcaagttgatccattgcatcagcaacagcaaaatcatccatcttctcttcgttaattctttgaacaaccgtgatctctcccttaactacatctgaactttggtgcactacaaagtcgttctcaccatcatgggatccatccaaaacagagcctgagctttcatcagtatccttatgatctgaatcaacttgaccaccaacaacagatttctcatcttcctcgtcactgctatcatcactgtcactatcttcaacagctctctttccattccatattttgattcgtttcgatttttcagattctgcagtacccatcttcttcccttttctcttattcccattcttgaaagtttcgttcaaagccaaatgcacagccaaaatacacttatcagatccccccttatacttgttgacattcttctgcgtagctccatctccaacaccttgtttagcattattggattgctccttcagatactcaagagcctttttctcaaaattcctcccttattcaccatccttccactcctgaagcctgttctcggcgtttacatctccgttcactcatatccctacacgaatcgaaattgtttgtcttcttctgtccagctttcataaccacattacgaagtaacgatccgagtccacctttgcctccacggagggacaggacaagattcatggtggtgtcagactgagaaatcgcggatgcgccggggatttggaatcctccgcttatcaatctctgtagatgcgtcggaatcttcgtttgctcgaagatccgctgcttgatctgctcgccacacgctatcggagaggaaaaggttagggttactgattttccgtcgagtagtctcacgaaaaactgcaacggcttacaactttgatccgccatcgattttcgattctaaagcttggacgaagaagaagaacaaagttcgattcgatttctggagagaaattgggggaaagttgaaaaacggatccctaaggtagtctgagtctctctctctctctgcttgttgggctaagaataagatttctttttggtaatgtgttgggctaagaataagattgatatctcttctgatgcggtttcttcttgttgggcttcatagttgggcttttcgttttgaaaagtcttaggttttatgttttgctttggctagtttgttgtctatgacctttttagcttgatgtatgtgtttcgtatcttaataaaatacaaaagagtgtattacaaaagaaaaaaaaaaagatgtttgtagagtgaattaaaattatagtataaattatgcgagaaaaatgaatactataaaaaatggttagcaaactagtattttctaatcagtgagtgctggaaatcaccgcccattagtactgtagattaggatgccactagctagtaaatagaagatatttattaggaaaattcgtccaaagaatttgtaaaaaactaaaaacccattaaatcaagtaaatcgtcattgtcagaaaatgtgacatgtttttggaaaaagattccaattcatcaatccgagaaaaatgtatgactcaaaaatctaaaaatgtcttagtttggaagagatgagaatgagataaatgaaccaacttgactcttaacttaatctcatttatagaaaaattggtaaaagagtgataagagacatttaaacgccgtgttaggcggaagaagtgtacaaaaccaatcacgagcattgtctgaaaccggagtcaaagagacacagagacagacatctctctcctctcatcagatctcaacacatcacactctcttcccttttttaaaatccaattttactgttgtttttttctcctccagcagtagtttttaactgataaaaaatctcccacggctcttgtatagagactagagaggtcaagcctagaaaacgaaagctattttctctcagtcttctaaagttgtgttcctttagtcattttgagctgatttgtctctggtaagtgtttttctttctttctctctcagtcattcttgaatccaagctcagagatcccatgacttttttacttctcgccagcttttgatttttctatgagctttccgtactaaatgtgttgtaaagttctcacctttttgtttgccaaatcacccattatcaaatctacataactccttttaaagacatcctccgcaattaacgcttttgaagacatttctttgggtttcttttaaggttcctgcaaatatttgtattcggatctgagtttcttagtaattaaaagggtattaagatttattcgttactctttgtttattttggttacactattggaatttttttcaatctaaatcattctagttgtatcagatttcctatcttggttactacatgctttatcttaatcatgcatcataatcctgggttttgagttttaacagaactgagtgttgttttgtaggacactgaaaacttgaacacaccaaatctacatg

SEQ ID NO: 30588 - DNA, 3000 bp, Unknown; identical to SEQ ID NO: 9790
  misc_feature (1)..( 3000): 2750-1469P.txt file - cDNA_ID_3033369; gDNA_ID_1972192; Annot_ID_180206

SEQ ID NO: 30589 - DNA, 3003 bp, Unknown
  misc_feature (1)..( 3003): 2750-1469P.txt file - cDNA_ID_3033385; gDNA_ID_1972193; Annot_ID_180273
cttactttgtctttcatcactctcaccgttctctcagccatcttcaccgcagcttcagcggccgatgctacaccaagccaagtagtcctagacatagctggacatccggttcagtccaatgtccaatactacatcataccggccaagatcggaaccggaggtggtcttatcccttcaaaccgaaatttaagcacacaagacttgtgtctgaatcttgacattgtccaatcatcatctcctttcgtctcaggccttcccgtaacattctccccactaaacaccaaagtcaagcatgttcagctctcagctagtctcaacctcgagtttgattccacggtttggttatgccctgactccaaagtgtggagaatcgaccactctgtacaactaagaaagagctttgtaagcattggtggtcagaaaggtaagggtaatagttggtttcagattcaagaagatggagatgcttacaagcttatgtattgtcctattagctccattgttgcgtgtattaatgtgagtttggagattgatgatcatggagttcgacgtttggttcttagcactgatcagtctttcgttgttaagtttcagaaggcttatgattcaaactccaactgtaatcttaagtctaactcgagaatgttcctttttctctaagtgttaaattttggtaaattgttatgcttgagagttgagacaatgccaagtttgtgatgtaaccaacggtttctatgaaataaaacgtagttattgtgtgttttataatctaatgaattatcttaacacttaagtaacaactaacaatgtactatactactatgaataacctagaaaataattctttgtgggttaattaatattttataaaatgttggggtaatttagagaaaacatggaaatatatactatttattgataactccaaaactatgctatatttcactttggtgcccctcgtttgtgagagtatgtttggtccgtcgatgcacatggaagcagcagagatagtccattcggcggcgcgttttgaagctgagaaaatgggcaaggaggatgaggcggtggaggagatacgacgtatgagtggttacggcggagatgtgatagtagtaggtgggtttccggcgtcggagtcggaatctgaatctgaatccgatttggcggcggcggagattatggttatatgggctattcaagggccaacttcttttgctccaaacacactcgttgctcaatcttctcttgagctgcgtctcgacgcttgtggccactcactctctattctccagtcgccatgttcattggtaactccttagcttctctgtttcagtgtcaaatttctcgcttttagggtttattgcaatcaagtttgcgtctttcggatccttaacgagtttgtgtatatgtgtcttgcggctatcatcaaacctacattgggatgttgttagaacatgtttactgatacattcagcttttgttaagtggatttagcttaacattgaagaaagtgataaactttgattcttcttgggttgaacatgaagcgtgttagaactatctgatggttgtttgtttttgtactgtgaagaacacgcctggagtaaccgggtcagtgatgtgggacagtggagtggtgctagggaagttcttagaacattctgttgactctaaggttctttctcttgaaggcaagaaaatcgtcgagttgggttctggctgtggcttagttgggtgagcaaaaaccgctgatatttctcttctgagaattactattaacgtgtaaaacatttagttagtttcttctttcagttgtatagcagcacttttgggaggcaatgctgtcctcactgatcttccagatagactgaggctactcaaaaagaacatccaaaccaatttgcaccgtgggaacacgcgtggatctgctattgtgcaggaacttgtttggggagatgaccctgatccagatttgatcgaaccattccctgattacggtaatcatctcggtttcattttttctccttttgccttgtacataccattctcacaccttttatttgctatgtacttgtagtattaggctcagatgttatatacagcgaagaagctgttcaccatttggtaaaaacgcttttgcaactttgcagcgatcaaactacaatcttcctatcaggagaactacgaaatggttaatcattttctttttgtggttttcaatcatcttatataacaagaacacaatgtctaattttgcttgctcgttctttctgtcagatgctgttcttgagtacttcttagaaaccgcactgaaagattttgcgatcgggcgtgtggaacaaacacaatggcatccagattatcgcagccatcgagtagtgctttacgttcttgaaaagaagtcgaagagatgcctcgctgatgaatcttcgcttaatcaatcttgttagccattgaggtattgtttgtttacacttgacaactgaagtagatggccctaagcgggaagtatagttctggcctgatccttccttgcatatttgcatacatctagcttatagagtgttacagatatactaatttttattttaaccttgttttaaagtgatcttgaagaatatctaagaaacaaatgtactcttcttctttacgtttaacttttttttgctgttgtaaaaaatggattcagatcattgaagatatctggtctgcgttttaagtcagacacaattatagagcaaaattaaaattttatgtattgtttctcactaaaatgtttaaattaaaatataggaataattgtctttttatgatcgcgtgaagtgaggacgattgtttagtaattttatacaaggttgcgacattttaatattttgatccattaaaaaaatataccaaaaccgaaagataagagagttttgatagacgacttttttgtgtataaaagatgcagtaattgttgtccttaatgacattgctaatcagaaactgaaataggaaatg

SEQ ID NO: 30590 - DNA, 3003 bp, Unknown
  misc_feature (1)..( 3003): 2750-1469P.txt file - cDNA_ID_3033406; gDNA_ID_1972193; Annot_ID_180267
acgaaacagaaaagtaaagatggtcaagaacaacatgatgtaaaggtcggagaaagagaggtaagagaaggcttgcttgcagctgacgcatcagagagagtgaagaaagttttagaatcttcggaagagaaacagaagctagagaagatgaagattgcgtatggacaacaacatagccaaggagcttcgccggttcgaaacttgttttggtcagtcgttgtttgtctctatatctgctacattttgaagcagaggttctttggtgctaactcggctcaagagtattaaaaagtttgaccttggatcgaggaaaagtgaaaaactgtaaaatatgtaatgactaatgaatgaaactaccatcgatgtaaaattaactaataaaatcaaattggtcaagatttttttttttttttaatttggctttgtgaattaatattggcttaccaaattgtccaactgtatataattacacacgtgtatgtactatgtgcatgtattaattatgaaaattggttgaacatatatttgaattaatatcttaagataataaataaagtaatgaatcggtccatatgataattaaatttagggatagctatatggagcaaacgaaggcagagactgtatgtgaattggttcactttattcaaggtcccaaaataaatgtggtaagatgagaaatttatatcaaggctttaaggactctatttaattgcttcttcttttcagactgatgtcaatattttttaggaataaaataatgcacacatgaatggtaaattaaagaccaaagttgataataataagaaacaatataaataacttttgttcctaaatgattatctcatcaataacaaagaattggtgaatgatacacaaattcattacactatctttagttcataaatagttttatatttacttcgcattatagcattcataatctctaatgaaatccatgatacgtttctatatcatccaataatgaaaacataacaccaaatagaaaatttgcaaatcagtttaattatgagatttcatatttgttttaataatcaggttagtagtatcatacagtatgttgtatcatattttcagctaacacttaatgtcgtcgttgttgaggaaacaaaattagaaatcgcatgcaatcccttttgtcaacgaaagtttgtataataaattcacattgttgtcaagttttcaagtttcaaccatatttctttcttccacaggtttctaatttcaatgtatagtaaaaacagtttgactttttttgatatacacttcgaagtgaatagagttaagaccgcgtgagtaggaaacagccaacacatcgagacgacccaaaaatgcaaaaatacaacaactaaaaataaaaataaagctattttgattacagtatttaaacagatataaaaatagctaattatatcatattaaagttatgttatttaaacagtcttaaaaggaattgaataacgtgcgatgttcctaaatatgaatgtatgattaaatcaggtaaaacatagtactaataatcttatatagaaaaaattataaattagtggaacgttccatgcattcattgtattcagtaaataatctttactattggcaattttgtcgaacttatgacccgctcgctttaatagaagactacagtgcagataagttgtttgtccatgtgtaaacgttttaatagttttaaccgtgggtaagaaatgtttgttttatcacgagttaaaacaataattactactattaaaatacaataattattattaaatatccttaaactagtaatgttttgagaaaagtaaatatctataagaaaatccattttaattatagatctttgttcactaaacaaaacaagtggtgttttaagaaaagtaagaatctagtacaaagtaattaaaattgcctttacacagattttctcatttttcattttgaagaaatattatgtattatagtaataaatctttatttgtttttagtacatctaaattaggcaaaaattagagaaagtacaattaaattataacagagtaagaaaacttgggaaatgagaaagagaaataaataaaaaatccaaagaagaagaagaaaatgagatcagcaaaatccccaataaaagttaatttttgtcattatacgaaggtgagaaaatcgccggagaaagtggataaagtcctctcctttttttatccaaccaccgtcaatttaaccctctccggcaacataaaaatccaccggaacttaaaaaagagagttagttgtatagaaagagaaacaaaagaagaaggttggttcggtcctctctctctctctttccccgagtatggtgagagtactagttagcagtaatggagagagcaagagactttaaaaccctctttctctttctctctcttttctattttttcttctgtcaatttaaaaacccatcagttacgccaatttctaaagagagagttttcttttagcgaatctgtaatgaatgttgaagaagcaacaaaaggggtttgggagcactaatggcggctttagcttaggtgagaaagtctttacaaggaagagatcatatactatctcactttctctttctagggtggctctgtagagaactaagaagagacattattacggctaaaataaaaaacctatctcttttggatttgtaaaaattccttttttttttcttttgttttcgtaatcaatttcttgcctaaagcgaaaccttttcacctcccgaaatcatcgcctttgcatcttctctttcagattctcttccgtttcgttttttttctttcttttaatctctcttcctcttctctaaaatttgaacctttttttttttttggtgtgttgctctgttgggtttgtgttaatggtgacagtggtgtaaatggtccattagtagtttgtggttgggtgaaaagtaaagagattaaagactgttttactgtcttttcgaaacattaattaaaaaaaatg

SEQ ID NO: 30591 - DNA, 3003 bp, Unknown
  misc_feature (1)..( 3003): 2750-1469P.txt file - cDNA_ID_3033410; gDNA_ID_1972193; Annot_ID_180266
accgtgatctatactcttatgaaaagtgagtttcagtttaaagctttgtcgagttttatctcttcttttgctatgatattttaagctcaatctttctatttatgccgaattataggatcatggagacagcaccaacgcttcctgattttgccttggcattgaaacccgatgagtaccaacttccttctgttgatgcgtcatggtctgaagccagtctacggactaaaaacacatcaaatcacatatagggcaaccaaagatagagcagtgaatagaatgcatatcaacaccttatagagttacaatgccaatggccgccatagaaacacaaatggtatagctctataactaccctagtgattctccaaatgtcaaataatatatgggtgtgaaaaaagtaccgaattggattagttttcaggtaaaaatatgggaagatgtcgtctgttttctctgtatgttgttgtaattttgtatgtttagtgcaataaaattcgattctttctgttccacattcattactattacttagacaacaacatctacaccaaacaatagcaaactggtaagtttctgctttttgctttgtttgacctactaatactacaaggtttggtctacagaagttacaaaattacagaataggtagaagtttgaactttaacacgactaatcgccagtgagagctcgagggctatggtcaatagtggaaagagacatgcccgactgagccacggctctgacaaacgccatgtttgcagtcaaggtaggagctccccatctatcacctgtcccaaacacagtcttgttcttcatcgctaacttcctcgttgttgggagactcatcacacgctctgagggattgtcatttaccaccctgtcaaaaatcacatcgaccatcaacaacaattgtaatgagtcaaagtattgaactttgagattctctgttgatacagagcataatgtgacttacattaggctcttcaataactgttcagctctgagtttctcattgggtccagcatacatggatactaactccttgaactctgagaaaacactcttgcatacaataccacgcttccctgataatacagttcccactttgacaaggcctggcttctcaatttcagatctcgcctgcatataaattgtcaatttcacaaaaaaaattgatagactagtgataggaggcaatggtgaacttttttctgtacctgagcaatcacaaaaacggtattgcccttaaacttttcttctaattcgatctcaggcatatccacgagtctctctgcacacccattactgattccggaaacgagagcaacaagagccgttgtgtcgaaattaatgagacagtcttcaccaagcaatctcatggaggagattacagtagaaaaagcatctttttgacttagctctgtgacctctgcttgaactaaaacctcagtttcaggagaagcaagtgaatcacattgatctatcagcttgatctcaatagaaactgcttctttatatgatctggttcgaacaacgttaacccattcgcaatcaaaatcatcgagcattgagatatccgaatccgaatcagaatcgaagccaaaatcgaaatacacagctccgaattcatctttcagtttctcgtaaactgaagaagggagaccatttgcgaagaacagaatcaccgaagaaggtttaagcgtggttgtggaattagcagcggcgagaatctgttcgattctagatcttaaacctttgcttccatggcgatcaccgttccaggagatgtacctagggtttctatcagagacgatgatccatacaggaacttttccgagagtacaaacgagatcaacatgaacgccaccaatcggaagaggaatcggtttgcaaacgcgcgaaacgccggtgatagacggaagctgtaaaatccgtaccactgattcaatgtggccaatgttgacactgattgcggaaaaaaaatcaaagtcagaatcagagctaatgagagggagagaagaaagagatgattaaaaatagagaacctgagaggtttcggagaaggatcagaagagagagacgagagaaaggagagctcggaggaagcgagcttaaggagtgtgcgacggcacgaagcagtgattgcagttgataaaggaagattctcgattgttcttataaccgattcgcatctctgtttcgctatctctatctctcctatctccatgaccaacaccgtcgtctgcttaccggaaactagaaacgcgtcgtttaagttcagagagctcctccgagacacaacaacgaaagagtctaaccggctcaaaaccggtttgagtagctagcatatcgatattcggtccgatatccggtatgtttctctggccgcttgttatattccggtacataatgaaaatctcaacaaaattagttcagtgtaaccatatgattaatcaagtgatgacttaatttcctagactataaattgatcaacttgaatcttttttccaattggtactaattaatggataattagtactgtataatgatataattattatcttgctataaagtaatttagtatcattgtccacagggaccacaatcttaagtaaagtatccatcaaagagggggaaaaggagcattctttttgcacccataccttttatgttattaacacatgaaccccaagaaaagcaaaaggtacacaaaatctgattttgcttcaaacaaaatgaaaatcacgcaatattctttttttgttaacttgcttgcacactttcttttccccacttttatttctaacgaataatcttctcccccatccttctccttctactcctgtgagtcctgtccccttcacagcatattattgtgtatctttatatataaaatgtggattaaaccatgtttcaacaaactacttcatatctcaatcattcaatattcttgaagagactttgaatcttcagttgtttctgtaaaaagaaaaaaaaaacatg

SEQ ID NO: 30592 - DNA, 3000 bp, Unknown
  misc_feature (1)..( 3000): 2750-1469P.txt file - cDNA_ID_3033414; gDNA_ID_1972193; Annot_ID_180265
cctggcctgtccttgctgcaacataaacagagcacagattttggttttatgagtttgaaatttcagtgtatatgttgatgcaaaaaaacgaacaagacgaaccttcctgcgatttcttgatatgtgctggtaatgatgaagtcagtaacattcattgcgattaaatcagctgtgaactgacatgagaaatggtatttcggatctaattccttccactttgcatctgaatcttcatactttgtcttctccaacgcatgagcgatcgttccctgagtgacaccaagtttggtggccattagagatgcaaccaagtttccatctgtgtagtttccaatgatgaggtctggcttgcaatcaaggcgttgaagaatcttgctcgttgcgtcctgtaaacaagaatggtttaacaaggaggatttattttgattttttcattgagaaagtatgaaaacattctaaaggaaagatgattagcttacctgagtaaatctctcgaggtaagggtagatatcgaatcgggaaacccattgacgaaggactcctttatttgtaacaaaaggaaccctgagaatatgagaatgcttggttccttcaatggcttctagttcttgatcacactttgttcctcttgcttccggtattaaccgtgtcaccacaagaatctgaggcttgaatccgagaccttgttggttaattcgaataagaagctcttcctccaaagctcttacttgatccagaatgtaaacaacctgtatgatcattataaaccaaaaagtttcttcttgtaagttagatatcaaattttgcaggtaatataaaactgaagagttgtataagtaaatgacctggcctccggtatcgggtaatccgagtacgtcttgctgaccaaaatagccgtggacagagaatatcacaacgttgaacactgtgggaagtctgctaaagagcaaatctaacttcccattgtctggtgcttcaagaacttctgaaaggataatcattgtttctttcactctctctgctgtatctccccaacctttctcgaatcccatctccttcaacctaagaaagtaacttttcaatcagatccttgttccggttcctcaaggaacttgatcagttgtttttctttacctttgtgcaaaagtttcataaggtgtgtgttttgagtaagtcgagacaacaatcacagcaagcatgagagatttctggagctttgcaaccgtgttgagatcgtcattgatcatgagattctgcaagagacaaagcatttttaatgagttataagactttcaagaaggtggatgaaaatggaaacaagaaatgattcaatcatgacctctccgtgatggttaaggcgaagcagatagttcaacaaaggttctagtttatcggatttgcctccaagcttagaagatataaacttagagatgtaatcagctccttttccaatcgaagaagaaagactaagacgaggagatgtgaaatcaatcgctccaaagtctatctccagtgcattttcatctttagacctacataacatttcaaaaaaaggttacaccagatgatgaatatagctcaggttattgccaaaacgccgtatgtaagattgtttactaaccatgactcatcgaaaacagattccttgagctttaagtaatcagtggctgtgatttcatcaactgttaaatctccagagttgaccttaacatattcccagaaaccaggatttggccttgcggctagtgcaacaaacggtggaaccactgctgcttcctgataagtagttaaaacagagaaaaataaaccgtgatttcgcatgaacacgcaactaaaccgtttttaattgcaaatggtaatgaagatatattatattacctgagtacaagtgagaatgtaaccaaacagcccctcaaggatcttactgcgttcacggctatcttctatacatttctctatctcattcatcaaatgctcacgcttcatcagcttctttcctcctccaacaaagctacaacatttttttacgcacaaacatttaactaactaaggaatccaaatagcatcaaaatgtagccaaaaaaaaaaaaaaaactaatcctaagagttaaaagaacctggcaaaacatctcttcatgtggtaccggctttgtttcaatgcatcaggcattttctcagcgatggaatccgacttttgaagcatagcttgagatgaagatgacatgttttttttttctttttacagaaacaactgaagattcaaagtctcttcaagaatattgaatgattgagatatgaagtagtttgttgaaacatggtttaatccacattttatatataaagatacacaataatatgctgtgaaggggacaggactcacaggagtagaaggagaaggatgggggagaagattattcgttagaaataaaagtggggaaaagaaagtgtgcaagcaagttaacaaaaaaagaatattgcgtgattttcattttgtttgaagcaaaatcagattttgtgtaccttttgcttttcttggggttcatgtgttaataacataaaaggtatgggtgcaaaaagaatgctccttttccccctctttgatggatactttacttaagattgtggtccctgtggacaatgatactaaattactttatagcaagataataattatatcattatacagtactaattatccattaattagtaccaattggaaaaaagattcaagttgatcaatttatagtctaggaaattaagtcatcacttgattaatcatatggttacactgaactaattttgttgagattttcattatgtaccggaatataacaagcggccagagaaacataccggatatcggaccgaatatcgatatgctagctactcaaaccggttttgagccggttagactctttcgttgttgtgtctcggaggagctctctgaacttaaacgacgcgtttctagtttccggtaagcagacgacggtgttggtcatg

SEQ ID NO: 30593 - DNA, 3003 bp, Unknown
  misc_feature (1)..( 3003): 2750-1469P.txt file - cDNA_ID_3033417; gDNA_ID_1972193; Annot_ID_180264
acaagtggccgttagcgtagttatgacttttgagactctcgttgtgaatcattgcattttctatggttttggttttaatgcatttctcattattttttcacaatttttttcagaaaccaaattaaaaggagggatacaattgggggattggtttttaagtagattgtatgcacattcactcttcaatctccgagcgaattaaggagaatcataataataaaatcagaacatagaaaaagaatccaaaccaataaattagaaaacttaaaacttaacttagagaattcaaaatgtaaagaaatatcacaatttctttgttcttgttcccaaattaaagtaccgttcctacaatttttatttttatttttttatcacatgatatcttaatatatagttggatatacataggatcgatattggacaaccaaataaaaacaatgaccatgattaagtttgaaatttacttacgactgcaattaacatggcagatataatggatttcttcctaactattaaaaggagagaataaaagcaaaccaaaactaacgaaagagacttcacaaaaaaaaaaaaaactaacgaaagagttgcatcatactaattcatgctagatacagttttattttgattagtaccttttctaagcaaaattagaaaaccctaaaccaaaaatttgcattcaacgtgtcgatttacttgtaacgatcggattactttactgggtcttttagttggttacatgaaaataaaacataatttaagtcagtttctataaaaggaaaccaagtcgtagacgaaacgaagacacaaaagtagctttaagccttttaagttttaacctgtgggtaacatcgaaccaatagtaagcaacggaatgatagtagacacgtgtcgtcacaaaccgcccttataaattttgctacagaccgttggggcggtgagacagtcgtgatctactaaccgaaatcgattcatgaatgtagacacgtgtcttcccttaactggattctacaaatatcttctttcgtcattacgttgcccagaagaacatagcaacgtcactttgattgacatttccgccacgtggactgcatgtgtcatcactaatattaccaaaaaaagaaattaaaatgttttttttttgttgataaatgatttttgagcaaatagtggacgtgggatgcttatgcataggccggtgacttttgtttggtgactcataattttgtgtgattgactgattgtaaccaaaaagatctaaagattcaatgatattttagaaagggacggtcgttttgatgtcatataacacatatttattcggtctaaggcgaatgtacttagtataaatactacaacttgatatttttgtaacatgtagaaacaatacattacacacatacacatgttttaaaaaacaaaccttaacgtacgaggcactttactatacaacaattgttacatattttaaattgaaaataaagcttctgtatgattcagagagaggatggtgccattgccaatgagcttccgattttttataatttagaattgtggaaaccaaccatatccatgcgtatgcatgttgtgtgataagtattgataatggtgtgtccaccatcgacatcctccatacacatttattttatagttatatataatcttcttatgtaccttgaatatataggtagtttgtcttttttggttcgtacatactcttaaattgaaaatcatggcttgctttttgtaattaagtttttttctaatacaaaattttcatggattttaattttatttttaatgataatattttatattttaaaaaactatgtcactagtgtgaatataatttgaggaaaaaacatttagccgtgatattattttaaataaatactacctataataaaaagttttggttttaggtaactataaaagtcgaaagagcattaattttggtttttataataaaaagttgaaatttgtgcccttttcaagtctttcttcatcatcttcattctcattctcatttccatcctctgcttgctctcttctcacagccccatcctctttaattaccatctccaatcccctgaaccaggatttataccattgcgattccgcaatccaacactactatctctctagtttcctttcttcattaggaaagagcaaaagcattcttttatggtaaagtttcgatttttcaaattcatacactgtcggattcatacccttttcgctccgggtctggaatttgggtttttgaggtttctacggagtcaattcgagtctgcggaaactcaatttgatagactcgtttcaaaatgttgcttaagggttttcttttgttcatggattgaagttttgcttaaaccagttacgaggtttcttggttcttccatgtatccgtgcgttatctttgatgacccttcactcaaagtcttcgttttttcatgtcaagttgcttcctagacttagaaaattctcgtttttaatggatttttgttcatagaacaaacatttaacgtttcatgctttttctgtgagtcacatgtttttttttcttgagctgattaagtctctttttttgtttgcagccatcaattgaattatatgtcttttagccaataattctgataaacgtcaagaggtaggtgagaaaatcaaaactcttgccttgttatcggttttcgataaccacatctatcaaacgatgtcatttgcttgtttgtttctgcttggacattagtttccaaattattagagagttttagtcacgtagaattatgaagtttgtagtatggcagatggctcgtgagcttgtttaactttatcttatgaatttagtggacgagaaagaagttgggttgtttttggttggacatttattaattttcgtctctttgtgccatgttccatgaagtatcatttcatcatctctagcttaatctctgtttctgctttcatctgttgggattgtagtttcgttaagctttagaaatg

SEQ ID NO: 30594 - DNA, 3000 bp, Unknown
  misc_feature (1)..( 3000): 2750-1469P.txt file - cDNA_ID_3033430; gDNA_ID_1972193; Annot_ID_180260
gccaagattacagaaacgtagatgagtattggtggcttgaagtagcgggtgtaggttagaacttagaaacaacaaaccttaaattaatactatacgaagagacgttgagaggctaacgaaatcctgcccacaccaagcaatctctagtctatgctcttattttctacgatattatatattctataattattataactaaataaaatcctagttgtaaaataaaggaaagaaaaaggtagattacgtagaagggggtgttttgttggttagggaagacgttggcatcagtcgccggtagagaggtccgtccaaaccctcccgactctctaacggattttgttttattttattttaattttcatcatataaaatgtatatatatatatatatatatatattttcttttggtaaagacataaaatgtatattagacgaaaaaaaagaagaagacataaaatgtatattatatatatactcgcaataatatagactatgtatatatatacgtgcaggtgctcttcagctttcttcttgttcccacatacccatcttccccaaccttttcccaagaaaaaaaaaacttagggttttaatttcttatatatgtacataaaatacatgaacacaacaaattttttgcgtgcgttattgatatagaatctgtgtgtttttctttttctttgttcttgtattggtttggatcggtatacttagttaattacgtaattaaatagatcggcgtgaagaagaaaaatgatcatgtgcagccgaggccattggagaccagctgaagacgagaagctcaaggatcttgtcgaacaatacggtcctcacaattggaacgccattgctctcaagcttcctggtcgctctggtaattgatatcttctagggtttgtccatatatacaaaactagctagggttaattttgatactttgatatatatatacatatgaattaattgtattggtgtatatatgcaggtaagagttgtagattgagatggtttaatcaattggatccaaggatcaaccgaaaccctttcacggaagaagaagaagaaagacttttagcggctcatcggatccatgggaacagatggtccatcatcgcaaggcttttccctggaagaactgataacgccgtcaagaaccattggcacgtcatcatggctcgtcgcacacgccaaacctctaagcctcgtcttcttccctcgacgacttcgtcttcttctttaatggcgagtgaacaaatcatgatgagttctggtggttataatcataattatagttccgatgatcggaagaaaatatttccagcagactttataaatttcccttacaaattctctcatatcaatcatcttcacttcctaaaggagtttttcaccggaaagatcgctttaaatcacaaaggtaaactcaaaatgatggagaaggatccattttctatagatgtgtttgcatgtatatgagtcttgcacggattattgatgaaaaaggtatatatgttccaaaattttgaaatgaagtttagccgaatttttttacttttcaaagagtttagccgactttttcatttgcataatcatttttctaatgaacttcaaaattatgtgacaaaattagttgcatgttttttcttgtactcatcatcatatattgtttccgtcattacatgaagtcatctctatatatttaacatagttgcaatccacatagcttataatttcgtccttcttttatcgtttggatcgcagcaaatcagagtaaaaagcctatggagttctacaattttctacaagtaaacacagattcaaacaagagcgagattatagatcaagattcaggtcaaagcaaacgcagtgactcggacaccaaacatgaaagtcatgttccattcttcgactttttatccgttggaaactctgcctcctaggattagtttttttgcagtaactcctaaatttctagattaactatttagtccgtatacgtacgagattatctaggtcgttagcatgtatgcttgatgtgtataatcactaactagtgagctattacctgcgaaaattgtaagaaaaatacataatgttgatgtatcacacattctcaatgtctgtaaaatttccatcgagttgttaactatcaaagttatccgtttgaatgtatttgtttaatttgtcttgaatgagatgaataacatgtttaaatgtttaattctgttaccaacaatttaattatatatatataacgattaattgctagtttgtttcttattaaatttgtatcatatttattcaacgttcaaacaaatcaccgttcaattgtttatgcataacccgatcatgaactcgacctcgagaggccacaatattatcaaaatttgaaagtatatatgtacagttgaaatcttatatcgttgagattataacatgaaaaaaatccaatgtttgatgaagaagcaaaaggtgttggaaaactctttttacttcttactttccttaatcgttttcttacaacaacacaaccattatgtagttcttgtacttaatctaattagaaatttgttaataaccaagacccacccttaattgggccttgttcacctctgggcccaatggcctttttctctcttttccttcactcttcttcttcttcttcttcttcttcttcttcttcttcttcttcttcttcctcgtgcataccttgctgtagttccctcttttccttcacttgctccctcatagttcgaacccgtgcataccttttaatttctgttgaatttctcattgtctttggtatggtcctaatctcaatacgtctctgtttctcatccatctctccagggatctgaaatttcttcctctgcatgtgctctcgtggtttcttccttgataattccttgctcattccctgcatgtgactcccgatcatcgtcttcctcttccaagttacgaatcaaaatcatagccgagattcagatttcatagacaatg

SEQ ID NO: 30595 - DNA, 3000 bp, Unknown
  misc_feature (1)..( 3000): 2750-1469P.txt file - cDNA_ID_3033436; gDNA_ID_1972193; Annot_ID_180258
gtccgtacttcctctggttatatcttatataatgactttgattcttttgactccttttagctactttacaagagttcgctttagaagaatacatattattttgtatccaagaactcatacatcttggtctctctacattcgatctatctacggtcaaaaagtgtagatcatatgcttatataagactagctatcaagttcttttttggttacctgcttgcttcatggatgaatggtataaatacggacaaacaaaaacatgtaccacgcatttgaattcttaaaatcaattcttgtttcacctctgtcaagacataaaaatcaattggaattcttaaaatcaattcttgtttcgtctaataacgtagaattttaaaggaagcaattggaatccgaatctttagattttagcaatatgattaaaaaaaattcagtagaacacaatttatgcattatatacatacacacttatcatataatggaaagaggacagcgacataagaatattgaaaagaaaacacatcccaactctggagaaacaaatccctaattagctaacaatggcgaggggagaatcggagggagagagctcaggaagtgaacgagagagttcgagctcgagttccggcaacgaatcggagccaacaaaggggacgatctcgaaatatgagaagcagaggttgtcaaggatcgctgagaacaaagcgagattggatgcactcggcatctctaaagccgccaaggctcttctgtcaccatctccagtttcgaaaaaacgtagagttaagcggaattccggtgaagaagacgatgattatacacccgtaatcgccgacggtgatggtgatgaggacgatgacgaagtagaagaaatagacgaagacgaggagtttctgtgtaaaagaaagaacaagtcctctgcatccaagagaaaagtctcatctaggaagattttgaatacatcagtttcccttggtgaggatgatgatgacttagacaaggcaatagcgctttctctacagggctctgttgcaggaagcgataaagaggctgcaactatgaagaagaaaagaccggaattgatgagcaagacgcagatgacacaggatgaattggtcatgtacttctgtcagtttgatgaaggtggaaaagggttcattactctgagagatgtggcgaaaatggcaactgtgcatgacttcacatggacagaagaggaattacaagacatgattcgttgctttgacatggacaaggacggaaagctaagcttggatgagttcaggaagattgtgtcgcgatgtcgcatgttgaaaggttcttgatttaatctgtaagttaggctgtgattttgggtgactacttgttttttttttgtttttttgtcgtcacctttgcattacttaaaaacattcaacttacatcagtccaggatattacataagtcatcttcttagaccttgctatttttgctagcttatcagctacattgttaagagtacgaggaattttacagaactgagaagaaatataagtcttagcaaggttcttgatatcctgaatatatgatgctagatcattgtttgtggtggttccttttggcagactctcattggactccaatgcggcgatattgtgatataagtttgatgcatcaccacagaacagtacatttgtatagcctaggcgtccaacttgaaagagtgctgatctgagtgcctctgcttcagcttcttctggtgtgctggttggtggtatggatgccattcctttaagaataatgttttcctgtttatcatagagtacccaacctattcctgcacagtcagtcattgaaagccatgaagcatctacacagcagcaatactcctattttttttggatttgttatcttcttccatgccacccatggaattttatgtctatccttagtgctagaccaccaaaatcttctcatagcactagtaatttgattaagtaaccgggatggcaacaagaaacaagacatgctgtaggagggaaaggcagttaccaccgctttaaggaggacctctctacctgcaggtgaaaggaatgcattgtaccaattatccattttttgatttattcgctgagcaagataagaaaacgcattagttctgtttcgcccaataaactcaggaagtcccaagtatcttccaaaaccacccactttgtggattccgagaatgtgtccaagttttttttgctcctcttcactaactcctttaccataagtgatagcggacttttgaaagttgatggactgacctgaagcttgttcatactgttggagaatagtgagtagagatgaacattcctcttcagatgttctacataacagcaaagaatcatctgcaaataatagatgagaaatgggaggtccatttctgcttgctttaaaaccatgaagctttcctgtttttatagaggtttgtataagagctgagggtgactacttgtttaatgatgactcttgttttctctaaaaaaaaaaaaaatatatattgaaaagaaagaaccctaatttttaaatttaggaatttttattttaattgaccagtgaatatgttcgaaatcattaccatccattgaaacctcaacgtgcgtgtcttcttcttcgtttgacctgtaattttaaagcgcattttcttcttcgcatagcagaagttttatttctccttggatccacttccacgtctttttttctccggatcttcagctctgaggatttttaaagcttttaagcgcttattggagttcgtatgagcaaacgtgagtcttgtctgcctgaaaaatcttctcttggcttggttctgaaatgtgactgaaagtattggttttaggcagattttgattcttcaattttttttcgttaagagggtttcgtgtatcagacaacatctgaacagagaaaagtatttatcttttctgttggttactacagaattggtgggattttattgcaaaaggtcaataaatg

SEQ ID NO: 30596 - DNA, 3000 bp, Unknown
  misc_feature (1)..( 3000): 2750-1469P.txt file - cDNA_ID_3033440; gDNA_ID_1972193; Annot_ID_180257
atgtcaacaagcatgatcctgctgacaaataccatcttctacggttgtatgattacttttactaccgggtaagtgattacatcccttttgcaaaatttggttttgctactgtatatcaaaagtgaccaattgtgtctttctcttcaacaattttagcacaagtgtgaaccatatgccttttatttaatacctttgcaatatttctctttgtggattgtttggtgtaacggattccctgaatgttctttgcaggagcacttgctaattgtatgtgaacttcttaaggccaatctatacgagttccacaaatttaacagagaatcaggtggtgaagtttatttcacgatgccaaggttgcaggtttgtccactttatcattaccatacatcatagatatgtatatgtatccgattcctgatctctttgggaccgttctgtacagtcaatcactatccagtgtctcgaatcacttcagtttctacatggccttggacttatacactgtgatttgaagcctgagaatatattggtgaaaagctatagcagatgtgaaataaaagtcattgaccttggaagtagctgtttcgagacagaccacctatgctcctatgtccagtcaaggtcatatcgagcaccagaagtcattttgggacttccttatgataaaaagatagatgtgtggtctcttgggtgcattttagctgaactatgtacaggcaacgtaagtcctgcatttccattgacttggtgcatttctgatttttgcttcatcatgtattattttttctcatgcaaaatacgtttcgaagagatagaaaatttccatatccgcataaatttgttttcttacatgggaacttgattctcgggctattaagtaaacagaaatttaccagaaacttgtgtcatttatactaacacttgatggagttaaaggtaactgcatcattgatgttctggagtgtcagctggttattcatattgtctgggttggttgttgatttttgaggacaagaaggtgaatccgtgtttaaatatcgagttacttttgcaggttctcttccagaatgattcgccggccagtttgctagcaagggttatgggaatcgtaggatctttcgataatgaaatgcttaccaagggacgtgattcccacaaatacttcacaaaaaaccgaatgctctatgagcggaaccaggttagtgtttccagagaccttaaaggaacattccctgaactccaaaaactctgcaactcttaagttgaatggaagaaacatatgctaataaagaacattctctctggaaaaattgtttgttcaggaaagcaacagattggagtacctgataccaaaaagaacatcgttgagacatcggctgccaatgggagaccaaggattcacagactttgtggctcatcttcttgagataaacccaaagaagcgtccttctgcagcagaggctctgaagcacccttggctttcatacccatacgagccaatctctgcttaaacaactggtgtctttacttaagctactaaaagccgcaaaacctcagattaatggaaacctcatatgtgcaaaggttcaagcccctttggtgggtgacccttaatacaagttgtggctgtctccttcagtcaaaatgtgagctgaaaagaagaaaacttttgtgaaatttgattagagtgtaacactgtgttgtcaaacttgtgattattatcctcctagaacagactaagtagtagaactcttttttgtatcatctgctgatccttagtagtttagtcatttgattatgatttataaatgtcatttatgtaatttatatatatacagggtactgatcattttaggtgtcatatatagaagtaaatttcagagagtgctgtgcgggagaatctcctttggtggtcattgtaaggtggtgaatggtattatcaatgggacataaaaaaaaattggttctcgggttcttagtgttgtaggttcgagagagtccattgttctcttttgtggtttatctttgtctctgttctgtttctaacatctcccaattcagtaccaataattagtggaacaaaaaaaaaatacttttatagtccacactctaaaacatgactaaagagattcggaagcgactttaggtcacaaacttttggaaggattacaatatttttgaattgattgatagttttaaatgtataacaaatgaaaatttgcggaataaaaatttataaggaaaaaattgcattatgaaataacgaattaccttttttatattgaaaataactatctttggattgtaaacaaaatttcgtgtaaaattttctaaagaaagcaattggaatcataataatctatgaaatttagcaatatggtatcattttaaaaaattcagtacaagacaattttgtaatattggaagaaagaaccctaattttaaatttaggaatttttttaagtttaccagtgaatgtccgaaatgattacatccattgaaacctcaacgtgcgtgtcttctccttgcttcttcttcctcgtttgatctgtaaacgcatttcctccttcgccgtgcctgaagaagtttcatctctcgttggatccactcttgttcctccttgtcttcttaaatttttatttttatttttctggttctccggatctccagactcttcgatggcgcgtttggagcatgatttctaaggatttttagggtttttatgctcttattgaagttcgcatctgctgcatcgttccgtatgagcaaacgtgagtctggtttgccggaaaaaacttgtttctgaaatgtgactgaaagtattggttttgggcagattttgattcttctaatgtcttttggtagaaagattcttcaaattgttttcgttagagggttctgggtatcagacaacatctgaacagagaaaagttttcatctttgttgggtacaggattggtggagttttattgccagtgcttctcctgtatattgtaaatg

SEQ ID NO: 30597 - DNA, 3000 bp, Unknown
  misc_feature (1)..( 3000): 2750-1469P.txt file - cDNA_ID_3033444; gDNA_ID_1972193; Annot_ID_180255
ggggtttttccaggcatgtgggaaaattctgaagtctcagaggcagagggaagcttagaactcgggctcagtaaatggaaagttgaactacttgccgcactacaagtgggtgctacagaggtccaatctatgattctgaaggtagtcttgttttaaggtgtttcactttttaaaataatatctttgttctcaagcttgtgtttttgtttcttcaattttcttgcagggtggtggcatgatcacattcgccaaagtttatcagttggtatgaaatcgataacagtttgtgtgtttaaacttcttcttctctgaggcgatacaaataactggtatattctggccctatatagttggctaagaaactatctggaaaagtattccttgaagctgccaactaccagattaggaaagagatgctaaaaaaggtttgcatctgtatttatttcatcatgctgcataagaatttttcatcatcactcagggatttgcgatgcactatatcatgaagttcctgagaagcattacatgtcaatgatgtaactgattgatatgttgatacgttaacctctttttacagggtgggcagtttgctgccattaacttggaatctcgagcagctctgttagcagcgaagcatgtatttactttttccatctctcgttttttttcttttcttttctatctctctattgcctttgagctatcttcattacacaaactacatttcgcctaacaatgtgattacagtgaccttaaattgatcacagggatttgcaggggctgcatccagatacattggcttaaaaacagcgatgcaattacttggccccatgtaatagccactcccctaatccgatctaacacagcatttacattacatatgcacatgaatctgcatctaattcttcttaaattgtttatgtccggacaataattgtggaatcttcaggatgtgggggacattactggctgacttagtgattcagatgctcgagactgactacgctagaatcctaagagcaatttacgcatttgcacaggtacttctctttttgcaccaaagtctgcatttgttttgtagtaagatctcattgactagatttaatgagtttaaaaggattgttttgttttgcagattcggatcaccaggacatacaggctaccttgtaaatgaagtaacagtttgttttctcaatctcagtgtccctacgaactatgtcggtaaacaatgtttttcacactcgtataattcgcttgtggttgaaatcaaattagacgttactcgagtagatagagagtggtccagagaattgagcgttttgcgaaacaatattttggagccatggaaacatgttttacagattttaaaaaaatctgattccttagtggtaacgagcggataagcgacgtgtggggttcactgtgacacgtgtggggttcgcgaaacaaggtaaagatattagtcctctgagtgcttaccacgtgtgtggtccgcgaatcctcgaaagcaacggctcttgtttctttcacgacgataagccgccgcgtttcttcacgtgcctttttgtcggaatttcagactattctagacaacaactcaacaagtcattataaaactaattatgctatagtcgcgaaaataatgcgttactaggtgaattattactagattagtagtacacttttatttcttattgtgaagacttatttagattttatcgagttgtcctatatagccgacttggtataaatgatcctcgattatgtcttaaaatctctattagtgtggagtgaacatacatggtgtatcagtatatggggttaccaaaatccggagtgatcaagtcatttttgtttttgtggttattatttcaaaacatgtggttaatttatttgtggccctcgttgagaacaagactttttattgttttagaaagatgaataaaattcaaattgaaatttgatatcacgaaacctctattatataatcgtccaaaaaatgatgacgtgacgtaggagacaaggttaaaaataactaacatatggttagataatatccaatactttttttggataaaaatattatccaatacttgtggcatttttttttaattcttttcttattttaatagctaaaatttataccaccaatatataaataagtagactttcttaatcttacacatgtaatacaaatttgttaataactttgattatgtgattttcttattaattttgttgggtaaattttctagggtatttattctataaactataaaatgtacattaaacaaaatgtataaaattaaggaatacataaaggtggtgattagaaaattcataattgttggagctttttatagataggatcatatgataggacggtcttttagggtaaaaaatacttcaaaaattagtgtagaaacaatagtgaccttacacgtgtaaactctggaacaatctactcgtctcttctcttacatacctcaacccaaagctacgaagacaactcttccaagttccaaacaaatatcacaaaaagtaataaactaatcaaacacaaattctacaaatacagtgaatttgttgtttatttaatttgttcaacgattatcctctcaaatcctttcactatcatcttttccttattcttcttcttcttcttcctcttcatcggccattataaagctctgttttttattaccctgttttataaacagaggaagccctaaatttggattctctattctaaagttttctcatttcgctaattttggagaaaaacgattgttttttttaatcgtttcttcatttctgattcatttttcttggtttatgatctgttcaagtaaaggaacaatcttaatcgctagaggtaaaaattcaaatacaatccctagattacccctaaaagggtcatccacaaattacgcgaatcgaattcaaattcgaaacccaatcagtgtcaaaactttccggcgatcatcttcatcgtcaatg

SEQ ID NO: 30598 - DNA, 3003 bp, Unknown
  misc_feature (1)..( 3003): 2750-1469P.txt file - cDNA_ID_3033458; gDNA_ID_1972193; Annot_ID_180251
aaacgttaaaccgaatagcaaatccaacaaattcaattttgatatggagtaggtaaatgcataccactagtcgcagcttcaggcaacgcagcaggcgaagaagcttcattaagaaaacaaacatcaatatcagaacgcgtatataatctatgcaattaatacaatagtcacacattttgattaaagctaataagagataaaaagaactcacgattagtcttgttgcagactgacggatcatgattaataccacatgagtcgaggattttaatagcgttctctttggtgagagcaaggaacctgagcaagtctggatgtttgaaggcggtgcatagacacgacacatccttctcggcgatctgtttcatcggattacaacacaatggcggcggaggaatcgacaagtgaatgtacggttgacatggcattagttttgctacgcatctcattgcctgttgaacgtctccgaaaaattgtgctgtgacttgcacggagtagagaatgacgacggtggtgactacaccgagaattcttgtgatattcattttctttttgttatgcagtgtttgttttgctgagtgtattttatctcatataaagagaaaatattggaaggttttttcttttaacttagctaggaaatattggtggatacaactattggacagggcaggtcaaacatagaggtaaagttttgtttcttagtatagtagttttttgtaggttactgaatttgttattatacaattgaatgtattgataagaccaagatatgaccaaggctacaaaatccaaaatgtctgaatttggatttccaaaaattgactaaatactaattaccagtatatacatgtgacaagtttaccatttccttataatcttgtgataccttactgttataagttagtctccactggataaagataaaatatcaggtatctaatgttgggacagtgaaaatgtatcagcattaattagtatatataaatatgttaattaaaatattactaattggtaactttgactgtgaacagcctggctctaaatatatgtgctggaggtggtatagccatggtccattcattttttacttttctttttgaatgaaatctattaaaattaggattgtaccatttttgttttctaaaaaacatgggacaaatgatacatttttttccagcgcaaggacctcaaatttattgtgtcgggcctaactttaaatcttatatttttcttatgtataagattaaatttacatggcaatgtccatcatttttagaaacatgaatcaatttacttattgttgaattcgttttgagttggataggaagtgaggtttgaaaataaatattgaactagtttttagtaccaaacctcattagttaattctttttcttcatttttttttgttgtgtatgtttttggttattgtcgatgcaattacatgtttcatgtttgtatagtttctagctttaacctgaatttggtttttacaacataaacgctggcaatcgaatgtctcatacatatcccagtggttaataatttcggtgtcagtcaggtagacactttggaactatcgtcattctgatatgaatggtggtgattttggggttggccaaaacttatgttctttaaaaataccttttcatatcaagactgaggataaacttcgaaattgtatataaaagattaaaacaaaaatacttaaacacattctgatgaccgaattacacagtcatcacacatataattataaattaaaaaatgacataatcagaagaagatcattgccacaaaagcagacagaaagctaaatcgattgaagctgatagttgaagcggaagaggttcctgctcattaaaaagccccatgtcaattaatttgataaaatattaatagagtttgtgtattttatggggggtttttcaacaaaatgtataacaacaacaaaattgaaaataaacacgaattagtgctaaccattggttgatcccggcgacgcaataggcgaaggagcttcatttacaatagagaaaaaacattaaaataacgtcgtgtatacttatcaaagatatttgattaagttatatatctatgggatcttataaatagaagaataatcatcactcactggctattttggagcagagtgaaacgtcaggattaactccacatgccttgggaagtaggagagcgttctctttggtgaggtttagggctttgagcacctccggattgttaaaagcgatgcataaacacggtgcgtctttctctacgatctctttcatcggcccgcaacacgatggcggaggaggcggattcagcgaatgtatgtacggctgacacggcagcagtttctgcagacaagccgtcaactgagggtttcctccttgtgccgtcgcttcgacggagtagaggaccacgacggctacgactacggccagaaatttgttaatctccatttttgtttgttatttgtcttttgttgtttacaatgttcatataaataggtggagatcaatcatgcatagaaataatcttgtttgttaattatgcaagatttattatgaatttcatggtttatatttacctgttttgtctgatttgttgtgatatatgtggcatgtatgtaagattcaaaactaaatttggatgattgcatgataaaatctttaatttacatttcatttctatggaaattttgtaaagaacaatattcataaaatctcagtaaatgctgatgaaaatttgaaaattaaggattactccaagagagcccatttcaaaccttagccagtgcaacacttgtaaaaaaaattaacaacataatgataagtttagtggctaatctacatgtttacgtggcggatgattattgtatgagtgataataatcaacgtggcaatataagggagtgtgataaaattacgtcattaccctcatccattgtttcgtcttcttccctgagaaacactgagaaactggagaaaagaaagaatg

SEQ ID NO: 30599 - DNA, 3000 bp, Unknown
  misc_feature (1)..( 3000): 2750-1469P.txt file - cDNA_ID_3033473; gDNA_ID_1972193; Annot_ID_180247
ccgccgccattgtgttgtaatccgatgaaacagatcgccgagaaggatgtgtcgtgtctatgcaccgccttcaaacatccagacttgctcaggttccttgctctcaccaaagagaacgctattaaaatcctcgactcatgtggtattaatcatgatccgtcagtctgcaacaagactaatcgtgagttctttttatctcttattagctttaatcaaaatgtgtgactattgtattaattgcatagattatatacgcgttctgatattgatgtttgttttcttaatgaagcttcttcgcctgctgcgttgcctgaagctgcgactagtggtatgcatttacctactccatatcaaaattgaatttgttggatttgctattcggtttaacgttttattaattgtttagtaattaaaataaaatgatgaaaattgtgaaattatataatttttgtgaactgtgattattttgatgtgactttcttattgaaacagggaattctttcagcaccaagaaaaacacagctctagccatcacttttttcggattttcttttgtatttcttgggatgatcatttgatttttttctttgtaattctcagagacatatatatatatatatttttttttgaattagctgacatctgaaaaaaaagattccagtattaccgtctgctaaatatgctaagcaccaatcaacttagaaagacctaagaaaatgagaagagcacacaacaatttctcaatgattgaaagatttatcaggttctaggatttttctactgtgacctcaatgatggttagactattataaatgattgaacgaaaacattaaggaaaaaattatatttttttctaacgattttagactgaacgaatatctttcatctatcaattccccccccccccccccccccacccccacccccattatgtttgtgatattgtagctcctaacgaatggtgagaattgagaaacacgaatctctctttttggcatgagcaaaaaaatagcaaaaatctgtctaaaaattagatttcctaatttcttttaaaagtcattgctaaaaaacactgtttggtaaaagcagaaataaatcttaaaattagattccttaattccttataaaagtcatttgctaaaaatactccgtaaataccgtgttggcatgaacacgtgttcatgttgtgtgtgtaatagaataatgggtccctagaatatcagaaacagacaagcaaacgagtcacccacttgcttgctactccacgcgcctttaaccgcgtctgccttccactctcttcttcttatcccgcgttctttggaacttggacttgggttcgttgacatcaaactttgaattttatttgctaaaaatgtgatctagaagataaagaattaagtattttgagattagtactaacctagtcctaacttcttatctgaatttgttaaaaatcggaggatttctcacgtgaacttatctgaaaacgataaagactgaagccagaaggttataattaaccgaaaaaaccgaagtagtcaattcaatacccgaaacaaaagaccggaatctcgatcacttaaccgaactaattgaccacaaaaataaactacttttaaaatagatgaacgaagaagcgcgtgagattttccatataaagacgctcgcaaacccaatcctctttcacaaatcacaaatcacatctcttcatcttcctcggtttatccaaatcctcattcagacttcatcaaatcgtttcttgcttccgatccgaaatttgcggcgggaaaagaagataacatcaacaaaaaaatgatttctctattcatctcaaacttttcaaacttatcaaacttatctccgacctttgataacatgaacatgaacatcccatcgaagaagatcgtaccggtaccgacaccgagtgagaaagttgtctctttggtatctcgaaccggacgagatctccaacgttacaacaccgcagggtatcgtcaagtcgtcgggtacgttcaattttaccaaaccctaattttaaaattctaggttatgaatttgggggaattttggaatctgattagaaattcgaaatttattgcagatgtgtaccatatagatacaagaaacacggaggaggagaaattgaagtgcttttgataagtgcacagaagaaagggaaaggaatgttattaccaaaaggaggttgggagattgatgaatcaatagaagaagctgctttaagagagacaattgaagaagctggtgttacgggtcagcttgaagaatcacttgggaaatggcaatacaaaagcaaaagacatactatgattcatgatggtcatatgtttcctttgcttgttagtcagcagtttgagatatggcctgaatctgaattcagacaacgcaaatgggtttctttgtctgaagcgattgagttgtgtcagaattcgtggatgagagaagctttggaagctttcattaaccggaaatgccagacccaataaggataatgtagcatctctgggaacaaagagctcttcatttggaagcagatgcatataattgaagagcaggtcctcaagtttagtgttctgatttgattcattcatttgttaatgatgttagtagactaattgataataactgattgttctgaatgattgtcttcacaacatgtaatgtgtacatatataaaatggatcaatctcatagatgtaataacgacttggtcttcacttttgatttcttatgattttcaatttgttggtgttattttttgaaaaaaatgcagattaggcggtgatgaataattattgacgagaccaaggaaaacaaagtaagattataacaaacaaacaaaaaaaaaacaatttgaatgtttcgttcattgactaaattttcaaccgtggaaagaagaaagtaccaattctaccctcaattaataagtttaaggggataggggtccggaagttggggaagaagaagaagacggaaacaatg

SEQ ID NO: 30600 - DNA, 3000 bp, Unknown
  misc_feature (1)..( 3000): 2750-1469P.txt file - cDNA_ID_3033475; gDNA_ID_1972193; Annot_ID_180246
cgggtcagcttgaagaatcacttgggaaatggcaatacaaaagcaaaagacatactatgattcatgatggtcatatgtttcctttgcttgttagtcagcagtttgagatatggcctgaatctgaattcagacaacgcaaatgggtttctttgtctgaagcgattgagttgtgtcagaattcgtggatgagagaagctttggaagctttcattaaccggaaatgccagacccaataaggataatgtagcatctctgggaacaaagagctcttcatttggaagcagatgcatataattgaagagcaggtcctcaagtttagtgttctgatttgattcattcatttgttaatgatgttagtagactaattgataataactgattgttctgaatgattgtcttcacaacatgtaatgtgtacatatataaaatggatcaatctcatagatgtaataacgacttggtcttcacttttgatttcttatgattttcaatttgttggtgttattttttgaaaaaaatgcagattaggcggtgatgaataattattgacgagaccaaggaaaacaaagtaagattataacaaacaaacaaaaaaaaaacaatttgaatgtttcgttcattgactaaattttcaaccgtggaaagaagaaagtaccaattctaccctcaattaataagtttaaggggataggggtccggaagttggggaagaagaagaagacggaaacaatggcaattagcttaggtagagtcgtcgttccgtcgtgtaccatttctggagatcggctcttcatacctaacttctcggccatctgcagcgtctcttgtggacgaatcaatgtcggaaccggcgtaatttctgctcgtcgacgccgtgacattggcggggttttaatatctagctgtctctctacggattcatcttcttctccaccgtcttcttcttctgggccgaagacgaaactctatgtcagtggtaagttagttcccttccttgtttctgtttccaattcttcatcttgcatatatcccagttggtgaatgatgttactgtattttggaactttttggttatacaactgtgattcttcactatttcttcgagtattatgtatgacattagatgtagttttttttttaccgtggatacgttgagagctacatgtcattgtgttactataagcttaggatatctccaaaatattcggagcaaacacatttgtggtcaccaatttatgtagttaacaatgttagatgttagaacttgcggtatagttttaaatgttagagagaatggaatgataaatttgtttgtggggttctagagccttgtggaatagcttcactcggttagggaatgtctctgtttggttactttcagaactggtgagattattgggtatttgttacaccgctgtaatggtacctaagacattgccggatttgttgtaaaggtagataatgattttggttggtgtatagtgttgtgtgtgagctctgatatactggggagatagatatctttctgctgttaattgtggttaattttaattcattactagcaacacactgttataagcttgttttctaagtaaaagggattggtgcaagttgaatagtggggaattagagccttagacatggccataagcaaaagcagtgttaatgctcttctatggtttcctttttttgtttcacttttcagctttctgcaacctttttgatgcctcatcgtctcttctttcactcagacactcattatatgagacttgaactctaatgaaatggattgagggtttgattggtattgacttgactttgatggtttatcacagggctttctttccgcacaactgaagataccttacgggatacatttgaacagtttgggaaccttatacacagtaagcataaacctctccttttgttccaacttctatccaaattctacaactgtaactcatgttcttgattgtgtccccatgtagtgaacatggtgatggataaagtagctaatagaccaaaaggttttgctttcctacggtatgaaacagaggaggaggctatgaaagctattcaagggatgcacggaaaggtactcacctcaacattacactcttgtcttcattcttaaaccgtttatctggtgattgagaacaatacagcaaatttctgatttggtgtttatacagtttttggatggaagggtaatattcgtggaggaagctaaaaccagatcagatatgtccagagcaaaacccagacgagacttccccaaacctcaatccaaacctcgcacctttcgtacctggtagctcttttgattttgtcttcatactgtgtaatgaattgtataattttaaatgtagttttcagaatatacaatggagtcattggtgaactcattccaagtttaaaccagagtaacattattttaaataacgtaagtcatgtcaaaatggataatatagcttttaaaagaagaaggtaaaatcaatttccctttacttaggattagtgttaataattgaatcatagttttgttactcaaaaaaaaaatcacatgaaaattagggtttacctattcttttaggatatctaccgatttggtccaaagaaatagagttatgattatatgaaagatttaataatttaggttataatttagtctcaaaaattatttaaaaagaagttaacgtatttatcttttttttttttttggtttaatgttaaactacgtatttatctatttacacaaacaactgctatatctttgaggagattatgtagggttataaaagaagtttcttttttttttttccttatctgagaaaccaatttccatttttttaggttttctattccttttacgagacttatcactcttgtctctatatatataaactaaagaccgcatacgctttaagtgtcaaaagccagattaagagttaagaaacttcatagtctctcgattctcaattcgatacaaaacgaaacatg

SEQ ID NO: 30601 - DNA, 3003 bp, Unknown
  misc_feature (1)..( 3003): 2750-1469P.txt file - cDNA_ID_3033503; gDNA_ID_1974073; Annot_ID_180294
taacttcggccaaagatgtgaccagcataaggaacaatccttcaggtgaaggaacgagctctgcaggagacattgtctggtccacttccaaaccatgaagtatcatccagctatcctacgtcgatgagaaaacatgtcgctgctgttcccccatgccgctgcactctttaattatatcgtaaagagttaaagttgtaggcctgaactactcactggaacatctaggatgggaagctaattctctggggctgttcttgactgaattgttttgcttcagatctttgcatcaagggcctaaaataggcgtgtggtctgatggggacgacacctttcactgctgaccctgcacaattaaagatctgccttgactgaatacacaccatcacattgttaaattcctttcctggatccttagccgtctccacagcttatcacattgttaaggtaaccaggtgccggtccaacgttttcaagggccctactcgagattcatttttttctccttttaaattactacttaaaatcacacataattaataccaagtgttttgagaactataagagttagagatagactaaatgactcaaaatcaatctccacatatgaagaacaatatactaaccttaacaaacacatcctgcacatacctttaacgttacctcttttatttaatcacttattcctcacgaatcacaaaaaaataagtctctcgtagagtaattaaaagtgactctgcactaaactaaagaattataaagagttgatggttttataaagccataataataataataaaaacataatacaccatcagtcgattccactcttttttctttcttgccgtcttacaacgaccttgtgattcctaggaacatgaaggacattgagtaactacgaggcagtgaagacttatgggaagtagccaagctgcacaaccgtgaaacctctttgcctgaggtaaaatctcatcttacctctcttataaactctccattcatttgattgctgaatttgtgtgacataatacaaatgctctgttcttctttgccgccagcatatggattcaaataaaatggttttcattgttagtccagaacatgatataactttaaaatgtaaattactgataaagtgatttgatagatgatcgtgagagatgaattcaaatagatttttgtgttgttgtttcaggaattgtacgtgtcaaggtacttgaaggggatggagttgagaaaatggggcgaactcaacacaaaacgaagagagtttctagacgcaattccacggtcacttcttgaactcgttgatagatgtttgacagttaaaccaacgcaaatctaatattgaatttcaagaggatgctctcaagcacgacttcttccaaccagtacatgaaagccttagaaaccaaaggctccttaaactgcagcaaatgcaatcgcagccttcagtggttgctgacgcagtcggccaaactctaaagtactactgtacaatgtttgaacaagtaattttgggtccgtaatatagcccaaatcacgaaaatgcccgaaaaagtacttaaaggtcaaaatttggggtcgacaaaaagtcaatggaaaagttccattgtcctgcttctttcgtcggagggctctctttgggctttccgaaaaggtatcacatgccaagtttggcctcacggtctaaaagttatggagtcataaagttttaaccaaaaaaaaaaaaattaaaaaaaaagagggatgcaacacgaggacttcccgggaggtcacccatcctagtactctcgcccaagcacgcttaactgcggagttctgatgggatccggtgcattagtgctggtatgatcgcatccgttagtatatgcaatgcaatcgtatatattcttttttgaagacttgatgaaccattcgccgtgggtcccacccgctatgtagggataccccatctagtcttaacgagctttgatgcatgaaaaaattcgaaaacaatgcttgaacaagtaattttgggtccgtaatatagcccaaatcacgaaaatgcccgaaaaaatatttaaaggtcaaaatttggggtcgacaaaagaaaacattacatgaaaatattctctccactgtccacaccacacagctctagaaaactagatagtttgttgtcagtgttttcactgtattattagttgaattataatcctcataatcgatatacttattattctcctaatttccatgcatgtatgtacagtatgaataggaaaaccagacttttgatattagtgaaccttaacattgttaaaataaattgaaatcttgtttctgtcttgaaccactgacagccacaaaattttgggtcttcaaaaatatatgtggagaggaaaagtagctctcgaggaagtttctgtctattttgcctagaaattatcttgaaatcttgtagaatggctacgtctcatcatcatacataaattcagtgacgactgatagccacaaaattgacttatcgttatagagtagaagctttccaaggaaaggaaggggacgtttctgtatcacacaattatggtcttatcttgttagggatttgatttttcaaccactaaaaaaatatcttgtacagtaagtcttctatgcaagtcttctaagaaaggaagaccaagtttacgtattatttgccccaattgtcttgtaatgggatttgattttaaccactaaaacaatatcttgtatagtaagtcttctatacaagtcttcgaggaaaggaagaccaagtttctcctctctgttactgtgttgtattattgatatacttcaaagagttttcctttgagaaatttcgtctcttctctctcatcctctgccatggcgtcttcttgcttcaaatagatatacaatgttctcagatggatatataatgttttcgcgagcttcagtggagaaaatttcggcaaattgtttcgtggccatcttgtcaaggagctcgagctcgaccgtgaattgatg

SEQ ID NO: 30602 - DNA, 3003 bp, Unknown
  misc_feature (1)..( 3003): 2750-1469P.txt file - cDNA_ID_3033507; gDNA_ID_1974073; Annot_ID_180293
atcttatggaagttgcacggtcaatgatgtttcacacaagtgttccgaagaggttttggggtgatgcggttctaaccgcgtgctaccttatcaatcggacaccaactaaagtcttgaatgacttatctccctttgaggaactaaacaacaccaaaccgtctattaaccacttacgtgtctttggttgtgtatgttttgttttagtacccggagaacaaaggaacaagttagatgcgaagagcactaagtgcatgttccttggctattcaacgactcaaaaaggatataagtgctttgatccaaccaagaatcgcacattcatatcccgagacgtcaaatttcttgaagatcaagagtatgataacaagaaggattgggaggacttaaaagatctagctcattcaacctcggatcgcgttgcaactctaaggtttctattggatcatttgggtaatgaaacaacaccaacgaccgagaatacgcaagaaacacattcaccaaatcaagaagacttgcatcaagggagtgatagtaatgaggaagagtatttacaacatcaagaagaccttctcaatatacaagaagatcatgaatccgtccaagagactcaacatgactcaagtgactcaagtgatgatgaaaaacaagaacaagtcctagttcttccaactccatcacttagaagaagcacaagaatccgtcgcaaaaaggaattctttaatgctcttgcggtagctcatccattccaagcaacatgttctcttgcccttgtacctaaagatcatcaagccttcctctccaagatttctgaacatcgaattcctcaaacgtatgaggaggcaatggagatacaagaatggcgggatgcggtggccgaggaggtgaatgcaatgaagcgaaatcacacttgggatgaagatgagttaccaacgggaaagaaaacggtgagctctcgatggatattcacaatcaaatacaagagtaatggagatatagagagatacaaagctcgcttagtagctcgggggtttacacaaacctatggatccgactacaaagaaacctttgctccggtggccaagcttcatactgtccgggtagtcctcgccttagccacgaatttatcatggggattatggcaaatggatgtcaagaatgcatttcttcaaggcgaactcgaagatgatgtgtacatgactcccccacccggcctagaagacacaattcaatgtggaaaagtgttgcggcttcgcaaagccatatatggtctcaaacaatctccacgggcgtggtaccacaaactaagtcggacactcaaagatcatagcttcaagaaatccgaatccgatcacactttgttcacactacaaagtccccaaggtattgtggttgttctcatttatgttgatgatcttatcatcacgggggacaacaaagacggtatacaaaccacaaagacctttcttaaatcatgttttgatattaaagatctaggtgaactaaaatattttctcgggatagaagtgtgccgctcgaatgcgggtctttttttatcacaaagaaaatatactcttgacttgttgaatgagacaggttttatgaattctaaaccggcgagcactccacttgaagatggctacaaggtcaatcgaaagggggagaaagaagatgagaaatttggcgatgcacctctttaccgcaagcttgtaggtaagttgatttacttaacaaatacaagacctgatatttgttttgctgtgaatcaggttagccaacatatgcaaatcccgatggtgtaccattggaacatggtggaaagaattctaaggtatctcaaaggcagctccggacaaggcatatggatgggaaagaactcaagtaccgagatagtaggatattgtgatgcggactatgcgggtgatagaggagatagaagatccacaaccggttattgcactttcatcggaggcaaccttgcaacttggaagacaaagaaacaaaaagtggtctcatgttcaagtgctgaatcggagtatagggcaatgagaaagcttaccaacgaactcacttggctcaaagcgcttctcaaagatcttggcattgaacaacacacacccattaccatgcattgtgacaacaaggccgcaatatacatagcctcaaactcggtgtttcatgagagaaccaagcatattgaagtcgattgtcataaagtccgagagaagattgtcgaaggggttacgctaccgtgttatacaagaagtgaagatcaattggcggatatcttcaccaaggccgcaagtctcaaagtttgcaacttcatacatggcaaactaggacttgtggatctatctcactcttgatctcaagttcccctaaccatgaacatcacactctttttcccttagtaaagttttctcccatgtggttttctctactacggtttttaatgaggtgatggatcatgtgttccaagcttagacttgcgtgagtcttacgcttgagggggagtattgagcaagacctaataaaaagcatccatccgtacaaataaagaaaagaggccgagtgttgtgtgtaagctacaaggtgttgggccgaacacattgagaagcctatagggagcttctagaatgagtgaaggcacacaaatatctcttgtagccgttgaagagaactcacgagtggtcttagcttcatggtcaaccaaggacctgtcactctcaccattaagaccaaggaatctcttctctcatgtctctttcattcgcatgttatgtgtaaacggctatgttccctttgtgtgtccttaaaatacaatgtaaacacacaaaggtaactaaccaattctagtaatatgttttggtcattctcactcataacaatgctctcttgttcctcatgattctcttacccttactcttactctttccaaactacaattccgcatattctttcaagaagtccctcatacgtattacaccgggtggatatatagagatg

SEQ ID NO: 30603 - DNA, 3003 bp, Unknown
  misc_feature (1)..( 3003): 2750-1469P.txt file - cDNA_ID_3033511; gDNA_ID_1974073; Annot_ID_180291
agtgaaaactagatatctaactattgattcattttcaggatcaactgcaaaatagaccataggaatttaataaatttgattttattatgcagattacggtaagaacatatgaagatccttccaacttactctgaggtaaaacagtagcaaacacaagcttgacggctccaaatttggaactttccttagggcagggtaaagtttccgcccagatgtcttcttctacaagtatgatactattgttatcagtttcttcaagcaaatttcatggcgatggaacatcgttgtataattccctttctccttctgaacatagatgcggtggctgactgctaggaacccttcgcgtgcggcaaaagaaaaaaaccctagtcgcctctcctgtcgccattttctcggctgacgtagcctaaaagttatgagttctttcagggcgatttaattttaaccactagaagtacaataagtcttctatgcaaggcgaagtttctttgttattaatttattattgtgtctgtcatcatactctcttgttaggagatttgattttaacgtatataccactacaaaaatataacttgtacagtaagtcttctatgcaagcctgcaaggaaaggaaggaagtttctgtgttaatttgttaaaacttgattgtgtctctcactatacgctcttgttaggggatttgattttaaccagtaaaataaatatcttgtatagcaagtcttctatgtgagtcttcgacgaaagaaagacgaagtttctgtcttattaagttattattatgtcttaatacatcatactttgttaggaaaattgatatcaattaaccactaaaaaaatatatcttgtacaaagtcttctatgcaaatcttcaaggaaaggaaggcgaagtttctgtgttaaattgttattatatattataaattgttgatagatgtttgacagataacccgaggcgaccaatcagcatagaggatgctctcaagcacgacttcttcttctgatgtagcattttattcaattgtttatcgaaccacaatttgcaattaatcaactcaccaagaatatacacaattgcttaatctaagctaacaagttgattttgagtattctaaatcttagtaacaatgcattatcaagcaaacagtgcaaaacaaggtaaaagaaagcaagaaacaaaagactaacaagtttcaaaagtaaacaaagcgggagattaacaaattattgagtgataactaaagacgaattctcgggttaaggcaatcgattagaaatgataaagagatttggattatgtagcatcaaacaacttctaataagcaatgatccttaggccatagaacactaagcaagactaacacatttcgatgacattaatccctttattaatcaaccaatcaacaacaatttcaaaggcaatcaaatgatcaataagcataaataacaagtctatctagccactaatcaccctaatcaataattttcaaaggtaaggtatgaaaagcacttaaagattttggttcgggaaattcatcgaacaccttccaggcatgaaattccaagtgtctaaatcaacatgatcaaggttgatctagccttaatagcaactaataagtaagaatcttaagtaatctaaccctaaactccataacccaacatctaaactatcctaatgtaccctaaccaaagatttctaaaagactactcactcataatcatgatcatacaaaggaattggtttgatctttgtaaagccataatcattagagaatatatgagaaatttagaagaagtacttgatatagaaactttagaacccacgattcatacaaaaacttaagataaagaaccttaagagaagtttttgtctctcaaacaaaaaactctcttctcaaaaactaggttaagagtatttctatagtaatgaggaaataaaccggatcaaccaggaacaaaccaggttttgacccggtttaggaaagcaatcgaccaagcaatagatcacttggtagattcgaatatcatccgcaacattaatgattaatccttgaccaatcgaccacgcaatcgactattttggtagattcaaatttcctctatagctttggtccttgaccaatcgaccactttggtagattcaaatttcctctgtagctctgatccttgaccaattgaccaggctatcgaccacttggtctattgtcctgcacttctcctctttggtcactttgcattctctgaactccttttttttcttcatttgcttccaaaactctaacctccactcatgtactatcgattcttgaccttgttgataaatgtttgaccgttaacctgaggcgacgaatcagtgccgaggatgctctcaagcacgacttcttccatctagtacatgaaacccttaaaaaccaaatgctccttaaacagcagcccacaatggttgctgacgcagtaagccaaactctaaactaatattacaattgtaaaagtaaataagaaaaatatatctaacaatcttcactccactgtccacaccactgaattctggaaaactaaaagagtatttaagcaaattagatagtttgagtcttcaaaatatcttttgtagaggaaacaaaattgaagtttttgtctatttgcctcgaaattatgataaattataatcttatttctttcttttacaatgacttagtagtaattcagtgacaattgacaaccacaaaatcaatcttttaaagtatctttgtatagtaaaacctctgtatcatattagtttagtacgtctcaattgtcttgttaggtggtttgattttagtcacttaaaaaaatatttgtatagtaagtcttctatcaagtggaagaccaagtcttcgaggaaaggaagaccaagtttctcctctctttctctcttactctcttactcataatatgtattgctaatttacttctcttacaaatcttcgtctcttctctgagttctctctatcgtctcccatg

SEQ ID NO: 30604 - DNA, 3000 bp, Unknown
  misc_feature (1)..( 3000): 2750-1469P.txt file - cDNA_ID_3033540; gDNA_ID_1974074; Annot_ID_180336
agtttcaaaggagttggtgaaatatggagcggtggtgattgatgaccaaagctttgaaacacaacgaaacctcacgacagacttcgcaggcagccttgagaatatctccgaggttagatcgagaggtaaggatgatgatgaagattttcctctgcttctttttctctggatattttcggtcttctcttctctttgctccatcttggagaaaaccctaagtcggtacttcctttccacgatttatgcttatatgtctcaactttttccttttccactaaattggaaaaggaaaaaatgcttataggtgttaaacttccatttcctaaacatctagaccgagataaaaaaaaataggctctatctgacgtgatgtcaatacttcttggagggaaatcgactgttttcccactaaatttaatcgtaaaagatgtacaaagaaagacttaaaataccaagactcttaaccagagttgataacaaaactatacataaagcactaaaccaactaaactaatctagtgatatttaataatatacaaaatttatactggtgtgagaaataaatagatttttttaataatatttgaattgtaatagtaatctacattttttctttcatttaatataaagaatttttgaacaaaaattcaaatttaacacattctattttgcaatataatttaactattcatttcatgataataaactggatattaattttatacacgtcattaatgaataataacaaaacattttagttatacacacgctctatcttattgtgtctagttttacttttgatatttaatttttaaataataacccacacactttcaatcttaaatgttctaactcttatctctaaatattcttaaatcactttttttttttaatttaggaaagataaaaaaagaggaatgattgtcgtagattcatttatcttaatcttcatgagtatcttatccactaaccgcgagtaagttatctcctctattgatgatgtcctaaacgatataccatacaaaccaactatttttgaatttcattgatatgcatctccggtttttgaataatatccatcataatcaaaatatatgtttattggaaggttgctcattctcctgaaaagaaaatattagttgttatttcaaaaatatcagttgtaccatatatactacttcaaacagttatatcagattcataaatggagagtgaggaggtcctaaaattatcgttcttccaaatcaaaaattattatttattagagtaaaaagttgcgctaaaggaatttcttatcttgattcttttacataaagtatgctctgttagaaaaaaaaagaattcaaagacgtcagaaatcaaaatattcccaaaaaataatggttttagatctctccaatcaactaattgaaccaacatcaaaattttaaaatacgcgaatagtatatcaatgctgtgtatcaaaatctcataatccaaaatactctatccaaactcgaagagaatacacccatataaccatatcaatagagaataatacaaaaactgatttaaaagcgttttgtagcgaaacacaattttaaccatcccaaaagcctttttggtactgttaccagagtaagagacgataaaatacaaacaaaaacaaaacatgcaaccaaaaaaaataaaaaagaagagacaaaggggagagagagaaaagaagagcgaacaaattccttctttttcccctctttctctctctctcccactctctcatcttcttcttcttatgattttcaacttattacaacaacaacaacaacaaaataatcttgcaaagtttcagtctcaggtggttcacagttaatgctacttgcaatgatgaatccatcccaatttcgtaagttaatcttctcttctgaaaattgaatttggtgtatcaattcttacattatcttgaagattcatctctgaatttctcaaatttatgggggttttttgtttgtcggaattgccggagaaattggaaaaaacgagatctttgagtaaagggtttgtttaatctttagtctttattgctttccttaagctaattttggcagatctggaacataaaccctagaacaagaccaaatcagtgtctccttactcttagggattttagtctctgtgataccttaaatgtgtttataaattgactgtgcttaatgggtcacatttgatttgcaataaaagtttcacaattcttccattttcagtaatgtaagctccagttttcaagatttactattttggggaactagttaggtttgtaggtttattagatcttagaaacactaatgtaatgctgtttgtttggtactctttaatattcactattcatcttaatgtggaatcaaatttgctttttttggtcagactcaattagttggaatgagttgttgaaccattgacttgtctcctaagctcttacttaatctatctgtatcatcttctcctgtctatttctctttatttaatacataactcgttcatgattgcatctgacatggtagcaactctttgtgaacaagacttgattttataacactgtaacatgaccacactttttccttttgatctctgtatatttggggaagtaaggatttggtttaacaatgatacaaaatcacagtttagatgactcagtcttgtcttttatcattaagatggaaaaaatgagaccaatcttgtcttgctttattctaagatgcatgctctattatattttatgcttttgtatatataactgattgaagccggccaatggagattggtgctgactttttaaatgagctgttgttgtatttcagccaactagcataagataaaataaaataggaaaatttttcatttcagtctcttaagttcaatgaaaacataatgtggcacagaggtctttgcttttgtacctttcagaatcttttattgattgatgatgtttacatacaggataacctctactgaggcatccaaatg

SEQ ID NO: 30605 - DNA, 3003 bp, Unknown
  misc_feature (1)..( 3003): 2750-1469P.txt file - cDNA_ID_3033563; gDNA_ID_1974074; Annot_ID_180315
tggaatctcatgtcttgtgcatattgtaagtttgttgatgtttgtgtgtttaaggtaaatgatggagtgggaacattagctggagcaaggtattgggatgaggatgtgatggtcggtgtgattcttggcactgggaccaatgcttgttatgtagaacagaaacatgcaattcctaaactccgaagcaaatcttcttctggaacaacggtattattgatatttatatatgtagataggtatgtcaatttttcatgcttaaaactgtttacatttggaatcagatcataaacactgagtggggagggttctctaagattcttccgcaaaccatttttgacctagagatggatgagacaagcctgaatcctggtgaacatgtagtaaaattttatcctttctttagtaacattatgttttttgcctggtgtcacatgttttacaattgtttactgtttgtgtgtggatgaagttatatgagaagatgatctcagggatgtaccttggtgaaattgtaaggagggttttgctccatatgtgtgaaactagtgacttgtttggacacttcgctcctgccaaactctccactcctttggcactcaggtatctttatccaagtccatattttggttgttgttttatgagtagtagatttagttaggatgtgtagtttggtttatggtttggtttcggctcagtattaaaactcgatttcgttcagtttgatggaattacggtttgaaaatttctcttggtaatgaaaatatcaaacattgatcattggtgtatttcagtttgtttggttcaggttaaaaaattacacaagatcattttgttagttaagtttcaattttggttcagttacaatttcggtttgttcgattttaaaccaggaaataccaatatgctcaaacatttcggttcagctttggttcggtgcggtctatatatgctcacccctagattcaataccttaataacttgattagctaggaaagtgttgtaaattctgattgacagttttattcattatttttttttttgtaaattttgtaaaggaccgagcatctatgcaaaatgcaagaggacaatacagatgatcttcgggatgttggatcaatcctatacgactttttagatgtaagttgttaatgtataaggctaatcacatccatagatttgataactgtaccaacctgatcgagctattgaaaataggtagaggcgaatatgaatgcaaggaggagagtggtggaagtgtgtgacacagtagtgaaacgcggagggcgtctagcaggagctggtatagtggcaattctggagaagattgaaaaagataccaaaagaatgggttcaggtaaaagaaccgttgtggctatggacggtgcactgtatgagaagtacccacaatatcgacagtatatgcaagacgcactagtcgagcttcttggccataagcttgcaagtcacgttgcgatcaaacataccaaagacgtgtctgggctcggtgctgctcttttggcggccactaactccatttactagtacttggacctctacttcatgagtataggaggacttttggtccatttgtttgtgtacatttatataagatatcatatcaatatcaataagattgtaaagaggagcaacgaactagcagaagattatgtcttggaccacttcgtacaacactagaaaatccttttacttccaaagtgaaaattttgatacgatttataattttggatataaatctatccctatttggtttgtgaaacactctaaatgaagtagaagttatgaattatgtctaatcaatgagttagatttgtaactttgtttaaacaaaccgataagttatgtttagtaacaaacggctgactagtaccattgctttgtataaatcaataaattaaatatagataatagttttaaagattcttttctagagtaatatatattattttttttgaaaacttttaatatcattttaactaacaaataaattttaaccaccaaacgtttagtttttagagttggcaatcgtccattttttctctcttttaatcactttttccaaccgctcatatgattggtaatctccaaagctgtttgttttgttttgtttgcaaacaaatctattggatcttactaatcaaacccaatgtcataattaaatatagggcaaggcaaaatatttgtagtactcttatttgatttgctatatcatctttgatcccattaaaaatatgcagatatttgtaagtaaatttaatatatgttagagggaaagttaattacaaatattaaaatttgcaatatggatatccaaaatggataatacaatttattagcattcaaaaaggttttgcagtactggatagtcctaatatttcacgtataaaggaagatcaaccgtttcacaaatggattgacaaattacatgcgttttcattgtttctagattttcatgcatttgatgttctcccgaatactttgatttcgatatttagggatgataagtctgaactatcgtgtcacgacatgttcgattaaggtttttcttctgattttcaccaaaaaaaaaagaaagccttataacaaaaaaaaattaataaaacttttatcatattttttgaactttcataaaatatccaattaaaatttaaaaattaacagatttgtaactagttttgagaggatacgaatatgaaacacataatatttcattgagttggaaaaaaaaagttgtagttaaatcaaatttttaaaacaaaaattctatttcacaaatcttttctagctccaagcttatttttctatttcctcctaaatcaatttttttcttaaaaactccatctttttgactggatagtttggctgctttacgaacctgttttcaacaaaggtcgtgaaaattcaaagtgagatctgaaagaagaaaattcctctgatcgctcacgatttctcctgaattctccattagattttgcagagaaaatg

SEQ ID NO: 30606 - DNA, 3003 bp, Unknown
  misc_feature (1)..( 3003): 2750-1469P.txt file - cDNA_ID_3033596; gDNA_ID_1974075; Annot_ID_180372
acagatgcaggcttttacaactgtcatgtgatttgttgtaagagttccagttttgtcactacaaatagttgttgcagatcccattgtctcacaagcagcaagattgcgcactagcgctttgtcattcatcatctttttcatggcaaaagcaagacttaatgtcacagccaacggcagaccctccggaactgcaaccacaacaattgttacagcaacagcaaaatattctagcatcgccatcaattcatcagcagtccagatccagtgagaattatctaggcgcttctgattagccaatccttgaaccaaaacagcaaacgtaatgacagcaaaaaatagacctattttaccaatgatggttgccacaccattaagttttacttgcaacggtgtctcatcatcaccgccttcacttagtgtagccatcagtttaccccattgagtcctcattccaactgtagtcaccaacattttgcaagatccatcctgaaccttggtaccagagagaagaaacgggtgttccacactgacactaaccggttcactttctccagtcaagctcgattcatttatcagaacagaaaaccctgagataaaaagcccatctgctggaatctggtctccaatgccaagatgaacaacatctccagggagtagatcatatattgagattttttgcctcagtttgtctctcgtaacctgaaccacaatctttttcttctctgcatccaggtccttgaattgcagggattgcctataatcactagtggcagtgacaaacacaacaagcagaatactcgccactataccaagtccgtcatgggcaccaataggccacccttccatcagtattccaactataagtgaaacaaacgcacatgcagctagaatcataagtgttgtatcctgaagggcttcccaaacaaataaccaaaagccacggctggggctttctgtgaattggttgattccataaatttcttttcttacactcagcaggtcttcagatgtactaattccactagcaatagacgtggaaagtttttcagtgaggccctcagttccaccatgaattttcaactttttcaaatcatgaccttctacaattgatcccaactcatcaggacaaatctcaaaccctgcttttcttacttcttcaggtagtgtatactcactggacaactttaaacctgtaagcacgcaataccttctcgttaaggaaatcaaatacatattgaataacacaagggagtagtctattctcactattaatgaactgaagtgcagcttgtgaaactaagaccgccactcgaaatttttcctgcattcataaggttgacaaaggaaaatggtattagaacaaagcaccaatagcagtaagaatttattctcaaaggaaaaatgaacagaacgctttgatcgctctaattaacgcctccttcaatacaaactacaagaaacacaaggcttgaaatgggttgtttgctactaatgagtcatatttgcttgaacattcttactagcaaacaccacgaagaacctaaaaatctacatcttaaattagaaacagaacctaatgtaatcatgtctagtgataacaatccctaacctgaggataggtaactagaaaaatactaaaaacgagctcacttagatcccatccagtaagtacagtgagtcaaccaaacaaaaaactcggaatgcagaaagatcacttattagatctccaacagtatacaagcagaaatagaaagaaatgtttcagtaatcaaagtgagaagaaagaagcacctgattggaacgccgaatcgcctcggcctcggaacgcttagacagattagcagtgaatctaaatctccttttaggattcttgacgatccagcagagcttcctccaacgctgcaacgcctcatcggacgagttcttcggcttcacatcgccgaagttttcgttcaagtagctctccatttcttcagcttactactctcgaacaacgagtgaattcgtaactatacttcagatgagataagattagagaaagagagaatcaaggatctcgtaaatcgagaacgaagaagatatgatatataacaagaagtcctctcactggtaatgggtgcttttaacttattgttatttacctttatatgggtcaagatgaagacgatgctttgacgcgtcgtctcgcactaagtgagcttcgtcgaagtttcgtctgcctgttctgaaatttcctcatggccatggttttttttttttttttggaacactcatttattcggacatgactcggagctggtcaagaaagtcaaagctatttactgacttggactttatttcaacaaagtttttagtatattctaagttttgtgacttttgtccattagaaatttcacacaaataaattagaataatttactaagtatattttctaaagaaatttttacaaaagtagacgaaaaaagatttgctctcattgtttgtcaaagtgagaactggttttcacgttttgtcttttcattcaatttcggaccaaattaccctgggaaaacttaataatggcataaaccaaaccgtgcagcagttcgtatcggttaagttgacggcgtaaaccaaaccctacagcagttggtttcggtttagttgatgcggttcagttttgaaaaagacaaaaaacaaaaaaactgaaacgaagaaaccgagaaaacgaaaaagagaataacggagagattgagagagaatcagaaagcgaaacgaaattcagtatccattgcttcaaaattcgacataacttcgaattgttgggtagttgaattgtgccactgaactcccacatccggtgaagtgaaagttactgtttttcccggcgaagccaagagaaagttactgtttttcccggcgaagccaagagaaagttactgtttttcccggcgaagccaagagaaagttactgttttttccggcgaaatttgaacctccggcgagatcgcatctttagctatg

SEQ ID NO: 30607 - DNA, 3003 bp, Unknown
  misc_feature (1)..( 3003): 2750-1469P.txt file - cDNA_ID_3033600; gDNA_ID_1974075; Annot_ID_180370
tctatgcaggatggatatctatggaagatgagcaacttcaatatttgtccatgatcatgttgcattcggcagacactttctctatgaaggagtcaccgcttcttctaactgatggtagaaacgccgaagagcttatggatgaaaatgctgtagttatgcaatccaagatcagtcaaataaaagacatattccctgagtatgggaacggtttcttagctgcgtgtcttgaagcctataaccagaatccagaagaagttatacagaggattcttgaaggaacactccatgaggatttgcagcgattggacacttcactggagacgatgccacaacctaaatctgctccaactcttagaagcaaagacaaagggaaaggaaagctcattgaatctgacactagtagctctgctagtgccatctatacagagaaaccgatcacacggccctcccttccagcttcatcagcctcatcagcaacagttggcagatttgtcagaaagccaaaggatgatactccaagttacaaaattctcgatgctagaaaagaatccgacagagagaggaacgcagccctacttgcacaatacgaatatgatgatgaatacgatgattcttttgatgatctgggcttgagtattgcggaatcaggtactgaagaaagcggagcgtttggtaacagagctggatccgagccctctgatgctccaaagtggggtagcagaaagaatcctcaattctatgtgaaggatggtaagaactacagttacaaagtggccggcgcagttgctgtggcaaacgccaacgaagcttcactggtaaatgaagcagagggagataagatacttgggttgggacgtggaggaaacattcctctaggagcggttagaaagttgacagagtatcaggcacagagagatgagaaaggtcagtctaatgtgaatgtgaacccaagcgatggaagagagaatgggagaaactggagaggagtaaggggaagaggaagaggagtggtgaacagagagcaaccgcaggagaagagtaatgagagtagtaataacaactcagaggttaatacagaggcggagaacggaggaggacggggtcgaggaaggggacgaagaggaggaggtggagggagaaatcataatcataaagatagagctatgaagaaacatattgctagtgtttctggcttctagaggtttaaaaagtaacaaaaagcacaatacgtttttgtgggtctgttttttcggatacaggggagaaacttaattacaaatcgatacttcatttgattgtaatgcttgtttctggtaattaaaagaagaaaactagcatattattattccctttggttttggttaaacaagtttcttttgtaacaggttggtatgaatctaataaaaaaatgaactttttgtgaaaaaaaaaaaattcttttgatatatatgcaaaggtaacaacaacttataaccattccaaatctccaattgaactcacattgtctaagttctatctttttatctttattcttcttcccgtaaaagaaagagtagttattacttcgagtgacagaagttgtaaaaatttgtaagcatgtaagccgcaataatataaaaagagaagaaacatttataaatgtgtgttatatataaagaattgtattttatttgaggtagataatgaatgatctacaatcaacaactacacggtttgtgattatatgtatccacgtgatttaatatacaaatagatttgttttctctgcaaaaaatacaaaaataaatacataaaagaaaagccaaatcctaaacgtaactggaaaataatatacgtatgagctaatttcaatttggattagacaaagaaaagaagaagagagagacgtaattatacaaaagcttacgagaagtttgttccatcatcacttgagagaaagatgatcaaatcatacaagagaaacacgaaccgttcaacgggagggaacgcggcagcactatcattcgctttggttcgtcgtgcagaatatttaggtacatacatatgttttataaattttatcatctttttgaatgcatcataatttacaatatttcgattacgagaaaactagatgaagagaaccttaaacatcctttttaacataaaaaagaacactaaactaacacaagttctacacattagtataatttcttagctgataaaaaacacaccattagtatttttccctttttggtaacgttttttttaagataatctaaaccataatactgaatcacaaagctcataaaaaaggaaatcgaaattataatcacgtcggcaagtaaagagccaacggtgagggatgagccacgtgtgaaaggatattccttagatgtgaatgggatctaattcttgtccgattaaaccgagaagagtcttggtacgcctctctatatataaaagtcatcactttcctcctcacgtttcttcctttggcatcgacgaaagtctgaaaactcttttctctccacctctttctctcttaccccaaacacaaaatctcctctttaatggatatatcgcctctccgatctcattcttcctcgtttttatctgccaaactcttattgctcttcttcttttgtagttttcgtgcttcttcgatttcttcttcttcagttgtttcccatcgtcgtaatccttctagctttcggtttctttgataattccctttgaattcgtttttcttcttctttcaatttccgcaaataatcagccgccgataagataatcatggggaggagtaagatttctcttcttcaatttttattctttaattgattcaatttgcaactggatttgtttgttttagggttttaattgattactaatttactatgaaatctcttatataaccaatttctgttttcgttaacgcttttataaatttggatgctttgattaacttttgctggaattgtttttttttgtgcagaatctcagcgtaagaacgcgacaatg

SEQ ID NO: 30608 - DNA, 3003 bp, Unknown
  misc_feature (1)..( 3003): 2750-1469P.txt file - cDNA_ID_3033624; gDNA_ID_1974075; Annot_ID_180361
ttaggtgaataagtccaattcctgaaaaaaaagaatacaaaataaactcattagatgaacaattgatcatagaattattggggacaatttgaataaagaagtattataataatgtagaagaatggttggaaagagttggcgaggagagagtgagggcaggtgaagctgcactgcacagcaacgaccgggccaatataatgcacggttgggcgacgtacaccgccggacgaaactgacacgtgtaccctttgttctttcttcttttttgtacccctcaattactacattcattgtaatgttttcgaaataatagagtatatatgtattttgtctctaaatagtagagtatgagtgactagattcactatatgataactggagagtgcaaaactaatcatgacaaaaagtaagggtatgaatgattttggttattcgtttcgattctaaggtgatttgtgagttagatttggtactaattacagtttagctcttttcatcatattcttacatgttatatatttcaaaggaattatctagacgcaaacaagctttgacaagaaaaatgaaaacaagcaaaatcgagaatacatcttaagtaaggcaggggatgcggcccgattcaaaattctatgttctaaaaaattatttattatatatggagaaattaattcagacaatttgtgggttctttggatgacgatctccatctcttcttgacactgggagaagaattctaattcttactcgttaatttatatgcatttgatgatattatttttctcacatttgtctaattagtgttagtattaatttaatttggtatgctagacgggctcaattgggtgagtttttttaattagttccaatgaaagttgatgtgaaaaaagtattgtgagccaattagattggtaattagtaaaatttagaaaagtcaaatgtatggaaacactatattaaaacatctattacttaatattgttaatgctatagcattttattaatttataagaaattgttagaaactcctttttaattctatttgtttatgcagttcattctttttatacattcttttattttaatgactgttttactcatatttgaaaatattttagattaacaaaatgaaataataattttttccgtcaaaaatatttcgaaaataagtttctcgtaaaacaaatccgacaaaaaaaaaatctaccaaaaaattttcccaaaaaactttttcttgtcaaatttttttttccaaaaaattcatttcccccaaataaaatatttttgccaaaaaatagatttacttgggtttacttctttttttctgttttctagctaaaaccaattgacaaaccgataccataaatctaagataatagataaatattgttatgaccgaccataattgtaaatttgtttggtgaaaatgggtttctcggagctgaatcttctctaactgtggagagatgtggagaaaatatagacattgcagagctcacagacttcctttgtgctgcttcgatggttagagaatttagtgagtttcacactgaccctgaagatcgaaagcttagatatgacgttaagaaaaaaagttagaattgaaatatgagccaatgtcagttgttgatgacgagccggtttgcctaccaatgataaaatttggggtttcaaaagagacatgactcatcacacatagatcacttccggagttagtcacaaagcaactttttttctactatgagaatgtctttctcacacctaaaagcgtttgaaaaactatctcaggatacttgtttgatatcccacctaagttttttgactcgaaatatttatgtatttcagcacaaatcagcacaaagagaggtaacatccacaatcttccaatccataatagaatccatcaactgccaccgaaatacacaattcgtgatgcatttccatttactaagagatggtggccaacagactaggataaaaaagcccaagctaaactgcattttgatttgtacaaggagtgcccaattaactaacatgatccgtttagcccttgaaccttacaatggagaactaaaaccgcataatctttttctgacgaaataatttaatgaaactatagatgagcaatactattgtatctaatgaaaattgatgttaaaaaatattgtgaaccagttagattggtgattagtaaaaatttagagaactcaagatgttcaataatggaaatccgaaaaactattattactagagttttttcttttttctttctgttttctagccaaaaacaattgacttaaccaatgccacaaatctaaagacaatagacaaatattcaacttatgctttccaagaaaatatcatcaggaccatattgagtgatactgtagtttgttttgctctttctgccattttggatctgatttgtaaaaatgtaaaatcatcttagaattctgcataatttttactaatcataaaatgtaacggattagtaattccaatcatttagtaattagtaaggaccaaaatcacatgaaagatatcttataagaaccaaatttggttattccaataaaacccttgaatgatattttgccgttttcaaaacccttaaaagaagaaaaacaatcagagggttggcggtgttcccgtcagaagatcacgaggatcatcacattaaactctgttttgttgatctctctttctgttccgtttctctttccactgccaaaagttaaagctctctctctcactcaatcacacactcatttctcactatttcacaacttccttgtggacaaaattagtcgacttctctgttctctccaacactgtttcgttttcactacccaaaattcgaatctgggttattgaaaaagttccaatttttttatctgggtttttcgaaagctgatatctttttagaatctgatctatctcttctacttcatttcccttgcatttttttaataagttgtagaatctgtcttgttctggaaaaatatg

SEQ ID NO: 30609 - DNA, 3000 bp, Unknown; identical to SEQ ID NO: 9821
  misc_feature (1)..( 3000): 2750-1469P.txt file - cDNA_ID_3033629; gDNA_ID_1974075; Annot_ID_180359

SEQ ID NO: 30610 - DNA, 3003 bp, Unknown; identical to SEQ ID NO: 17493
  misc_feature (1)..( 3003): 2750-1469P.txt file - cDNA_ID_3033633; gDNA_ID_1974075; Annot_ID_180352

SEQ ID NO: 30611 - DNA, 3000 bp, Unknown; identical to SEQ ID NO: 26528
  misc_feature (1)..( 3000): 2750-1469P.txt file - cDNA_ID_3033676; gDNA_ID_2213624; Annot_ID_195773

SEQ ID NO: 30612 - DNA, 3003 bp, Unknown; identical to SEQ ID NO: 28009
  misc_feature (1)..( 3003): 2750-1469P.txt file - cDNA_ID_3033680; gDNA_ID_2213624; Annot_ID_195769

SEQ ID NO: 30613 - DNA, 3000 bp, Unknown; identical to SEQ ID NO: 9828
  misc_feature (1)..( 3000): 2750-1469P.txt file - cDNA_ID_3033719; gDNA_ID_1974077; Annot_ID_180436

SEQ ID NO: 30614 - DNA, 3000 bp, Unknown; identical to SEQ ID NO: 9826
  misc_feature (1)..( 3000): 2750-1469P.txt file - cDNA_ID_3033733; gDNA_ID_1974077; Annot_ID_180428

SEQ ID NO: 30615 - DNA, 3003 bp, Unknown
  misc_feature (1)..( 3003): 2750-1469P.txt file - cDNA_ID_3033750; gDNA_ID_1974077; Annot_ID_180421
tgaaagaatctaacagatttaagaaagtttggaaaactcaattcagcggttacgattcttttgctctatcagcggttacgaagaccatttttctttcagacgattataggacatgtgtgaggataaatacatcttgtgaatagtccttcttttatttgggagtagtacttatcaagtcttataaatagggagcgttacttatgtgatttatgacctttaatcttaaataaaaacaagtttaggaaaatcttgatttttaagaatttaatggatttaagaagatttggtaaacatgcattcggtcacttcagtataatcctcgtacgagttgtagattggtctgactatcagcggttacgaaactattttccttttcgacgactatatgacacgtcttgtgaattaagatatgatgaacatattgtaaaccgttcatatattataaaaccagaaaatttagaagaaaaaaagagagactcatgcatgttattaaaagggtttagatcagtacgatgttcaaaatttctttaattagtagctaagcttttgcaaaagacctaagaaatttacatggttttttttttcttttcagtctaaagaataaaggatatataaagattaagaagacatcagaaactttacaacatcattgacaatcaaagaaaagatttcaaaaactaaaccgatggatgataagatattttcggaccgtaaacccaaaagaccgatatgaatataatacataaccaataacaaaaagagataaagccgaaacaaacaagagaaatgaaactatagaaccataatctagcacaaaacaacatgcgtactaccaaaccaaatgaaggataagcttgtcaaagtagcgtacggaaagggaagaaaaaccacgagaacggagagcaactcttctactaacaaatgaatcctacctctctaagaaagaacgaggtattagtaccaacaagaaaaaatctagggcggaataactagaaccaatcacaatttctaaaaccggcgaaaatgaagaatacgaaaaaacaacgatcttttaactcttaataagaaataaatgataacttgaaatcttgatcaagaaaacgtcacaatttccaacaacggtgttagtcggaaatggcatatccgacaaagttctgacaaagtcaaatttgtcggaattttttggtctaaagatcggagcaatcggtaaggaaaactacgtttgaaatatcacttccaatcatacacttcatcaggtgcgcatagcgtagatcaggttgtattaacaaatttatttgaaagtgttgagattgatattttatgggtatatgtgacatttaagattttttgtaagagggggattaagcaacctccggttaacccagcttaaaccaaaaatggatcgaaaaaccagtaaactcagcccaaagatgtaagtctgatcagatcgacaccaacctacaagataaaggaaaagatagaggcaatctaggaagctaagttataatacaaaaagaaagaaaaagatagattttcgatagagaaataaggaaatcaaacatgtatatgttaaactaactatcactttcttataaatagagaagcacccctttgaaagggaaatatgtggactcatacacaagatcaaccaaaacacctagaaaaaacccttataacataaattatgaatgacttgatcccttatgatggatatataaacaacctacataaggtgcaactattatatatataaaatctcaatttgtcatcctacttttgttgttaaacttgaaccttgttgaaatcctccttaaaaccgacttgatttatcaccttgtttaccacaggtgatatctcaaatctacagatatcaacacggtttgtcaatatcgtataagtgatgactaccacatttgattaactccggagaaatagcttttttgtgctcgagtgtcaagtacatgtacctacaagagaccaaccatgtaggatcatagattacttcaaaataaagcgttgaatacataattttaatatagttgaaaatgtagtaagtctaaaatatttttttggtgggcaacatctaaattatttgttttaaagttttttcaacattatatatatatatatatatatatatatatatatattagaatggataaaaatatagattccattcattctcttgccaaaacagttgtagcagcagaatttcttttaagtttattcacatttttataatgactgaaaatttagaaaattactttggtcaatcaaatttattttattataaccactgacacttcacacaatggacagaaaaatatcaattttgttttgacgttttcatctgtaccattcgagcaaagaatgattctttgcgtgacaacttcgacaagtttatagaaagtactaaaatccattgcaaaagcaaaaagtttatttttctttgctcttctctttggacgttttcgccatattcgttgttattattctagcaaagactgattctcttgcgatacaacctgtgaaacctttcttaaatattataaaggttttaaaatactttaaaaccatgattgttataaacaacatgtcacatatggatgaacagtccgctggagatattaataaattgtatctatggatcttctttgattagttctcgaaattagctggactatgaaactaaaatctatccatcaaaatatatataccacataattactttaattcaggggataaataagtaatcataagaaaatcaaattcaagcacatatttttgttgaagagttaaccctctcaaagttgttaaataggtaaaatttagaattttctctattataacagatgatggtattaattcatgtattcttttaaccactcaaaactccaaagagattcaagttttatccaaaaatatttgtggagcctatattgctaaaaaggttagaacaatcggtgaataaatatggcagagaaggtggaggtgaccacgatg

SEQ ID NO: 30616 - DNA, 3003 bp, Unknown
  misc_feature (1)..( 3003): 2750-1469P.txt file - cDNA_ID_3033754; gDNA_ID_1974077; Annot_ID_180417
tccgatctaaatgttagtgtcttgaagttgtaactctccttagtttctcaatgttatgatcgataatggtgatgaagcaaggttgcagggacgaagacgacgttatatacacatgtatatacacacttcatgattaggttttgttgttaggtttttgttgggcctataatgggcttagtgagaaattgagtctcacattgaaaccttatattacagataaaatcttagaattaatggatttgggtagataataatatggggcgctatactataggtaaaatcatataattaacaatcaaaatataaatatacaatcttaaacactaaatagaattatttttttaaagaaacacatctcaattcttttataagaagtttatacattataaacgtaaaatggtctctattttcccacgagaacgatcgtatctagccagataaagcccgatctttgacctttgtctgtatacacatgaaacggaagttaaatgcttatttccccaccaattgaaagttcgagagcttaatgtccatgaatcctggtttcgtcggtttagtgcgtaaacccgagacgaaacaatgtttcggtcgtaacttaaccaaaaaaaaaaaacagattacaacctattgtcgttgtcttcataaaaatcaaaatcccaaaacccccaaattcaaattaagaaccctaaaaagctgaattcttaattttgtaattgaaaaccggatttccagtttaggatgagcaacctttcatcgagttcgacgggatcaacgggaccacgtggaagaggaagagtggtcgaagtgccatcaagatgatggtgcgaggaactaaattggtagtcaacataaaattgaggatttaaatcaccaagtacatagttcatgctttaaaccaacgaaaatggtaaactaatgatttaaatgacatttttcccaatgtatatatataataactacccaacactatgaatcatgatagttccttttttctttgataatattaaggacatcaaggcactaacaaacatggcaaccttatgaaagtataaaacaatttacataacaaaaaggttaagaccaattagtttaactaaaaatgaatgttatcgaatttacaaaattatacgtgatttgaagtattccattatatacattttttttgggacaaattccattacatacatgtttttttttgggacaaattccattacatacatgttttttggggacaaattccataaacaaaaaatacttcactttttttctctctctcgggcaactttctaaatctagtttttttttcttctttttttttatttctttttaatcttcacttgaggtttacgacttcaacggtgaatcaagggggagcaagcttccttctccaacaacggtgatgtgtgttattcgtcatgtgacgcatctatggctctttcatggcggtttgagaagctatgatatcgttcgctctgattcgaggacggaggtttcatagacgagtgtctcacggctcatccgccctattggccgctgcgactagcggtggaagttatccgacgacttttttcgtgctatgtttgtcaatctcccaaaatatttctgtatctagattattcttttttggttcattataaataaatatatttaattttaaacgttcatagtgtattttaaatttggaaccaataaaatgggagagaaataacacatgtcaaataaagagatgacatatgtcacaactttagaacatatgttttgtgaaaaacttattttattatataagatatgttggttgtaacaaaaaataaaataaaaaattctacttcacgggttctctcctagtttctttaatgagttatccgaaccaaataaaaacttgattcgaatccggattttattcaatcgaactgaactaatcaaaatttcatcaaaaagtaataaatcttcttaatatatttatatcattgaaacatattaaaagtctataaaataattaggtttttaataaagaaatccagccccaatccaaaagaaaagaccaactaattcctcgccttttgcaatttcgtataattatttcccaatttttgtgtttgttaattaaatctctaaatgttcgctgacttcataaatttggattacgtaaaaaacgactttcattagtaaaaagctgaagaagagtggtgaacatattgtaccacgacccctcttgttctacacatctatcgaaaagcttagagactaacaatattttatgtaagaaagttgtttttttttattctagactttcacatgataacaaaaaatataacatatatctagctagatatttacataatgattccatagtagaatcatatttttgtttgtgtgaaatgattgtaatgttttcctcatcttgaagattcaaatcctttttttcagaagttgtacaaaccacaaccaaatatctttatcttccacctcaaccattgtttaaagaattagctacaaacatttacggttatcttccacctcaaccattgttaacagttagacttttatgaagtcaacaaattcttaaagacaattggcaaacgcaaaatttagtcattttatccaaaattctaaactgaaacggagccaaaataaaattcagttttatttggtgcctaatttataaaatccaataatacgtaacccacaaatctcgaaccaaactataccaaagaatacccaaaattaatatcagatttgaggcacgtgagatacgcctgctaagatacacacagctcgaaatctgagtccttctcttctttttcgccatcggaaagttcttaccttcgatttcaatttcttgctttcttctcagttcgtcacgatcggagctttttgtccgatctcaaatgcccaaactcctccatttagttatcttcccggtagcatctaagtagcttgaaatccctaatatcggagttgctctctcccagaaaatctcgagaggttcaagtaacgaaaatg

SEQ ID NO: 30617 - DNA, 3003 bp, Unknown
  misc_feature (1)..( 3003): 2750-1469P.txt file - cDNA_ID_3033798; gDNA_ID_2213627; Annot_ID_195925
tcttcttctctgctttctgtttctttgtattcaacatgctttccgctgcgtatagcttcacgttctgcctccccgtctctgatttctccttcgtctttcctgcctcttcctcctcctcccctcccattgactcatcatcatcactctcatgctcagcctcctcttccgtctgcgtcttagactcatcctgttttttttttttgtgatacatcatcataaacaaagattaaatccagaccgagtcatttacaagcaaatggaatcacgagagaagttaccaacctcgatcatagtttcatcgaaattgagaggaccatttgaaggaataataacagggttgaattcgttaaccgtcttcaagctcccaatgaaagaggattcaccactgtaaacctcatcgatgttgaaatccttggccagctcagtcacaatctttgactctgcatgtccaccctggtccctctttggcggcattgtatagtatgggattttacctgcataaccattcatattagagacaatgatgagttaagaaactggttttcaaaaatgcttttacgcttcaagtttacgaggaacaaaaaaagatccgcaccttcattccagtcatgcaaaacaattctggcagcagcatcaatatccacaagaccaccctttttaagtttaccccttacagtggcgactttgtaaaggaaatcatcaactgcctcgaagctcgggattttgtagagagtcaccagcatatctttaggacaaagcttgagaatttccttcactatttttttcacaaagcagaagatttccaagttaggtcactcagattataacctttaaaagacaaagcacaaaaataagtgtgattctatcttgagcttatatccaattacctggactaactgggtcatccaacttctcgattcttttacaatttcggagagctatggaagcatcatttcctgatgatttcaacatcacaactccaggacaatccagcaacttcacgtttttgtccaagtgaacctcttgcagagatctagtcagtccaggagtggcaccaacattgacaacatgcgctctcttcagactgttaataagactactcttgccgacattaggcagtccaataataccaactgtgatagatttttttaactgccaaagaacaacaaaggaagatttaattgaaactgaatgatataacttgatgctaaggtaggatgattaaagtttaaactatggaaccaacctcatgacttcttgagtagttcttcaacaatttgataagagtgtctgctccaagacaatcactcgtctgcaacatattgcttggttttgatgccttagatgatttccaacccaagtttgatctctgttcctgggtgctacacttgaaggcaacagctggaaattcttccctaaggtacataagccatttctcagcagcctctcggggaacaagatctggagagagtgaatcagttacaaaaattaattacaccacccagagtaaacaaacaacttattacgtccacgagtaaagactgaatatatgaacttaccaatcttgttcagcagcaacacaagatgcttattgggaccggcttgcatcaccatcctctccatgtcagtacaacgagtgccaagaggatcacgggcatcaagaacctccaaaatgacatcagacaattcaatgactttaactagctccttgtagaaagccctctccgagttatctgtgaaacaaaagacattagtgcatgtaaaggcagagagaaagcacataaacgcgtgaagaaggtatccaaaacaactcacctcgaacattgacaactttaggtaagtcctctatggtctctccttctgtcttggtatcctcatcatcaaccaaaccaagtttcctctttttggcctgaatagatttattaggagagatcagaacacaagcaccactccaaaatacgagtaaatcaaacagcaagacatgaaaaatgcaatcttttatcaatcaatcaaaactcagaacacaaaggaaatagctttaagaatttcgacctgaacttaaagttatatgattactaaatatctgaacatgtatcatagctgtgagttacaatgttaaaagaatgagattaccctttctttgcgagcttctttcttctgttcaatctcctcaagagcacgggcacgtcgaacttcaagggctttaagctcttgttccttgaaaggccagtcattgggtatacctgggtctttctctactcttggcttacggtgaaggccaagctttttagcatcctttgccttcttcttgtggtgctccttcacctttttcaggaccttatgcttctgcttcaaggtcaccctcttactcttactctctgcaaaaaaccatcaaaccaatcaataaaaccccagtaggaatcctgaactgaatgatatgattcaaattcattcaataagacagatccagaatatcaatatgattgaaggatgtatcttacttttactccgtttcaccatctttctcgccctgggatgagagcgacgcaaacagaaaaactgagtaggttaaaagaaaagggtttatggagaaggaagatggacatatcggcgccaaattagggttttgctattagatgtacttggatcattacccgacccgttatagttgacccgaatcaacttaaaaatattgaaaaaataattggggtgagagaggctcgaactctcgacctcaggattactcagatagctatgagacctacgcgctagccaactgcgccaccaccccgatgttagtaatctttactgattatgtaattaacttcaattgacattcgttatccaaagtcataataaccttgacttggaccagtcacctgaaagtcttgagtttttttcccttaagatcccgccgggctccggtgctggcggttaaacccttccaaaacctgaaattcgtttagcttaggacaaacaagtgaagcccaccatacagaaatg

SEQ ID NO: 30618 - DNA, 3000 bp, Unknown
  misc_feature (1)..( 3000): 2750-1469P.txt file - cDNA_ID_3033825; gDNA_ID_2213627; Annot_ID_195912
ggagtctggagaggttatatatatatgctccgtattaatatatatggaagctagttaactaattataatgtagttctcttcatttaacaaatatatgatatattttttaattttattttttcaattggtaaagatcttacgcgaagcttagagatcgtcggttcgagtgacgtttgagatgaaaataatattatatgctacggtttcggggattacgagtttcggctcaaaaactcttggtattgaaaagaaaaatgatatattttttataggtagttgagtggtttcccttccttagagaagtaatgatggcctgggcacacattaaaagtaggagtttcttgtacgttgatgtactttgggatttggttcttgttccttgacttgagctaggaccagcttaggtatcaatctaagccaacgcatacatttggcgaggaatcgaaagtagctatattagtagaatatatcaaagttatctattactctacactgtacgtattgtctaaaattagatcatatgattatttcatgctgagaattttatacaatggctgctattacgtaccccaatatcatgcttgtgcttgggttggtaataccaacttggtatggtatctcatgaactagttcaactatctgattttagatagttttgtggttacatgcactggatgcacacatgcatgacatgtaaacaaaagatgcaacattctgacgaaatttaattcatctctaagattatagtcttatatatagacctaacatggatagatctttttttggacagaagaattcggacctgaaattgtttttattgaaattaagctaagttataagaaaacttaggtatgtaagtaaactaaaattttaaaattaatttaaaagatgaattttgaagctaaaattaccctcagggacgtgaacaattttttttttttttttctctcatcatataagcgaagaggaatgtaaagtaaaaggcctatgagttaggacatgttccgaaaaggtaaaaaaaaaaaaacaaaggtgagaagcttcggagaaggtaagaatttagaaaggtaacaaagtgactaagcctatatatagaatgttgatacttaaccaccaagcagtgctttcaagctgtcttaaagtttgggacacaaaatactaaaaaaaaaagagagaggcatatgttttagtgaaacaaatatcttctttcttcttgattataagcatatatatcgagctctgactgattctttcattgcttttgtatcgattcgtgcctagtaaagcttcttctttctaacatatattcgtttttcttttccaaaagctttgtataaagatagtgagttttggtttcgattatttggagcatatcgccctataataataagaacgtacatgactgattatttggcaaacttatgattagacacctcctcaactttctctagtgaagtaataaattatccaaaaggattcatagtaaatgtaattagttcataacaacaacatgaacgagagtaattgatatagacaacagaaaaatcatatcccatgtttgggtttaacctggagaacaatcttctcgccttccaagacacttttatttgaagaaaacgattatccttatctaaatatatacacacttttggtttaagatttgaccaatcatatgcggactaattcttctacgatacttatacaggcatcacaatcaatcttctcataaggaactttatgcaagcccatgtgaaaattatacttactaaatttttttttaaggagtaagcttcttcccttttttctgtggagactcattgattatgcatttctttgtttgagattcattttggaataaggtgaagtaatgtaaaaccataattatttaactttttacaagaaatatccactgtttttgtgtttctttgatatataacacaaaccaacgattgatttatcattgtcgtatgcattaataaggtacgtagagaaaaacacacataatattcaactcgatagacttgaccaatgaggattatatttattgaaatcacatagaaaacacgtactacagagacgaaaccggaaaaaacaaacaaattttcttccaaactactacgtactccaagagctgaagagaagaataagaaggtgatggaatcagtcacgagtctcgtggaaccttttgatgaaatcagtggatctccggttaatagctggttcaacgaggtaccaattatagaagttggcttcactatcttcaccatacatctcatcgtccgttcctgcctggttcgatctctgtctccgtcgccaccacgctttgaaactgccgaagaagctaaagaagaaacgccacgaacctcccattatgatgttttagagagagggatgtattttgcgtgtgtatatatatctaaagatacagaagcatgtgaaggaaggtgtgtctgatggtttagggttcaaaactcaaggtccttttatatataagcctgaccaagttggaatcctagaggaaccatgcacgaaacaccccctaccaaccattaaaaaagaacttttctcttctaaacatttgtatattattcacaaagaataaagattaaaaaagcatcgagatattatgtgtcgctagctgcggttattttaatcattacatagacactggtaattccatagcaaacattgaattttaagcttttgaggcaaatgaattgatatgaatttctaaagttcctagtttctttgttcctactcttttattcaaaccgaataattcaatccataaccggaataaatcgattcttttaaccgttagacgccttctttgttctttaagccggtttaattaaacgggaagcattcttcttatgaaaaccaaaaacggcaaggtgtttatcgaacaaatccagagtaagagtgtgtttggtcatctccaggtcagctgggtgtagaaatcgagcgacggcggcggagacgacggagatgaacagaatg

SEQ ID NO: 30619 - DNA, 3000 bp, Unknown
  misc_feature (1)..( 3000): 2750-1469P.txt file - cDNA_ID_3033833; gDNA_ID_2213627; Annot_ID_195910
gatgttacagaactagtgatggaaatgggaatttttgggatattttggtttctttcgactattgaatagctaatttgttttcctctgattgaaaattttatgtatgagtgagccttgagccttcaggtttggaagcacgggtcttttttatgatctttttggtgctgttactaagagtttcattaatcccacaggctctgtgatgaccgcagcatttggtgaaaattcaatcagatcaaaatttgaaaatgattctgagggtgttggagggttctctcttcattttccatctgtaaattccggattcatggctgatgccttagggcgggcatcactcacagctcaatatggaaacttccagaaattcttctttgatctcacccgtttccatgctagattagactttccgcatggtttgaggtttcttaccggtgccactagcgtcgcacaagatcttttaaattctcggcagcctagtttagaagcatttcagaaaatctgccctgaagtattagtttctctacagcaacaggtaaaataaacgatattctactatgagcaaacagtctaccagacacagaaattctcaaattcatagtttcagctacttgattcataacaatcttctacgggttttgcagattgttggaccgtttagtttcaaagtggagtctggaattgagatcgatctgaggaacggagctaaccctgtgactgtagataagacagtatttgctattgaatatgctcttcaagtgcttctttctgccaaggctgttgtttcgtactccccaaaacagaatgagttcatggttgagcttcgtttctttgagacatagtatcaggattttccactcaaaatgtcaagcttgatcctgtgaagattgtagtcttgcagagaagtaaatactaaatagacaatgttctaattgttcagtttcttatgtcaaacagaagaatgtttcaatagaagggaagtttacattttgttatagtgtgatgtctaccagaactagtaacaggacaatccaatggaagctttagatgatcttccttatacttaacagacacaagacaaagaccatgaggcgacgcaggcaaactagtatactttgcaagcaccctcctgtctttggtttcgagaatcattgggacaatgtctgaatccagtgcttcttttccaatctgaatcagcaaagctacctgcatatgtaaagaactttagactaaaaaaacattatatcgccatgtcaagcatgtaaaagagagtgtagaactaaccatgtttctgacttgtctgtacaaaaagccagaaccttcaacttcaagctgtagaagagatccctaaacaccaaaacaccaacaaggtcaaagtctgatccttaccctaacttctccagaactaagatctttcttctttaccatttgaatgacatcgaagcgagatatagttttcaaaggatcaggtactccatcttcccgagtagcgttagcaaatgcagagaaatcatgctttccaacaaaaagatttgcagcttcccgcattttagaagcattcagtttataagcacagtggtaagcccaatgacgctggaacgggtccatgaaagtgtcgttgtatatctggtagcgataaaccttgctagaggcagaaaaccgagcatgaaactcaggaaccgctgcactcagctctctgacacggatatctttaggaagaagaccgttcaaagcagcgtgaaagctatccaaactagtatagttgaaaggagtgacaaaatgagctacctgaagaataacggatgatttagtttgtgttgagaagttgagaaagagagagttgtgactttagtcaaacctgaccccaagcgtgaactcctgcatcggtcctgccagctccaataagctgaagctcttttctaccgagctctgtaatctgaattaaggctttttctaacattgattggatagttggtggtgactcctgatactgccaacctgagaaaccaaatgcgcggatataaggaaacaagattttgatagatgcatcaaaaacttaagaacacaagttttgtgagaagacgaacctgcaaaacgggtgccatcgtaggctatcacaaggcgccatttataagcaccagaatcactaacctttaccgaactgttcaagttggtcatctgcaaaaataaaacaaaagttcagattacatcaccaacaaaactttcttggcatttccaaggaagtagagaagaagaaattgcttttgtggcgcttacggagatattctgaggagacgaaagatacccattagtaaagagtgaaggaggaagtgctggtgtaacgcaactcatcctcttcttcttcttcttcttcttcttcttcttcttctttgtttgctgccctgtctctctgtgtaatctcaagattctgattagggaaagactttaaaacggtgcgtatacggttagttagggagcggtaaattggtcagaccggaccattggttattagattgatttggtttaatgctactctaattcttaggttctttctaaacgcatcgttttgatatcacccttttctctctgaggccgtacgtggaagtttcaaactctcaccatctcctctctctctctcggtctgcagaagaaaaaaagctcggcaattttatattttcccatcgaagagattcccaattcttgagctttctcaatcaggctggcgtaataaacggtactccaatgtcttctttctgaccctagatttaacctggttcagttcgatagtagggtttgtttcccccttccgatcctcatttctgatgtcagaattgtgatctagtattcaatttcagattcttttttggaaattagggttcataacttaatagaagtttttaaatttcgtacagtggccatggcgttggctgattttgataaaattgtgtacattgaggtgtgatatagagcctgatttggttttataggtatcgtttggtcatg

SEQ ID NO: 30620 - DNA, 3000 bp, Unknown; identical to SEQ ID NO: 10151
  misc_feature (1)..( 3000): 2750-1469P.txt file - cDNA_ID_3033837; gDNA_ID_2213627; Annot_ID_195909

SEQ ID NO: 30621 - DNA, 3003 bp, Unknown
  misc_feature (1)..( 3003): 2750-1469P.txt file - cDNA_ID_3033841; gDNA_ID_2213627; Annot_ID_195908
ccttattatgctggcatcactcggctttcagttgcagaatctcctttgctgtcctagcccggaaatatggcatttgttcctgtggaaatcatacaaacagtttcaattataagcagtcttacgtctttcaaaatgacactcacctactaaagacaatggcaggtttagtatctttctgctatttacctgagtgaaacaaagatccagacctctgctatagaagtcgatgtatttcaccataaacattccacaatcgaatctacaaaaatcggagacaaagttattatgaatgtatgaactagtagtagctgacatcttttttaggaagacagtacccatttctctgcattggaaggtcctggacaaattcttgtctccatcgacttacatcaaggtctacttcactcttatccctcacttcatcgacaaagtatctagcctgacaaatgaaaaactacagaatcaggatatatatgttatgacacaaaacatggtttccttactcatatattaccagtgcatcgaggattttaggctcccttcctttgaaagagtcaagatactggaatttctggtcctttatattaattacagccaaagtccagtggatgttcatatggatagggataaatatctgaaaacaaacaaggtctcttagatggtaaaatgaaaaaaaaatgtttgattatctcaaaaaggagtttaatacagagagtggtcgcagaagaagcacacaacaagtttaccttgtcacagtctttgagatggtagcccaacctcttcattgaagtccatcttctcactgcaccatagttgtatccagtcgccgaattaactaactgaggtgtgatttaaggtaatgtcttcttgttaatattcatgagcatatataggggctaaaatttaaatttcattagccatagaaatgggtataaccttagtgaagaaaaatgtattgaaaaaatgacatttaagaaacttctttggttctctagcttccctttctttcagcaataccatataaagattaatgacctacatagaacaaagtccaaggtttttaccaaatcatagaggtcctaattagacaagaaaattatattcaatctctaagaagaaatcacgtgagatttagatgcgtcgactaacctcatcgttcaaccatttgcctggtttaaggcacctcaagattttcccggtaatatcaatatttgagttcttatgagtaaccaagatgtttctgcagcgagagacgttcatacaattacatcacaaaaacaaaaatgaaatctcagagcaagtaaacaagagagcaagaatcaaaatcatacgaatcattagctgagaatgcacgcctgactgctgtctcctcctctctagaaagaggtacaaatgcctcacgttgtacaacctgaaaatcaattatagaacaatgaggcaccccgatttcacaaaatctaaagaaaccgaccgattcatatcacaaagcatacacgcttaaactttagccacacctctactggttcttcatcttgtctccaaaaggaagacaagcttcgtagtaaagcacgacctctctctttaaaaaaatcaacaaagcctctgtctttcagtttagaagtccggttcacagcactctcaagaacctttctgtatgcttcaaaacttgtgacatcagtcacagggcgattcacaacgagtgaactactattagctttagaacattcacccaccctcaagctcccatttttcagactggcaacctcagaaaacaatccatttcccatctccgccttctcttccacctcgtccacctccatagccacgttttcgacaccctccctacttgtatcatcagatatcatttcaacatctccaagctcatcatcaacatcaattacttctctatccgttctatagcgtaaagacgaatcaagtgcatttcttttccacatgtcattgttccttgtgagaaaggttcccaacacattaccagaaccttgtcgtgtgctacgatctcgaccgctattgagtatccgcacaggcgcatgaacttgtctccgcaacgaagatttcacttctgggtaacggtaaattcctggagccatgggtcttgatgaatgtgagaaaccggagtgtttacaagggtttaaaccggcgctccgtttgtggtaaccatccatatccattggtctgaaacagtaggaaccataaccctcgaaattcaaaatttgatcccacaaaactgaaaggtcaaaatcccccaattcagagttcaaaaccctagattggtttttcatgaaataactctcgggaagcaagcaagtttcaacttttcattaaactcactggcgtttccgatacacagattcggacccggacatgagacccgggcgggttttgttttggaagagataggtcaaactcaaatatgttgacttatctcataccctctagccgaaagggaggtttctgggtcatgttgtttcttactcggctaaacctatgttttttcttctcgttaaaccctctctgctctctgttctcctgaaagctgggcttttcacttcagaatttccttaaaaataaaagctttgatctttttagttattatcttcttcgatcgtgttaaattttgagacaaatcggtgatttggaacaggaaaatcaggaagatgcggatgctattaagaccaggtaatctgtgtatgcgcatttcagtttctgaaaattttcagtgtttaatctgctcgattttgagctgaattctggtcgtttcttcatagtattgtagcctggaggttgataactcccatatgaactattctatggtgggattcgctagaacaaaatgttttttttttttttgtttatccgctcattagtttgatcctgatttgcgttatttttgtcttatcactgcaggaattatattccatacagatacaaaatcatctcgtgttgtcacagtttgtaagaacttatcatctttatctgataatg

SEQ ID NO: 30622 - DNA, 3000 bp, Unknown; identical to SEQ ID NO: 10147
  misc_feature (1)..( 3000): 2750-1469P.txt file - cDNA_ID_3033845; gDNA_ID_2213627; Annot_ID_195904

SEQ ID NO: 30623 - DNA, 3003 bp, Unknown; identical to SEQ ID NO: 25272
  misc_feature (1)..( 3003): 2750-1469P.txt file - cDNA_ID_3033892; gDNA_ID_2213619; Annot_ID_180909

SEQ ID NO: 30624 - DNA, 3000 bp, Unknown; identical to SEQ ID NO: 9740
  misc_feature (1)..( 3000): 2750-1469P.txt file - cDNA_ID_3033896; gDNA_ID_2213619; Annot_ID_180906

SEQ ID NO: 30625 - DNA, 3003 bp, Unknown; identical to SEQ ID NO: 25275
  misc_feature (1)..( 3003): 2750-1469P.txt file - cDNA_ID_3033900; gDNA_ID_2213619; Annot_ID_180903

SEQ ID NO: 30626 - DNA, 3003 bp, Unknown
  misc_feature (1)..( 3003): 2750-1469P.txt file - cDNA_ID_3033918; gDNA_ID_2213619; Annot_ID_180896
caggaagcatcgcgtcgtctcctcttgcgttgtatcgtttcagaaggaacggttcatcggagaggatctcgatgaagctttgttgatgatgatcggagaagaggtggttgtggatgtaagagaaggaatggagagggatacagtgttgtgagattaaagcgaaatagagattgttaggatcgtcgaggattgcgtttgctagtaatcgtcgttcggcggagattaacgtcggagaagctcgtgcggttcttctcgccgggatgaacttagcgttgattgatgaagaatcgagaagaggagagacggaggaggttggatctgcgtggatgtaaacgttgtagagatcttggtgaccttggaagaagctttcccagagaggtaagaaggttagatcggagtttgttaggaagaggaaagcgatctttgggggtggatttggagagagggagatgagacgacggttgttgttggtggaggaagagacgacggcgcggtggaagagagagaggtcgtctaggtcatcggcggtggaaatgagggtagaggaagagagaaggatgtgtggtgagaggatgaagaggaagaagagaagagaaagagagaggaagagagatagagaataaacgagtgtagaagatgagaacatctctctgtatacaacaacacagaatttctctgaggaagaagaagaagaagaagaagaagattgattgaaatgaatgagttagaaaaaattctgatgtgacaataaaaaggaaaaaggggaataatgacgtcagcaaaatggggacacgtgaaattatttttaaaattatttgggacaatcgacacagttgctctatcgctatttgtttacgtggggctgttctctctctatttatataataatgagatacggttttttcagcaaccagattttaaagttatctgattaaatctaataataggatagagatagagtcacagagacatgttgttgactttatgacattattttattctttgcttatccactcagtcatcatttatctcaccagtcagacataatgtgttgttgttgtgaatttgtagatgcttccgactatacctgattacctggccattcagaatcggtttggatcaaaaaatttgggttttcggtttagaaatcgaaacaaaccgaattagttgaaacgaaccgaatagaaattcggccaatttggttttgcattggcgtgtaccttgtgactacatgtgtgtgtgttagatgagatctatccacccatttttcaaatcatttttgtcgttaagctatcaagattctgatattttcctgctcacttttgattcccaaaacaaaaaactttcttcaattattctattcatcttctcatggcggctctctccaccaccttctactaccacccactctgcactaaccaccgtacaaagagacaagcctcaagcagacacggagttagatctatgagagtgatgtcttgtcggaagcagaaattaccagaagagaatgaaggagtgatccagagaacattgagaaggatgatttcagaggctgggaagattgggaagaatctgaagccagagaagaagaaaggagacgtcaaggacctgatgcttatgagtctctcttttgctgtttatgtttatatctctcaactattggtttgtgcttacttctcctggcaacatctcagcttccccaaatcttcatggtagtagctaagctagctcctccttgtaaattctgcacaaatcagtaataagataagaaattcaattccgacataggagaattgagagttgtgatctttcactttggtcttatataattgaattgttaagcttctcatacctctttatctgctttaactccggcagaaaaggcaaaccaaccattgcgataacactatcaaccagttaaggctctttgttttagagccgaaaggagatgcaagagcctcgggcagagtcgctgagtatgccttgaaaaccaaaactttgaccgtaattgttagaaagaaagagagattcctaaccatttcgtattggcctcctccaatttatcctccttaaacagagagccccatccattttccttctgtgtgctgcaccaaacctttcctccatagtcatatcactgcgagcttttccctgtacaatccaacctctaagtcagctataagcaaagagcttgggataaaagcttggttgtggagtgttcaggtaaggaaacaagaatcagcaaatgatcttaaagaaaaaacgttcctcctttgtttcatcaaatccaacaacttcagcgtcatctaacaattccgctatagatggaacattgggaaaaagaagagtttccatctctcctatatgctaaattcccagcaaacatgcaagagcgcacgttcaccagacttgatgctggaaacaccaatagctaaaccggccattacttgtatctctgttcatagaggacatttcactccttagtttttaatcttgtttaaagctctgtatactaacataaacatgcatgaatcagctttaaagcaacaaaagaaagaaaggaaaactcaatttctttcctcccaaatattctttttcattaggttcacatgaaacgcaagatttaagacctcagctttactatcaactttaggtaggtaagactacctaccattttgagaaggctcacaatgcaaaaatggaactcaccatccttgactgattcggtttcagctccagcaaaccaaagtgtttctaataaacttggccgtgcattgaaccacggagttccaaaatcaatgtctgtttaaatcattggccccagaatttgaactacacacagagtcacagacattcattacgatggttgaatgaaatggtcttgactaagaagtaagaacaactatgcacaattgagaaactattagctcgatttccagaaactatcactatcgtaatataaaagtcccaggatcgaccaaatcggacgagaaagactcaatg

SEQ ID NO: 30627 - DNA, 3003 bp, Unknown; identical to SEQ ID NO: 26543
  misc_feature (1)..( 3003): 2750-1469P.txt file - cDNA_ID_3033924; gDNA_ID_2213619; Annot_ID_180892

SEQ ID NO: 30628 - DNA, 3003 bp, Unknown; identical to SEQ ID NO: 26544
  misc_feature (1)..( 3003): 2750-1469P.txt file - cDNA_ID_3033930; gDNA_ID_2213619; Annot_ID_180890

SEQ ID NO: 30629 - DNA, 3000 bp, Unknown; identical to SEQ ID NO: 10017
  misc_feature (1)..( 3000): 2750-1469P.txt file - cDNA_ID_3033943; gDNA_ID_2213619; Annot_ID_180883

SEQ ID NO: 30630 - DNA, 3000 bp, Unknown; identical to SEQ ID NO: 10037
  misc_feature (1)..( 3000): 2750-1469P.txt file - cDNA_ID_3033947; gDNA_ID_2213619; Annot_ID_180882

SEQ ID NO: 30631 - DNA, 12 bp, Unknown
  misc_feature (1)..( 12): 2750-1469P.txt file - cDNA_ID_3033969; gDNA_ID_1974083; Annot_ID_180484
agacggaagatg

SEQ ID NO: 30632 - DNA, 3000 bp, Unknown; identical to SEQ ID NO: 9835
  misc_feature (1)..( 3000): 2750-1469P.txt file - cDNA_ID_3033973; gDNA_ID_1974083; Annot_ID_180481

SEQ ID NO: 30633 - DNA, 898 bp, Unknown; identical to SEQ ID NO: 9833
  misc_feature (1)..( 898): 2750-1469P.txt file - cDNA_ID_3033995; gDNA_ID_1974083; Annot_ID_180461

SEQ ID NO: 30634 - DNA, 3003 bp, Unknown
  misc_feature (1)..( 3003): 2750-1469P.txt file - cDNA_ID_3034033; gDNA_ID_1974085; Annot_ID_180531
catgaataacctttggataactattatgtatcaaattatttaggccgtggtcaacgaagattccaacgaggatgtcctggaattacgccgtcaaatccgacttttaaaggcgtgtaacattttaaactgccgttaggtgctcgttatgtgaagctgtaataacgctaagacaattttttgtgtctgcggaacaggaagagctttccctcctcaagcgccagaacatatccagggcgttgtcatttggatcagcaacagccaacttcgcagaatcacaagtcgattcgccatcaagtgtaatgcatgagacaggacaacagcaggctggtaacttgcttgtgtatgaatctggaggctgtgtaaggatgtctagaaagcaggtatatcaacttgagaaagtatgttaggctttactgaggattcatatgcctctgtcttgggattccactaaaaatctgtatatgtttatatatcagttgaaatctttggagataacacttgctggctcattaagacgagaacatgtggctgatgcttcaattaagaagcttgaagcggagatagagcatctaaaccgtttggtaattctttttcacctacactgttcccattcccacttatgtttcagatatcgcctgaatccatttatgatcatttaactttaggttcgacaaagggaggaagatactaggagcacaaaaatgatgctcaggtttcgagaagacaagatacagaggctagaatcacttcttggcaaccatatatctgcagattcttttttgctggaagagaataacgtgttgtcagaagagattcagctgcttcaagctaaaattgataaaaatcctgaactgactcgctttgccctggaaaacataaggctactggatcaacttagaaggtgataaatcttcaaaaacatgtgatgccgacgttaaagataatgtgtgcttttttatatataaaaagttttgttattatggtacttgcagatttcaagagttttatgaggaaggtgagagagaaattctactgggcgaagtctcaaatctgcgaaaccaggtacctctagttagcacaacatcctggtatcgattcattcttcttttcgattgcaataccatccttaaccttagctattgctcatgcagctcttccagtttcttgatgaaaactctgactggcaaaaacatgttgatgatggaatagagccacaggttacatctatttacctctttctatatgttaatatctcttaatatccagcaggattgtgcttcattggttgcttgtcaataatatcttgttgtatttcgtatggcacagggtgcatcacgtatgagcaaagaaaattgttctctacaggaggaggtcgagtcactttctttctcttgtttcttgtgcatcacgtattttcaatttcattttcttaacgtcttttccattgcagttaaaaaagacctgttacgagcttgagaaatgcagaagtaaccttggttcttgcctggaagagaatgcaaagcttagtaggttagcaaatctgatttgatgattcttgggtttttcctggtatatggccaaatgagttctcattttccccataccctgatgagtcttctcgccattctcctgcagagaaatcaatgatctacaagctatggtcagcgatatcagagcttgcacacctgatgaacatagcagtgtgaacaaacaaaaggtttgaacaataagtacaatgtgatttactaatctgcccaaccatctgttttgttgtttctgcaggttaaccttgagcgtttcacttaacagttgaattttgtaaaaaaattgtaggcgctgttggggactcaaaattttgagccgcacgaaacacttgcttgtgagcaggccaattatgtcgaagaaatcatcaaactgcagcttgatctggacgtacaaaaaattatacttgatgaggaaagaacactacgtggtgatacagaggcacaagcagttcgcttaaaatttgatattgaagtgttgaaggaccaactacttttgataagcaagcagcaaaaaaatgtttatagcgagctgggggagacaaagtctgcagttgcagctctcgaatcgcagaacattatattgatccaagaagcagtggagttgaggagaataaaggagaactattttgagcttttaaaaaagcaagagcttgatatcccagcaatgaagtccaaacagtgcgatgagttcaaagataatcctgcagaggacagtgaaattgatacaaagtttaagaagatgcaagcatctcttgaaaaagctaagagattgaacatgctgtacaagagtgatatcgcttctaaggcatgtggagatgaagaaatggatgaagtttgcaagcaagctgaagctgcaactgctgaggtgattgtctgtttgcagaatgagcttgaagttcttcagaaggaggtcaatgatttccagtcaaaagaaaacgtgactgaaaagcaggtagagattttagaaactcagatggaggagctgcaggataaattacgagacacgaccatggataatgagcagttgcaagaacagctcagaggcaaagacatggaattactgatcatatcaaatgaaatggaacttctcacatctgagcttgaagaaattctgctgaatgggaatgaaggccttacagatgcgtgttaccaggctgatcttatttcgggttccttaccagataaaaggatatggatatctgaacaggttggaggattaataagaacactttctgagagggaattaatgattgaagatcttgaaagctgtttggaggatgccaataaaaagcgatgtgatatagaatccatgttgaagtctcttaaaggggcagcaatagtaatgaatgaagcgcaccagagagagttcgaggaaaaggagacagatgttctcctcctgaaatcgcagttgtgcacaaaaacagagacaatattaaggcttcaagagaagctgaagatg

SEQ ID NO: 30635 - DNA, 3000 bp, Unknown
  misc_feature (1)..( 3000): 2750-1469P.txt file - cDNA_ID_3034041; gDNA_ID_1974085; Annot_ID_180525
aagtgtgccggtggaggtggcggtggttcaaacccatcaccaaaaccaacaccaacaccaaaggcaccggagcctaagaaagaaataaacccaccaaacttagaagagccatctaagccaaaaccagaagaatctcccaaaccacaacagcctagtccaaagcctgagacaccatcacatgagccttctaacccaaaggaacctaagccagagtcaccaaaacaggaatctccaaaaacggaacagccaaaacctaagcctgagtcaccaaaacaagagtcgcctaagcaagaggcaccaaaaccagaacagccaaaacctaagcctgagtcaccaaaacaagagtcgtctaagcaagagccaccaaaaccagaagaatctcctaaaccggaacctccaaaaccagaggagtcacctaagcctcaaccaccaaagcaagagacaccaaaaccagaggagtcacctaagcctcaaccaccaaagcaagagacaccaaaaccagaggagtcacctaagcctcaaccaccaaagcaagagaccccaaaaccagaggagtcacctaagcctcaaccaccaaagcaagaacaaccaccaaagacagaggcaccaaaaatggggtcgcctccattggaatcaccggtaccaaatgatccttacgatgcatctccgattaaaaaacgtcgtcctcaaccaccatcaccctcgacagaagagacaaagacaacgtcgccacaatctcctccagtacactctccaccaccaccaccaccggttcattccccaccgccgcctgtattttcacctcctcctccgatgcattctcctccaccaccggtttactcaccaccacctccagtacactctcctccaccaccaccagtccactctcctccaccaccagtacattcaccaccaccaccagtccattctcctcctccaccggtccattcaccaccaccaccagtccactctcctcctccaccagtccactctcctcctccaccggtccagtcacctccaccaccaccagttttctctccaccaccgcctgcaccaatctactcacctcctcctccaccagtccactccccgcctccaccggtccactctccaccaccgccaccagtccactcaccacctcctcctgttcactcaccgcctcctccagttcactccccgccgcctccagtccattctccaccaccaccagtccactctccaccacctccgtcacctatctactctcctcctcctccagttttctcaccgccaccgaaacctgtaacgcctctaccaccagcaacatcgccaatggcaaacgctccaacaccttcatcatcagaatcaggagaaatctcaacaccggttcaagctccgaccccagactctgaggacatcgaagcaccatcagattcaaatcattcaccagtgttcaaatcaagtccagctccatcaccagattccgagccagaagttgaagcaccagtaccatcaagcgaaccagaagttgaagcaccaaaacaatcagaagccaccccttcgtcatcaccgccatcttcaaatccatcaccagatgtaactgcaccaccatcggaagacaacgacgacggcgataatttcatcctcccaccaaacattggacaccaatatgcatcgccaccaccaccgatgttcccaggctactgaaccatacatttttaatattttacattttggtccaacatttttccggttaacgcaatttgtaacaaacaaaaaaaaagatacatttataatttgaccatttgtaatctgtaagtagatgatttttagaagtgaatattttcaaaattaaccattaacatatctgtaattctaagttttatacttttatagtgtaaattcatcacattctttgtgtctacttctctcaaaaattgtcttttacaaaaataaaaaaaaaattgttcaatgttcaaagtataaatatccattcatattttcgcactgtttttaatatcaacagaaattttcaactttattttgacatcttagaaaaatccttaattgagaattgaaatattttagtttatttagtggtcaacgtcaacgtgacttagatcgttgatttatttttcgttttccttaagcaaaaacctatacttttatttctggtctttattggcaactatcacattttcaactttcaatatttcgactcatcaatcaccatcttcgaatagatattttctttgcccgatgggctgatcggaacaatcctctgaaaaaggtaccaaaatgctactatgtagactaacatcaatacttagatgttggactactttaacctaagcttaaaatattttccgactagttaaccaaatcgtttgttcatatcatggtcaagtaaccaaatcgtttgttaatacttaatatcatggtcaaataggttaatatccaaaacgattccttagtttggaatagaagtacagtaataggtaatagctaaactccatctatgttcaagattaaaataagaatagtgttcagctaataaacaaatattgatgatttagttcaactttcaatattgatttagtttctatggtcttattcctaatacaaacttcgactgtaattttactatattttcaataggtgtttttttttttaataagagtgttaattacttcatgacccgaccccgacagatcctctgaccggcttaattattattactcgttttaaaaatcattcaacgaggaaaagtctcggtactttgagcggtcgtcgaagaaaacgttgtagttttagtatcttatatcattaacaaaaacatatgcatataaaaacaaaacaaaatcgatttatgtatcctaataatatattacttaaaaaaagtagtggtgtatataattagcacattttcgttgtagatatccatccaaagtccaaacacagcataaaagtagctctattgactttttttcttcctccaaactctttttacgtcaagcaatg

SEQ ID NO: 30636 - DNA, 3000 bp, Unknown; identical to SEQ ID NO: 9839
  misc_feature (1)..( 3000): 2750-1469P.txt file - cDNA_ID_3034045; gDNA_ID_1974085; Annot_ID_180524

SEQ ID NO: 30637 - DNA, 3003 bp, Unknown
  misc_feature (1)..( 3003): 2750-1469P.txt file - cDNA_ID_3034059; gDNA_ID_1974086; Annot_ID_180563
gataaaacaaaagggtagaattgaaaaggggcatcatgaaaacggcagtagaaagaatttttctaattgtaactggttcaagaaagatattttctataatgaaagaaatcttataatttttttaaaaaagttacctaattaagaaaatctctctataaattaataaatattaatttattgataaattaatacctctttaaattaataaaattttgcaatcccaacattattaatttatagaggttttactgtatatgcttctataaatttgttatgaattattattgcctgaagaaactacatagtacttatgtttggctttataataggttttaaacacaactcgaaaatcaaatgggactatcttcgaggtctgtggatcaaactggtctaattattggtcaacgactttttagttttttattacaacttacataaatatatttacatatatatatatatatatatatatataatacatctaattctttataaataagttatatatatatataattctacgtaaaatgtaaatatatcgtatattaaaaagcattccaaaaataatttatttttgttgccaaatccaagaaataaagttagttttcttataagaaattagaaacgatgatttgttctaaacagaacgggttttaaaacaataaaaaaaaattatctttcaacctggagaggttaaaagttaaaacaaaattttctaggtacattaaacatttaaaattcaacataattatatataaataaataaatatgctttaatctataataagcttacaattttaatttcaaataatttaatgatttatattatacaaataaagttgcaattagtcatttacaaaattaagcatatatatttgcagtttcaatttaaaaacttataatatatgagaattggttagtgatgaaatgtgataacacgtcatttcacccgttttacctattgtttttttttatgttttagggagaatttggtgccattttagagctaaggagatgataaacaagtattttgggagtcaagaaagttttaagagttttagagtaaaaaagacgaaaagacgaacaattcttgtttcaagacaatttatgtacttcagaattttgtcatttgttggagacctccacgtgcatcaaatttacatatcagtgtttatggaaatttagtagagtcaagatttacttctatttggaacgaataaatctataaaggtgttcggaataatacgacccggagaatgaagacatatgcgagactggctgtagtgcgaagcaaccgttctggagcctcaaggtcagctcggttatgaaggcccgtacccgggcagtccctcacacttcccacatgtcacttgaccttgccacaagtccagaactcggccaatcacttacccaatcaacgaaattgacgtttttacccctaaactgactccttggtgtgctttcttcttgtcttcatcacaagcgaacctagctgctgccgtgagcctcccagctgccgccacacctctccaagcctggaaagacaccaaatctctatttttctcttgttttgtctaaaatctactaaggtgaagtcttaccttttatattttacattcaaagaagtaatctctaaactctatttaagtcttattcatctctttcttatggtattatcaaagcaacctttgatgagttacttaaccatgctagagtaatcctctacttgggtttagagggctaatcaaagggggatcgatgatcgtttgtctctaatgcagattagagaaatcgccatagagaaaatatatggttcttcatgcttgacaaataatagtatagtagtatcagggtcggcttagagaaaagtggaatcctgtagccattttaaaaaatatatttatctcgtatactatatatactatatgtatagatttgggcattttcgtataatttcttataccctagtttcttaaagaaatctgactaaaaaatactggactatgtgcaaaaacaccctttgcacaccctctcagccggccgtaagtatgttgtattagatttctactattttttagtgtttaatcctcgaaaaataattttggatctattatattttattttttcatttttaatgggctttttgtatcagaattctgtttaaaacaaatggacttatgatccgcagacttctgctccaccaatttggactaggcctataactgtagcaaaattaatgttatagtatcatcccaccccaaggtttgattgaagctgatagaatttcaaaacaacggaaatattgattgactttgtcaaattttgaataaaatgatacgtcaaacagaagaaatgtaaatttgagaaggctgaaccacccacagatttaggatagcggtaagaaatcaaaaactttgaaagcaattaaacatgtaaagaaataaatatattttaaaatactgtagaatcctagttacgtaggtataacaacattaaataaatgaggtttcatcaaaggtgcaataatctcagattatctcaataatttttgtaattatcgtcaaagctaaatatgttgtatatatatgcatatttttaatagatttattacttcattaaacagctcaccataagagggaaatagtacttgagcaaaaataaaaaataagagagaaagagtatgtaacatatggtaaagcctctactagacagaaataaaaatatataatagtaacaaattataattaacgttacaaattacatattgaaccaataagcagaatcaagaagatcagcccacaggaacaagtccgtgggtttttaagtttcaaattatgagggcatggacttttctatcagcatgtcatatctctacactatatataccatatacgtattgattctcttttcttacacataacaaaaccaaaagaaaaaaaaattcatattgaatagtaccctgaagattttatatatagagagtagaaaggatcaactgaaatg

SEQ ID NO: 30638 - DNA, 3003 bp, Unknown
  misc_feature (1)..( 3003): 2750-1469P.txt file - cDNA_ID_3034070; gDNA_ID_1974086; Annot_ID_180558
accaaagatatggcccggttttggcctaattcatgaattcgaagcccatattatgaaatatatgtgggttgtggcgacgaggtaattttattgtggtatgcggtgaccctttttccgtgacaaacaaatgaaaacttacaaaacttaaggttctagattcggatggacccagcaaatagacaaacgttgccgtctttttctcgagacaactgtaccttgcaaatagattagtagctgttgatgaaagtcactaaattaaattattcatttttgcagattaataaaaaaatattttgttgtaactcttgtcttcgttttcgctttattttattcagtttatttggtcccttgaaaattacctttggtttaataaaatttattttaaataaactgactaattaaaaaaaaaagaaaaatgtcaatcctaacttttaaattatggctacatatataaaatattcacatgtgaagctgatttataaagatcataatttgaaaattgagatattaaataacattttctcaataaaaaatcatcataatacttgataatagtttttattgttttggatagaagtggatattcagttattcggttcaatttggttctgactattcaaattttttgttttcaataacaaaaattgatctatttgaaatataattttattttggtttgatcgatttgagttttgattcggttttttattaaaaaaaacttatagctaactagtttgagataagggaaaaaccccgaaaaaaccgttatctaattttttttggccgtttaatacgtgtagtattaaatttagaataaaaatactttatttaatttcgcttgtctttaaaaaccttcatttttaaaaaattggtaaaatcgtatctccgacttaacgattgttaactatgccaacggaaatattaactgcggttaaaacttaacccatgcggtttatgtttatatatacaatctattttcaaaattttacgattaaataaagtatttttttcaaatttaatagtaaacgtattaaacagcaaaaaaaatttagatggcagcttttttgggttttttccttttaagataatattaccgatttttagtcaatatcagttaaacagttcgcctttcaatatttgattaagactaggggtgtcaaaatgagtcaaaattcatgggtcaactcaactcaatccatgaaccctaatgagttgaaaattttgactgaaatgagttgatgggtcaaatgggttgatgagtcaattggtttgatgagtaaaatgagttgggttgtaatggttaatggtttcaatggtttacccaattaacccatcaaattttgtaaaattgaattaaaccaactaaaatctctaaatcaatgccaatttaagtttaaccaacacatctaaaccaatttaataaaattaatatttttccaaatttcttaaatatacaagcgatgaaattgagaaaaaataaactcgtaatttttccaccaaaaaacataaacccatgatttttccaccaaaaacgtaaacccgtgattttcccgccaaaaacgtatatccataattttcccgccaaaaacgtaaacccgtaatttttccaccaaaaacgtaaacccgtgattttcccgccaaaaacgtaaacccgtgattttcccgccaaaaacgtaaacccgtgatttttccgccaaaaacgtaaacccgtgattttcccgccaaaaacgtaaacccgtgattttcccgccaaaaacgtaaacccgtaattttcccgcgaaaaacgtaaatccataattttcccgccaaaaacgtaaacccgtgattttcccgccaaaaacgtaaacccgtgattttcccgccaaaaacgtaaacccgagattttcccgccaaaaacgtaaatccgttatttttcgccaaaaacgtaaacccgagatttttccgccaaaaagcttaaacccgaaattttccagccaaaaaatgtaaacccattattttccggccaaaaacgtaaaaacctataattttcccgccaaaaacgtaaatccgtgattttctataccaaaaacgtaaacctgtaaaaagtggaatccgtaaatattttaagtttgatgataatgaattaataatgataattatttattattgttttataataataattaattaaattattacttaatgggttaactcatttaacaactcaacccatcaaattaaatgagttatgggttgacccaacccattttgttaaatgggttgggtcaactcataactcatttaatcctaaactcatttgattatgagttgagttgagttgggttacccattttgacacccctaattaagaccatgtttagcttatttactgtaaaaatttatatactatttggattgttttaatatttattttagcttgggtaaaacaaaatcttctgttcagtttagtgacttctgttcaatttttaattttagtcatcagccaaaagtcactgcttcacataccataatattttctttatatatatatttttaattattgatgtaaatattgtctttaaatcagcagattttcctattattaatttatcatatcttcaaatattttaagcgtaacttgaccggctctaccttcaaatttagactaaaagtctaaacacaaattctgaaatatttatttgcgatacagctagattaatatatatacttttggtttgtccacaagattaatgtaacgtctgcttcttcaaactaaataaaaatagtaaatacatttcttgtcttggttgtaattatctacaaatgtacaaaacgtaaactaataaaacactgattaaaacgagtaacttttggctttaagtgcttctaagtcttaaaagttaactaaagccagttctgtgtctctcttctctttcctctctctcacacacatcttcgagaagtttccgccggcgggagagatcaaagacaactgctgatcagaaatcagagatcagagatatg

SEQ ID NO: 30639 - DNA, 3003 bp, Unknown
  misc_feature (1)..( 3003): 2750-1469P.txt file - cDNA_ID_3034093; gDNA_ID_1974087; Annot_ID_180576
aaccgagcggacaaaagccggaggccccaccgtcgtcagcagctacgaagagacaaaacaagtcgcaaaggaacataaacaataactctccgtcggcgaatgtggtggtcgcttcaccaacttctcaaactgttaaatgaaaaacagagacaaaaagaaacaatataaatattattatgtaccaaataagaaagagggcaaaaggaaaaaatggcagcgtacccgagtgtgccacttctcgtgcatgcatgggatcttgaagacaaatggagggtcatgattaaagctgtttggtcggggtccgggtttttactccattttttgctttttcttgtcgagtcggttcttttataactctttactctttttaccttcaggatattgtagagatgattaattctggaaatggtgtttgtgttatatttctggagagatgattatatagttcttttgttgttgtaattggttaatattacatatgtggctcatttcttgagtcgagcttacatatcgtttataatgtgaatgttttaagaagagttgaatgatacaatatttttacacaaacattgataatgataataaaaatgataattaatgtacaaaattatttgtaaatatggacatatggacaatttaagaaggaattgagataattaattttgtacattaattatcattatcaatgtacaaaattatttgtaaatatggacatatggacaatttaatgatagtaaaaatgataattaatgataattaatgtacaaaatgataattaatgtacatatggacatatgtacaaaattatccatatcattcacatattcacattgtaaatatttgtaaatagaatgtttacatatggacattttaagaagagttgttccttaccactttgattctatcattttcttgtttatctagttagcttgaaccctttgtattattgagtaacgaaaatctttggaggaaaaaaacaagtgaggtaggattataattttcctcatataagtgtgttgtttgtgatacatcattattctttcttatttttggttaaacccaaaaactggaccgcacctaaggaattgagatattcaaaaaaacaatgatctgacccgtgccaaatatccacaccacacctttctccattcaggccctactagaaagccgtgagacggttgacaacttgaaaacaaaagacttataatgagactatgagaaacaaaaaagaaagtggagttgatgaaataatctgatcttatgaaagtgaagttgattacaaaaggagcagcgtggtagttgaatagtttcagatgttgataaagacgtgacatacatagttgtctcagtaatctaatcaaggactcctcatgtttctaacttcttcttctataaagttgcatgagatttatatctggagaacatatattgctctaattatgtggtcttattatcatcaatatatgcctttttctacatatgaatatatgatcgacatgtatagatattttttgttgttcaaaaaaaaaaaatgtatagatatttttttcattttccaaaaggattgaatttcgaaatggtgtagccaccttagaggtatacaacaataaataattttcccgacttgtaacaaatgtttggaacaaaagtgtcaattagaatcaaagtaaccatcagatgccttttataaatttctttatctatgattattttttaaccaaattcagacacttctatattactaaaagccaaacttgatatctatttcaacaaaaaaatttttttttagtctgctgtgactcagtatatctaattgttttcacatcattcataaacttttactagtccattgtaaaatacagtatattagaaattgttttcctatctatatatgcttaggtttaagaaaacaacttttggccatgaatatttgagtttttaagtggttttggattatagattttgccaaaaggaaaaaatattgatttaaaattacaaaaagaaatctgcaaacaattatcaaaaactcattaaagtgggatttatttttcattttgtttacaaaaatgcgaactctaatcttgattggataattaaatgggtttttggaaaaccaataactatgctataaagtataaactactaccattcaagccttctatttttctatgccaaaaaatactacgcaaaaaaaattgagcgtgtttgatccaacaataaaacaaattactcaatcttgtttgatgtcaaaatccaaatccaaaatatgtttcggacacctgaccggtctactcgattgacacccctgaaatttcgaaatagacaatacacaaaaggacatagacaacataacttcatctcacttagatattcacatttcccatttttcaaaatattggctcttcattttctgtgtacttccaacaaattgtcttctagagaaaccaaaactatctaagatttctccaccttctccatcatccaccgttgattcactcatctcatgtctccaatgactcatctacggtcaagattcaaggagcatgaaacatcccatgaaccaaattacacaaaaacatttaccttgataaaaaaacatcattttattattttggcagaagaaaaagtcttaattcgaactttgagcgtgcttatagtttaatcaattaaagttataaagaaaagtaactttataaattcaggagtaatcagtagatttataccattcttgtccatcgctttaagccacacttgatcggacggtaagcaatcaatccggtttacactttctgattataaagattccaacttttggttatatcggacggttaataatcaatacggtttgagtttaaatcatagccgttgagatgtttgactaaagtgtttacaaagtagtcaacactctctttctgctacaaaggaccagtcttgaaactcaaagtccttacctttcccttctctaacctctctttctctttctctgtctctttgtgagaaatg

SEQ ID NO: 30640 - DNA, 3000 bp, Unknown; identical to SEQ ID NO: 10047
  misc_feature (1)..( 3000): 2750-1469P.txt file - cDNA_ID_3034125; gDNA_ID_2213621; Annot_ID_195720

SEQ ID NO: 30641 - DNA, 3000 bp, Unknown
  misc_feature (1)..( 3000): 2750-1469P.txt file - cDNA_ID_3034154; gDNA_ID_1974091; Annot_ID_180593
aaggcaattctcgtttccaaaatcaaacccgactacactcattgtcaggctgtgttattcaataatactgggggctcccaagtatttgatagcaaccttctcagatcaataaaagcaaaaaaaataagtatcagatgaacaaggatggaatatcaatgaaagcagactaggagaagactaattggtgttaacacaggtcagataactagtcttattactgaacctaaatcaaatcaacattttagattacaatcaccaatacgggagaacacgcgagccattcatacaaatagatcaaacctaaaaatcaaatctacgaaaaaatagaagaggagcttcagatctggaagatctgggaataaagattgggaaacatacctggatcgcgagaggggtttaaagttatggaagcttgaacccaaatctgggttttatcgtcgtagagagaaaacgaagagcaggagaggttgtcgtaaggaagagacaagagagcgagaggggtttattaagaagcccccagggttgcgttcctctctacttttccttttttcttttcacactttcttttcctttttttttttaattactacttttatgtccttttcttctaatactatatcttatgatatttatttttgcctctctttcataatttacgtaaacaaatcgagtctacaaataaaaattatcaaaaccaaattaatacatttgcgtaaagctcttccgtccaaaaccaaattatttataagttgaaagattatacaactaactttgtatgcgttaatgataaacaacaataataattctaaactatttgaaaaatattattagctagtaaatgatttctgagttggattttttcgagataatgtcactgtttactggcatttcaatcctactgttgcaaaccttattttgtgaaatattcttagtgtggacaaaaatcttggatcgtaatcatctagtacagtactttctaatcgtcaattagattgaagaactatattaaatgtttacatatatttttggtatcacttgcttctttatttgcatctttcctacctgatcttaagtttactcggtttaaaactactgtatatagcaaacttgcaatgacatgcaatatgctatgattgttttcttttgttataaatgttaatatcatatataaaatgaaagaaatgtattacaaaagagcattaacctaatcaccagattgcgaaaaccttttagatgtcttcttgaagatatggtattgcaaatttcacggtcaaaattcttgaaaatgatcgaagaaagcagtgactgtgaattatgtaagacattatttacttgttttcaaatgtggtaaactccaccgtgtgctgccatttttttgagagtggaaggaacatttggtgaacgagtttttgtccaagagagaagctcaaactatgtggaaggcatatgcgtgtgctgccagtttcttgagagtggtaggaacatttggtgaacgagtttttgtccaagagaaaagctcaaaccatgtggaaagcatattcgtgtgctgccagtttcttgagagtggtaagaacatttggtgaacaaaagctcaaactatgtggaaggcatatgatgcgagaaatgcttaaccgagaaaaaaattagcctccaaatctcacaagcaaaatctcaagttaataagcattttagcagtggtgtctatgtacaacaatatcataatatgaaagccagtaataaaatttaaatggtatgaaaaacgataatagctatataataacattttctttgtttttaatatctatattttgttttagttatatataatattaacatgtcaacaaagttttcaaataactgattatttaatataatcaaaacaagtaaaattatacgatatttggctagatttaaaacgactattttagtgaatcgaataaccaaatcataccaaactcattcaaaatcattattagctttcgttacagtagataaaaaagtattggtaaccatgctcttataaatttaattgaattagacagtttatgattaaatcgataataataacgaagattgatgtattttgcaagtagaacaatttatttctggtcgaaatataaatagttacaacaaaacagttttcttaaaatcattaaatatttgttttgtttaaatctctattttgttgtaactatttacaatctctagatcacattaaatctctagaacatataagagatttgttgcaatccctattacaatatctggatcacattaaatctctagagcatataatccctctttgatccatatccttttctctttttcctttctaatttataaaaaatgtgattttttttgggaaattcgttttcgttcaccataaaaactttgctattaataattactctaatttaatggaaaataaataactcgtaaaaatgtaaagagagaaatgaattgcgaaatattttaattgagaaggtaaagaaaagtgaataagcaagtaaagaagaaagaactcaccaatcagaaatcagaaattagaagagaagagaagcataaagaaaaaaaaactgcaacgccgtttgttgccgatctgcagcagcgcgatctctctgattatagagagctatcatcctaggtgagcttcttcttcgatttcctcttctacaatatcctttcaagttcgatttcatcttctttcaccaattattggttttgcttccttcccgtagtttcgtttgtttgttttctaaggttttgtgtcgatctcaaagtgagtccagggattcatatacctttagactagattagccgagatctattagtgttgatctccgtcatgtagaatccctaattaatttcagtggcctcagatccagcttttcatgttattgataattttgtatccttgaagctttttggatgttgtgagattataacagagcttttcctttcagcagaatagaatctctcagtttaaaggctccaaagatg

SEQ ID NO: 30642 - DNA, 3000 bp, Unknown
  misc_feature (1)..( 3000): 2750-1469P.txt file - cDNA_ID_3034169; gDNA_ID_1974091; Annot_ID_180586
tttactcgattcttattttttgacaggacattgctgtagaggcacaaaatgaatctaaatggaagcaacttggagaattagctatgtcaagtgggaaggtgaccattttttagctgcaatcagtgttctaggattcttacaaaggttaaagctaacatgtatttttcttttcattttccttcccatgcttggactacttagctggatatggctgaggaatgcatgaggcatgctatggatttgagtggtctgctgctgctttattcttcattgggagatgcagatggaatgatgaagctggcagcacttgcaaaagagcaaggaaagaacaatgtcgcttttctttgcttgttcatgttgggtcaagtagaagactgcctgcatctgttggtggaaaggtacattgtttactatttcttacatgtggaacatatattcccgcaactaattacgtctatgctgatattaatatggttacagtaatcgaatacctgaagccgctctgatggcgagatcgtaccttccaagcaaggtctccgaaatagtggcattgtggagaaacgatttgaccaaggttagtggtagacacatccgatgcaccttgtgattgaatttcaaaccttgcctgttgagatatccacaatttttcttcatcctctgtcaatctggatatagataagtccaaaggctgctgaatctctggctgatcccgaagagtatcccaatctctttgaggagtggcaagtcgccctgtcccttgaaaatagagctgcagagacgaggtatcttttcgtcgttgccgtcattagcttattcttaaaaacagtgcttatgaggaaacctttttaattgaattgtgggacttaagccatttagagtcatgtgtctgtattacatagcaaggtagccgtcatgtatttgcttataatttgaatttatacccgtataaacataagccgaatgtcgatttcattttttcaggatcctcataaacaaagtatttttgttgacttatcttgcaggggcgtccatcctcctgctggggattattgtagtcatgcagacagagatcatacaactttagtggatgcttttagaattatgcaaatagaggaagagggtcgacttgagcaaggggatgttctcgacgaggtatgcatgtttacattacatgcattgaagaggattgtcttttacccatgatatccaatccaatggtcttggccatggtggacaatggtaggatcattaattctactgtcgctgcttcatttgttgtgaacaggttggggaagagggggaagatggagaggaagaggaggaggaggatcgtcaggaagagagtagtgatgggagacagcagaatgtggaagaagaggctgttgtggtggacgctgactctacggatggtgctgtgctagttaatggtaacgagtctgaagaacagtggggtaagattagtgaaggaaccgcatcagccttatagcatttgtggttatcaattgattataagatgtcgctgcaccaaaatatccttttgccatctgcacatatatcataggatttgcgtttgcatctgtccatcaatgtttcctcatctgtctgcctcccatcttcgtcttactgatcatcttacttttgatgttgactgtcttttaaatagtgcttctctatgccattaacttttttatcaatccgtggactgattaaatatttgtttgttgtacagttctaacaccgccacaagagtagggttggtgaagagtgaagacatacacagatagatattttcttggctttgaaacttgatacattcagcagagaaatgaggcagcacagagagagattagtttccattgttaaaaaactgatctattgatagcttccgctttgtgcttttaatacagatacatattaaaaaaaaagggggttttgggactcttatgtagctttaacttatgagagatttcacctgtagaatatctgttttgaactgagatttcacccatataatatgttttgactttcgattcaataggttatgtagttgatatcttttttttttttgcaaaactcaatagcagtagcaaaaaacttaattggaaataatcaaagtgaagggataagttgggaaagagccagaggataacgcatggtgcattattattagtattgtggaggagacgcatctcgaaacatctctcaaagcaaacaaggacccaaaacaaagttccttgcattcttccactgtccgtaatcaccatcaccatatcattattcttctacccattttgtcttggaaatgattttaaattttcttgttgcttcttactgcaaactgtgtataggttcaactactccattgagttacacacttgcatgcacctatggaagttaattttccggttttgattgatattcaagttgttgaccaatggagttatatacccttgatttatatagaaaccacatgttttatttatattaacatggtcacttttgtcaggattaatagacaacaatagttgagagaaaaagtgataaggtagagctaatttgtattaaacttatcaattagtattgttggttaaaaaaaagttaataaagtagtcaagttggataattcccaaaaactgggaaaaaagaactcaagcgtcaaatgttgtaggtgcatcatcatcagtctacaagtagtaaaaaacccattcgatttgataagaagacccaacggaaagagtcttcccgtctacaaagtaaacccaatcaatcttaataatctttaagaggttttttcttattataattatctatctctctatctatctatctgcggatctctcatgaagaaacactgaggagattctctcgctctgatctcctggtatcgtcgtctctctccgtagagatatactagtttgtcccatatccgattgattgctctattcaatttattcctcttctaggttttcggtttggccctccgatttagagggattgatg

SEQ ID NO: 30643 - DNA, 3003 bp, Unknown
  misc_feature (1)..( 3003): 2750-1469P.txt file - cDNA_ID_3034190; gDNA_ID_1974091; Annot_ID_180616
ctcttccttctcccgtttgctgccatatccaatcttctttttttcacctagagcgtctgcgctaagctttggtatttataagcggtgctgtctgtgttgacatattcatgtgtattgtgtggttcagcattgccatctcacgtacgtgctcacgctatagcgacctagctctttacttactctttgttttacttttcacaacaatactaattaatgaagccactaattcacgtgctacattgcaactggatcctagcctttaatacaactcttctaaattggtatatctctctctgtattgagttcatgcatatatggggatatatacaaacaaaaacattatttattttttgtctgccgtcactaatcgatctcaactaaacttttgtcatttttttaatgaactgtaaacttggtgttcatttcgttctcattaatgtagtttccttagagattgcaaaaattagatacattttgtagcatgaaatctgaattatagaaggaaatcagataagcaagtgtgcaaatatacaaaaatgtgctattcgagctaaaagtgaagatacaaacaattacgtaccaaaagcaagccctcaagaattgtgtggaggtaagtaaaaggaactatatggatcgcagagacaacgatatataggtcacgtgtgtgggagttttgtctaaccacacatataagagaggaacaacatggactcgaggaagaccactcgtaatgaagttaaaagttgaaacttgtaaatattatcaatcccaacaaaaagaagaagaagaaaaaatatatattggttgttttaaactcacttttgcgataacttggaaagtgggaggacgctcacgtgcatgcatacatttcttgtctattatatgtagctgattcaacataactctatatatcttgttgtctatattgcattatagttacacttacattacatacgtagtgtgaaaacgatgcatagcattactatacatcaaatctgtgcatatatatacacgttacgtttcttgcagtgaaatactcgaaggtggatatgtgctcttgcaccacctaattaatctcgggttatgtaagaattacttcagagttcagagtatatatctatgtgattcttgcgcagtgtcaagtggattgggcatgagattgataaccgaatgggtgaggggtcaaatatcgttatttggatatagcgggattttaaactgaatgattgggccatgcattgcttgggaaaaaggctaaaattaaacaagattgagatacacattacccacttgtattttagtttccaaagaaaaaaaggaaaaaaggagcaacaaggcaacaagtatgtaatgatcaaggaagtaaaaaagggaagaggagtgtgagaaagagagcaaagaggagctgttggaagagggaaatggtcttcttcttcgtccttttggtaatttttctgcttgtgttgtggagagtggtagtactagtgtagagaaaggatatggaaatcagattgtgatgaagatctgatttgtaaagaaggggcctccccacaacgcccttgaatcttccgctccagccttgatctccgattgtgacgatcaccgcatcgggacgtggggagaaggagacccaacctcttttggagtagacgtggaactctgcatggcagaagttgagacatagagaatgtctttcgtcatagcctcttagcagcatccttatggcttcttcctttgattcgtttttaatattatgcctcttcacgtagcaaacccctaccccttccttttggcttcttcctcctgctcctagcttttctctcaccgccttccctatcctctctgcctcacccatcaactccctgcatcttcaaatcattacttactactttattttaaacaatatatattcctaatcaattactatatatagtaaattttgctgccttacctcaaatctgaataacaagccgtgtgatcatcagcattaatatctttattaaacacgaactcctccgtctcatcgtggaaaatggttttgtccatggcggctttcaccatagcctctggaacaccgtggttaacgagctgaaaacaaccgatggtggcgatggcatcaagcagagccgagagggagtccaaccggtggaaatcgaaggtgggagggttgagaaggaatgtgtgcttggggaagactttatcgggcaatacaagatttgggactcgaccacacttgtccaggaactccgagaggacgtcttcgttggccgtgaaggaggcacggcggctggatgctaccggggacggaggaggggctcggaagtcgggagaggaaactcccatttttgtttggggtcttactcgtgataatacttgtatatatgtagagcaaggatcgatcattggccaaagaaaaagtttttgttaaataaagcgagagcataatgatgagatgcaattctcttgtttgcttttattcattgcaacttttccttttccaaaaaccagagaggatgacactattcatcatattatggatggacccaagttgggccttaagcggccttttgtttacccaattgacgtggatcctcacaggatgggcatcgagtgtgacacaagtccaagttggaagagtccttttctgtcacataaataaaaaaataaatgtcaagtagagagggcaagtggtgaatctctctcataccaattccaaaccaactaaatctacttagtaccagtacattgatggtagttgcattttcgcttgaaattgtctgtccttttgctagtttgagtcacaattttcaattgaaaagaaataagagagagaggtcagagtcaacgaaaagttataatttagattttgtgggctaaaattgacaaaagcgtaccaatacagggaccggtgagcaatggcaaattggtaaataaagggagaagccaaggagtggagacgcaatttgggaagagatagaaaaggaagaagacacgtcaacaatg

SEQ ID NO: 30644 - DNA, 3003 bp, Unknown
  misc_feature (1)..( 3003): 2750-1469P.txt file - cDNA_ID_3034202; gDNA_ID_1974091; Annot_ID_180608
ccagctttcatgtctcagagcagaacagggccagttaagcaagtcacttgagaaagagaggcagagagcagcagaaaatagacaggagtatctggcagctaaggaggaagcagataccctagaaggtcgagcaaaccaacttgaagttgagataagggaacttcggagaaaacataagcaagagttgcaggaagtgctactccacaacgagcttattcaaaaggttctacattgctttatggacataacttaatctaataagagttagtcccatgaaaaatgccccatcagttacggaatttaaaggactgaagtacctagcgaattcaatcaaagtagtgctttcccaaactttttcatcctgagtagcttctattaacaaccgaactgttccagtttattactcttctttattgtccaagtagtttctcaatatggcctatttttttcaggacctagagagggagaaggcttcacgtttggatcttgaaagaacggcccgtatcaattcctcggcagtctctgaacagcttcctatagcaaggcaaaattctgcctttgagaatggtgatgcatctagatctatactactgcttaataagtcaggcattgcacatctgtaattcattaactattgcatcaggaagcttgcctagaaagctatcaagcgcaagcagccttggaagcatggaggagagctattttctgcaagcttctcttgattcttcagataaattttctgagaagcgaagcatgcctgaggcaactatgagtccgtactacatgaagagcatcacaccgagtgcttatgaagccacacttcgacagaaagagggtgaacttgcttcatacatgacccgcttggtaggtgtagaaaatatccaactgggacatttttgtgtaactctgttggtaggcttttggcaattggcttagtaatgggattgaggttgacatcagtccttacaatgggacactatgggtgtttggatcatgttgagaaattattggttagttgcacaccgtggttagccttcttttataagctggtttagaaggtttagctctactcgtcgaggtagtataggctggttgttagtatcatcgttatctgtagaatctaactgtaagagtctatttgcctttggacaggcatcaatggagtctatccgagattccctggctgaagaactagtcaaaatgacagcagaggtatgtatagcgctgagagtttagagttgatattatgctcagtgttatgatgatatttcgtctatatctggtaactgtggatgtagtgtgagaagctacggggggaggcagatagggtcccgggcataaaggcagagctggaagcactaaggcaaagacacgcggctgctctggaattgatgggtgaacgagatgaggaggtaagatatgtgaataaaatagtagtgtatccagcattaacaacagtagttggcattgagttaataaaaaagtgggtttgggtggtagttggaggaacttcgagcggatatagtggacttgaaggagatgtacagggagcaagtgaacatgctggtgaacaaggtaaggcaaacagacacaagtggagtcaaagtgttgacaaactcaggctaatgggtttgtgcaattttgggtttgcagatccaatgaggggcaagggaagatggtgttggcaagctcaggctcacgagtaggaccacctaatccttgtttccccaatattgtatagctctataagctaccaacctaagcccactatattcatttgtcgttttgtctctcaggtgttggttgaacttgaggctttttaaaacaaacttttgctgctcgaaagaagatttttcttacagtgaattcgatcgtaaattattattttggagacgagaataaacttttgtctgtgtgacttatctacgtatgtaacatgtattgtctgtgtagtagaaaaacggtggagagacccattaataatgggattcgttgatgtagcaatccatccatataggaaaactgtgtgactcgaatggacccgaatgagatatcaaaatcacagaaatgatagataaagaaaataaagaacaaaaaggcctccggccctcttgtaaatgttaataaaagcccaaaggcccaaaatagctctgcaatggcttctcctgtaatgaatagttgtaggctggtttcagcatcaatcaatagtcataaagcaggggagggatcctttcatcaaaagtcttgtactcttgtacatacagcattactgaattcatatataaatgtcattatttcattggtactagagtatagtttgctgagttccatgaaaagaacggtagaggcgagagcaggtgattaaaacccatcccctgtgaacggagtgagtgtaggtgtagccataaagttgtcgtcgctcctctgtaaaagtttcttctattcgacgattcctctcgacgttatcatatttcctctccaggttggtactatcatcatccttgttctctttgtttgcatccctccttccttccttgcttccttgtagatctgccattgccttttttaatccaaatcttatatttctgatttacattgcttccgtcagatccgacgatctcactttctcatcatctgtcgtcagcttttttgtttcttcttttatctctttttatttttaaaataaatatattgttgattctggaattttcctagtagctcacgtcacgttacgtcatgtgtgtgctttgaattttaaattgactcgcaaggctggttttgattatgtgtaagtgatcgctggacttcacacacactaacaagtagcacttgaatgaagctttcctttaatggattgattatttaataaattgcgactttgacgtctttgagcatccatccatgttgaagaatcccattattcgtatgcttttcttctatggccttgcatcagtcagcactcaacttgtttgaatgtgcaggagcgtgtttccagaggggatg

SEQ ID NO: 30645 - DNA, 3003 bp, Unknown
  misc_feature (1)..( 3003): 2750-1469P.txt file - cDNA_ID_3034206; gDNA_ID_1974091; Annot_ID_180606
cattgaccgatcgttactcattaatttcagcgaccttaaaaggaaatgaatgctctttatgggtttgcctccaacccctttccaattcctccaccctctctttattacttactttcctattcactatacgcatctccctctctctctatatccaccatatatacattttataatgccacctggacacatgtgtatgtgtatgttgttttaatatttgacaaaatttgaaattttgatcatcttattgtatcacgggcacgtcaagatttcaaacattgattcatattatcgtatgcatacaccatgacatattattgcaagatatatctcaacagttacattgttaacaatatagatatagtagcttaaaccgtccgtataatacgtacgtaaatggacgaagacgtatagtgaaggaaacttaggtctttaataagatatataatggtataactgtagcagatgatttatctacaattcaaaagctttatcagtttcttttgtttttttctttgttagtcgtcgtacggcctagggaattgttagttaggaaaggtagatacataatgtatagagagggaagcaaccataaacatttacattcaccacatgctcttaaataattaattaatgcctcctaacctctccttttgctctatctatctactttaattaattacttgaatatatgctgcctatagagattcctttttctttcttccattcattccttttggctactgactctctctctcttttttgctctcgattaatacttctacttaattagggttttgggtaaaaaaattcgcccttttcaccattaatctattacccgtgttggcaaacttccaagaccagtcttctttcttttttggcttttcttattgagggccaatgaaagcaactaattaatttttaaagtagggtctatcaaaattaattaagacaacccttaagttgattccaagatgcagaaactgaccatatatcttttcttttatctcaacaagtgacgacgatcccttttaattcacgtccttacaaataactatctagaaagagaactgacccaccaaaaatggaatatggtgatgatctcacgctaaaagcaaacgtgtttatacaaatgtgacatcgagtgtgcacacgtacgtgtgaagagggaatgatggcataggagattgcgccagataaagacagtgaggacaactaactccatatactaacttatatataattaatacaatgcattttgatattcactttttgtacaaaggaaatgataccatacgagtcgtacgttgctaatattcttggtacctccaagtccaaccgcaaaacaaaagatggatagttagttggagaggatcagctgatgaaaaccaaaagacacagttgtgagagagctactagctagtgagtaccacatatatacgtatattgggatatatatataccttgaatcttacacattttgcttacatctaaaatagaaaatgaaccagtaattagtttttgtttggatccataaatatcacatatattacttaattatttcatataatttatcactcaaattacatttctgtataccagttgtagtattttaatgaataactctactagtaaattgtaacattcaaacagaaataaaaatgaaaaatgtaaatgtaaagatataatcgtgatctgaaataggatggtttacaatacgtaagagaatacgaatgtacatcatgagtatcaaaacaaatcaagattcataccaaaaggaagagaaaaaacatatcaacatatgcataggttagcgtcttagcgagcgtgcggaaccgagggtgccttggtttgctggccccaaaatgggtgggcttttaggggcccaatattgttacttacagaggctaaaatggatcctactgttttccctttacaaaaacggagacaggccttgtatataaaaaattcagaccaaagccgcttagaatgaagtaaatgatatcaagacagaacgtttttctaatccgcgaaacgacgccgtttgtaccgccggtggccgagggaaaaaaaaggatttggattttgttggatctaaaaaaacataaaacacataggggtgggtctctctcctccggaattcgatcacgacggcaaggacgacgcatctccttctcgtaagccattgatgatcccaatagatagctctattctgctttatccaatcgcctcgtcttaataattgattcagtgatgtaattgggatctaaactcgattggttgattgttttccttggaagccacagggctggagatggatctggtccggtgatttctgagatttaagtcgatcgagtttccagatatatctctcaagtagagatggcttggttcagtggcaaagtttctctgggaggattcccagatctcactggcgctgtcaataaattccaggagagcgttaaaaacattgaaaagaatttcgacaacgcccttggcttcgacgacaagtccgattctgccgctgaaggtgttctcttcttctcactttttttccaatcaatacacataatattatcatccttcccaataatctgctgttagtcagctgggaatataggatttgattactcaaggcgcatttgttgataggacctgccatttttcttcttcttctttatgtaggatgtttagatcaataatctgctgttgcaataatacaatcttgcaagttatgggattctgtcttatttttcttagaactagcttagctagtgtgcttcagattctacccattgcattttattctgaatttgaaaaaaacactttgttttggatctttgcgtttacttggtgacagctttttctggctatgatttcaggggtattctgtgtttacctaactgtagcacaaatcattttcttctctagtttgtcttgagtttcttgtacctttcacaacaaaaatccttttgttctttctttttagatgcagcttcaagtatg

SEQ ID NO: 30646 - DNA, 1668 bp, Unknown; identical to SEQ ID NO: 9864
  misc_feature (1)..( 1668): 2750-1469P.txt file - cDNA_ID_3034260; gDNA_ID_1974092; Annot_ID_180657

SEQ ID NO: 30647 - DNA, 3003 bp, Unknown
  misc_feature (1)..( 3003): 2750-1469P.txt file - cDNA_ID_3034260; gDNA_ID_1972104; Annot_ID_178667
aataaagcccaatatacttcaggcccatataaagcccaaaatagtaaatctcaggccctttttgccataagaaaagcgacagtcacatttgcaggcattaatcatcatttgcatcatgatgatgtatcagtaataatgtgtatggtccgaacaaaaatgtaataatcacgccgctttgtgaaacaccttgttcaaaaaatgatgactaatcatagtccaatgctgaatcgtataaaatataaacattcgataatcatagtcgaatgccaaatcgtacagtagaaatataaatactaagttcttagctaactccaagaaattgaaataaaatttaacctcgtggaagaaaaagctgagcatgggacggctttagacagcatcattgctcgtacatcaaattgttgtatcctccttttgcttcaatattcctctttttcttcactttttcacattctttctctgtcttcttttagttaaaaagaaagtagactataatcgaacagattaaatgctagctatatccaattttcattatttatattcgttcacacagaaatggaaatggtgtagtggaatttatgatgaagattcggccatgttgaattatacatgcctagttttctggagtatgagaacgacaatatcatgttgcaaacactttatattttgatcagggaatttttgaatctgcattgattattggagttactcagtttgtttctctaaccttctgctcaaagctgaatcgtacgtatacatttacaaagttagagccaaacattacgtcaaaaactggtaagcataaaagctagtgtgaacagataattttgtactctcggattagtgatctactaatgcaaatatgtagtgattcatttttcagttagtggtcgcaataattctccctcatgagttatgattcagagattcatatataatagtagtataatacttgctcctatgagccaccaaagctattaccctttgatgccattctttttgttgacaggaatcaaattctcccgctttatagaagaccttttattcttacacattcttcattatttgaattaatttctttaacatttcttacattttctcattttgttcgatcatacgatggatattaaactaagatagaattgttatagaccacaatagctggtatatatggatcggattcttcatactttctatgctacaagtacgtctgtatgcgtctttatgtacgtattcatgtatacgtgcacgcatgcgtatggccccaaccattaaaccctttgggatcgatacataaattttgcatccgccaaataagctgtgtttagatatgaattcacaattcagataaagatggggaaaaactttatatcctttactactttgggttaaaaaacttaaagcgagttggatctaactgtattatccaaaataaacgagaattgtcttcttgaggttaattagctattatataacgtcatgttgtgccattgtgccaaactcagtcataattttatttttctctcaatcataagttctctctggtcaactctgcttcggtattgagtataattaatcaaaagccaaatagaaaacagtatggtacaagactcaaatctcaaaagagacaaaaatctatatgcatgccatagtgatttttgaaagaaatggaagagaaaaaaaaatgagaggggaaaagctagaggagagcgatgacccattaagattaaatggactaacaaacgaaacgatcatcaatgtgtaagtgtccctacgaggaccgcacccacttaattccccaaattcaatacctattgaccctcttttcttataatgacccacttataattattatcgtatattgttgtatattgtcgttacaagattgtgaaatgttttatattttctatacacgacgaataacctggtcaagctatatatcgagattcaagtaagtatatataatcgcatgcttggttaaatcagtcctccatttcgagagacaatatgattatactttaaaaaatagagactctcgaatgtcgacaatcaaatgtcacaactcgtactatgctattgtaatgtttttcaatcaataaacttggtttgttttccacaattttatatatagttttattaaatttatatcaccggttggtgttgagcctaacaaataatatgcattattaatagtctactactactagtttgtgatatattctttttccagcttggagagaagattaagcatattttggtctctgattaaagagattacgtaccgtaacctcaagacttctataattaaaagaaaaaaatcaccatatttgtttgttagaaactccaagagattccataacaaaaacatttcattattctacaagcaacattgtgaacatggaccataaatttaacttgtacagtactctacataaacggtaaaaaacaataaagcgcttggaaaaagagagtaacaccagaaagcaaagagctttgaagaaacccaaattcaaaggtactcaatttcatctgactagctctgaccccatttcttcaaaccaaagaatgatcacaccaaatccaaaatttcccctataaattacctatctcacataaatataaagtttacttctcttacctctctttcctctttttatcatttacttcataaactttctagatatctgcaaagcccttaatttgaattcatcactaacccacatgcccaaaactttagcaacacacaaccctaataaatttttgttggagggttcgatgagttaattcattctttattgtttttgatcttctgtgttttcccttaagaaagtgattatgtgtttaataggtttgttgggagatgtgtcagtgacatcaagaagacgaacaacaattcaaaaccgtattaaatgttgtctttttgatcactcaagaagaaaacaacaagacagcagatgttttcatcattcttcacaacaagtttcgttcaagtctgatccgatg

SEQ ID NO: 30648 - DNA, 3000 bp, Unknown
  misc_feature (1)..( 3000): 2750-1469P.txt file - cDNA_ID_3034267; gDNA_ID_1974092; Annot_ID_180655
gaacaaatgctgaagtttatgggagcaaacacacacttgtctgttcagcaggcaaaagaactcatcgaggtgcctacaataatttaaactaatgtcctacaggttttctctattttttatgtctatctttctcctgtcagcctatatctatgatttacgcgatctataaaaatgctgtttgattcttccaggacgagaaggctggatttgcatatctcagtctacgagaagctcggccatctttgtatgaaatctgagaaacatttatttgtgatatacaaatgcatacgacattttcctgttcttccataagcagtttggtggtaaagataacatctgatcgtattgacaaatttctttgacaaatttgcagatattcactaatcgaaatgagggagcatataaagaagcgccctcctctggcaacaacggagaaagttcagcaatttgtgagggtaagggatctatgaaatgtcaccgccttatatgctccacgcaaatagaatttaacaactcatgtgactaagacaagtttaagggggaaagatatcatagggcttgacagaaagtgaccgtatgcagacatttcatggactgtttttcaatgcaggcgacagggaaagaagccattgttgctgggttttaccatgaaggctacgaagagcctctcttaatgcttatgagacgaagaggtgtccattctggtttggtggttaaggttgagtctctctcttttaccatcaaatatatattaatgccctacgagctactacacacttgggacgtagacttagaacctgaattctgttggaagctctttccatatgaagttttgaacttttagtagagaaaatttcaggtctgattgtaagggaatttataaggcttcttttggtaatgcagggtgaggagggggccctttcaatgacaacacgggtgcgagctgcaagtgcatcaaaagggtttccagtcaactactgttccgggtttcgttcattgagttcggacacggctctagaagctgacggttagaatagctataataactttccttgtttcaaactagaatctactgcttgaatatatgaaccgagtccagacagggttgacacttaatttcacaggtgcaaattagtgttgtagtaaaccggattgtaggtggtaggagttcataggctaataaactattagctaatcttatatttggtcgatatggagtcatgatgtatcattttaccttggtgatggaagtcttttggtggattagcctaatctagagtgctatgaaatctaattcagattagattggtctttgtgctatctgatattaaacttatttgccttatgccttggtactagtatatgtcttgttgtacatcaatatagtttatgctcctaaaactcatggctaaactaacttctggaatcgtaggtgtatcgcgtcagagtttcaatcttgaggtggatgcgagaaactatgggtttgaaccaaccgagactccacgaactgatcgttcggtaaaacttccagaagccatttgtttcacaatgttgaggactgttagaaaaagaaaaaaaaagagaaaacttaagtcatacttttgtttaatgaacaggtgtcaaagaacatagagctggggctggcagcgcttcgtggtgagaaaggagcggcttatgatagaatcgtcctaaatgctgggattgtggaccatttgttgggaagtgaaggtgcagaggatgtagctgtggcaatggagagagcaaaggaagctattgacagtgggaaggctttaaagaaacttttgaattacatagaaatctcacgcaagataaaatagttcaaccaacctgaagagtctgaaaaatcatacacggaatagagaaaagcatacacctttctgattcttattgatttcgttttgtgtaatatgtttttgaaacttgaaagtgtttttttacagaattggacacacaacacaatgtggatgtctagtgaatcacgtgtacagagtctgagaacaaaacttggttatttctaatgtgtttaatgtttcttaatcattttgcacattcatgttacttaattagtttagtcccgtcaaagattctgatggagacattcgagccactctttctcttgaggataatgggaaacaaacaagcgagtcaatgtccggaaaatgacattgaagccgaaggcaagggacgtgggacgattttataggttgtgttgcagaaaaaacagagtccatatcaattctctcactcgttttttttaatccgttttgtagcaaaaagctagaaatgacttttggttataaaatctttctttttgccgattcaagtggctcagctgcttcgtctttttgtgttctccttatgccacatgatctgatcagacgagtgtccaaattcacgtcagacacacaattgtaatctaccgaagattttattttaatatcatataaaacgctattgcaataagcgcccacacaagtctttcttacttgccctgctctggaacgtgactttggaggtaacgaaactgtgtcgtgagttgatctaaggttggtataatttcttgtagttttgtccgatttcgaaaacccatttcaaaaggcgtcgcctttacttttatatcgtttgagactgttctgtagattttgagttgtggggttcactctctacgtgggttggtgatgatttttttttagctctgttcactgttgttttattggaataagttgatggtacgttctgtagttatagattcgataaaaaaccaatctttatgatcgactcaataagtcaaatcttgttgtgttaagtgaaatctatagtagtgaaagggtctccacttagctgtttggttagtcttgttataagctcgattatgtcctttcttgtgatcagtgtattaatacatctgcttattttggttgtagaggggaagtgaggaatcattttgcttttagctttgaaaagtaaatcctggaaatg

SEQ ID NO: 30649 - DNA, 3000 bp, Unknown
  misc_feature (1)..( 3000): 2750-1469P.txt file - cDNA_ID_3034271; gDNA_ID_1974092; Annot_ID_180653
actgagaagaagagcaaggatgatgactgatggattcaacagctgcaaaaacgtcgtctgtaatttcacagaaggtgctatgtattcattccctcaaataaagttgccgtcgaaagcaatccaagcagcaaaacaagccggaaaagtccctgacgttttctactgccttaagctcttagaagccacaggaatctccacagttccaggctctggatttggacaaaaagaagggtagaaaaaaaccctctgtgttttacagtttcatgttattcttgcagcaagctcatttttgtttgtctgtttgtttcagggtgtttcatttaaggacaacaattctgccagcagaagaagaaatgccagagattatggacagtttcaaaaagttcaatgatgagtttatgtctcagtacgctgataactttggttactccagaatgtgaaaaagaaaggacttagagtcagagtcagagatcacttcttcttctttcacgacattattattgtctattcacactcttaaaaagcaataagtactggtcctactctgtgtcaaactcttcttggtgctcttaaaacctttgtatctattgttaccaatttgtgtgactcacacacacacacacacaaatctctaatgttcaattatatggtaaatggtttatttaattattaggtggacaacattatcatattataaaacttaggaataaggaattaaggatcataagaatgatttattatatacgataatattttgcatccaatagaattccttcctttaatataaactttctccgccgtcaatatttacatttttttttaaagtaagaaatataattaaataaagtatagcacttatccaatcatgattaaataaaattgtagccgagtataaaaatttccaaacctcttttcttctttgactcctccttttggagtttcttcagcttcaatcacagagaataagagaaagccctaaactcaaatcttctcttctttttttcttttccgagaaaaagttttgggagtttttacttattacccgagaagaaacacaagaaaacaacctttcccgcctaaaagtttctttctttttttcctctttaagagaaaatttaacaatttcttatatatagaatcagttgaatattcaacaaccatcttcgtttaggtcttcttgttgaatttcttgaatcaaagtcatggattttcctgaaaagtcgcttaaagtgaggatcccggtgaaagctccggtgagttctaagccagagaaagaagaacaacaagaaaagaaagaggaagaagaagatagattcacaactccaaagggggaggaatttagaattccgccgctatttgagtgtcctctggcaccggagccacgcatcttcaagaaaaaaatcgaaaaacgtcgccaaaaagccgtcgggcaaaggaatatatcctttaacgttcaagatttagatactttcttcgcaagaacacaaaacgttgcagatgattcttgatacatatttaggtttatagttagttagttaattccttattaactgaataatttgcaggagtttttattcaatttttattttaactatcatcttaacataggatattatcttccctttttagtatagttttgggtagaattagtattaatatcgaccaatgatgaagaagaactaactcatattgttttgaatatttttctttgatagtttttttgatggatcatgtgtgatattattaaatttggttcttaacactttaaatcaaataaattcgtattggtaatttaataagtgatatatatatatatatatatgtatatcttttattcgtacaagatgtttgcaaaccagatttgggttaatgagtggatcaagcttgatacaggatatatatacttgcatcaaactatagagttactttaagattaaatcgtactatgaatgttcttgctaaatctatgattcataacaaaagtcaagaataaatttcataattagtgaatggacaaatcttagcttaagtcattttattcttcatactttggtcagctactggatagaaaacatttgaacccattctatgttttttttctccagtgaaacaagtcttagattgtgaccagattaacatttgtggaaaaatcaaacttggaaaagttgacccacacggccacacaacaaaccactgtccactgagtctaaatagagaggtcaatatcgtgtttggtaatggtaagaaaattgaataggccgcgtcaagctgaatggaatcctatgcaattacaaatttataacgtcaccagtttcatactcttgtttcacgggagatttatatctgttcttgactttttttttggagattttcaagtaatattttccagagaagtaatagtatcatacaagtaaaagagtcaaattctcaatttttgacaatatgaaactttagacaatcacattttctttaatagcaaaaacttcatatccaaattaattactcatagcaacaacaaaatagtgaaaaaacatcaccatcatccataattaacgacacaataggatctccgtcaccgccatctcagtacactgacaaaaaactcaggctatatgcattgtttactggtccatgatttttgtagactaatttccacatattatatgaaaatgatttttgtccaaatgattttaaataaggtacacagaagattgcaggcccagcccaaaaactaatattaatgcttcgtgtttattagcttggttcactcatcatcctatacaaaatttcttggcggtttaagtattccacgtgtcacagtgtagtctcgttgattaactgtctcatatcacatagccgtccgatcttcataaccacataactaaaaaacaaaaaggaaaaataaattactcggcacatacgcggaaaaaaaaaaaaaaagcgaatcgtttacttacccctctttgaaaccgacggtggtatttttcgccggagaagatg

SEQ ID NO: 30650 - DNA, 3003 bp, Unknown
  misc_feature (1)..( 3003): 2750-1469P.txt file - cDNA_ID_3034271; gDNA_ID_1972104; Annot_ID_178671
ctaacataagagagatactacggttctgttgtgatgagagattagttcttctcggagacgaagtgtatcagcaaaatatataccaagatgaacgtccctttatcagttccaagaaggtaacaacgatgtctttcattggtatctttaactccttagcttcaattatattagcctatgcatgtgctttgtgatcattggtctgcgtgatagtccttcattttatcatgaatgttgcaaaggttttgatggatatgggagcaccgatcagcaaggaagttcagctcatatctttccacaccgtttccaaaggatactggggcgaatgtgggcaacggggaggttactttgagatgacaaatatccctcccagggtttgtacctgaccgtctctttttcacccgtgattttggtaattgcaagagcctttttaatttctggtaatgcagaccgttgaggagatatacaaggtggcctctatagctctcagccccaacgtctctgcgcagatatttgtaagctagcccttcttagtttcttagcaagttctggttactgaatgatctcactgctgaaacctgattgtttttgtgtagatgggtttaatggttagcccaccaaagcctggagacatttcatatgaccaattcgttcgtgagaggtatatatagtcattctactctaaataaacacgctttgatgaatgaaggatcacgatcatcgaacttcactggaacattattaacagcaagggaatactagaatcactgagaagaagagcaaggatgatgactgatggattcaacagctgcaaaaacgtcgtctgtaatttcacagaaggtgctatgtattcattccctcaaataaagttgccgtcgaaagcaatccaagcagcaaaacaagccggaaaagtccctgacgttttctactgccttaagctcttagaagccacaggaatctccacagttccaggctctggatttggacaaaaagaagggtagaaaaaaaccctctgtgttttacagtttcatgttattcttgcagcaagctcatttttgtttgtctgtttgtttcagggtgtttcatttaaggacaacaattctgccagcagaagaagaaatgccagagattatggacagtttcaaaaagttcaatgatgagtttatgtctcagtacgctgataactttggttactccagaatgtgaaaaagaaaggacttagagtcagagtcagagatcacttcttcttctttcacgacattattattgtctattcacactcttaaaaagcaataagtactggtcctactctgtgtcaaactcttcttggtgctcttaaaacctttgtatctattgttaccaatttgtgtgactcacacacacacacacacaaatctctaatgttcaattatatggtaaatggtttatttaattattaggtggacaacattatcatattataaaacttaggaataaggaattaaggatcataagaatgatttattatatacgataatattttgcatccaatagaattccttcctttaatataaactttctccgccgtcaatatttacatttttttttaaagtaagaaatataattaaataaagtatagcacttatccaatcatgattaaataaaattgtagccgagtataaaaatttccaaacctcttttcttctttgactcctccttttggagtttcttcagcttcaatcacagagaataagagaaagccctaaactcaaatcttctcttctttttttcttttccgagaaaaagttttgggagtttttacttattacccgagaagaaacacaagaaaacaacctttcccgcctaaaagtttctttctttttttcctctttaagagaaaatttaacaatttcttatatatagaatcagttgaatattcaacaaccatcttcgtttaggtcttcttgttgaatttcttgaatcaaagtcatggattttcctgaaaagtcgcttaaagtgaggatcccggtgaaagctccggtgagttctaagccagagaaagaagaacaacaagaaaagaaagaggaagaagaagatagattcacaactccaaagggggaggaatttagaattccgccgctatttgagtgtcctctggcaccggagccacgcatcttcaagaaaaaaatcgaaaaacgtcgccaaaaagccgtcgggcaaaggaatatatcctttaacgttcaagatttagatactttcttcgcaagaacacaaaacgttgcagatgattcttgatacatatttaggtttatagttagttagttaattccttattaactgaataatttgcaggagtttttattcaatttttattttaactatcatcttaacataggatattatcttccctttttagtatagttttgggtagaattagtattaatatcgaccaatgatgaagaagaactaactcatattgttttgaatatttttctttgatagtttttttgatggatcatgtgtgatattattaaatttggttcttaacactttaaatcaaataaattcgtattggtaatttaataagtgatatatatatatatatatatgtatatcttttattcgtacaagatgtttgcaaaccagatttgggttaatgagtggatcaagcttgatacaggatatatatacttgcatcaaactatagagttactttaagattaaatcgtactatgaatgttcttgctaaatctatgattcataacaaaagtcaagaataaatttcataattagtgaatggacaaatcttagcttaagtcattttattcttcatactttggtcagctactggatagaaaacatttgaacccattctatgttttttttctccagtgaaacaagtcttagattgtgaccagattaacatttgtggaaaaatcaaacttggaaaagttgacccacacggccacacaacaaaccactgtccactgagtctaaatagagaggtcaatatcgtgtttggtaatg

SEQ ID NO: 30651 - DNA, 3000 bp, Unknown; identical to SEQ ID NO: 9863
  misc_feature (1)..( 3000): 2750-1469P.txt file - cDNA_ID_3034275; gDNA_ID_1974092; Annot_ID_180651

SEQ ID NO: 30652 - DNA, 3000 bp, Unknown; identical to SEQ ID NO: 9861
  misc_feature (1)..( 3000): 2750-1469P.txt file - cDNA_ID_3034283; gDNA_ID_1974092; Annot_ID_180648

SEQ ID NO: 30653 - DNA, 3000 bp, Unknown; identical to SEQ ID NO: 9865
  misc_feature (1)..( 3000): 2750-1469P.txt file - cDNA_ID_3034287; gDNA_ID_1974092; Annot_ID_180647

SEQ ID NO: 30654 - DNA, 3000 bp, Unknown; identical to SEQ ID NO: 9866
  misc_feature (1)..( 3000): 2750-1469P.txt file - cDNA_ID_3034289; gDNA_ID_1974092; Annot_ID_180645

SEQ ID NO: 30655 - DNA, 3000 bp, Unknown; identical to SEQ ID NO: 9859
  misc_feature (1)..( 3000): 2750-1469P.txt file - cDNA_ID_3034293; gDNA_ID_1974092; Annot_ID_180644

SEQ ID NO: 30656 - DNA, 3003 bp, Unknown
  misc_feature (1)..( 3003): 2750-1469P.txt file - cDNA_ID_3034296; gDNA_ID_1974092; Annot_ID_180643
attggttattcaacatataggattctgaatgaccgaaatatattttttctaatataattgtattggctgatagaaacttatacaaaccttttaaaagtttttaaattaacatcaatatatacaaaacatgattacacttacgacatcatgtgtgctgcataattacgtccacctttgttacaacattgctttgtttgtactgtaattcgaatcaaaattaccctcgttatttcttctgtctacagcatcatatatatacaacattttctattcttacaaaccattgataattatgaagtaatgaactaagcgcatcatgttcatgccttttgcggttgattattgaaatataaacaaaataaaatgatatggttgtttcgcactgcatgatgatcttacaagtcaatttcacccaaaaagctacaaacatagcaaaagtaggagtttcacgtcttcttgccatcacacagaatcaatatgttgaaacgtatcaaaagtttcttacattatatggtgcatacggaattaacatctggacctatatcatgcatgtttaatatgatgtcgtgttctaggaacgctagtggcaacgaatatatgatgatggttcatgcatatcaccgataaatgaacaaattatccattctgtattatattgatatatatagagtaagttgttatctgattgtggttggtccaaaaaatacatgaatgtttatttcgatcacactactacctctaccatcttggttttttccaattttttagcatgattttttatttacgattagatatatttctttaaaaaaacatgaacatgcatatgagtgaaagtaaattgacttgttagaatcgtcaatatttagttctaataattatatccattgctttaatcactttctatgttgatattattgtttgatcaaaaccatcagtataacctattatacaatagtttgatcaaaaccatcagtataacctattatacaatagttttgattcgttttgatctcttaggtttctttttagctattagaaacaaattcatagagactatagacattagacaatgataatgtagaacaacaattaatgttcctcaaatatcccataaaacctattgaatcaactggtccaaaaccaatacaacgagaacttattgtctacgtttatatgacccaaagacactaatcaatcggcctcaattagaggcggatttaaagacatcacggtatcatcatatccatgttactttttctgttctcttttttacttacccgtccatttctttcttttggcaaaataattttgctaaattacgtggcaaaataattttgctaaattacagcgaagaggatcacatgcatcagcactatttacaacaatcctttagggtatatgttagtcaaccccgtaacaccattcgtacccattaatcatgaacatttcgcaaagttttcccaccaaaaacggcgtcggataaggtttttggcattttgtgtttctttttttgtgtgcatagcataatttcattttaaccgtactattcgaagatttttaaattggataaagatgattcattcattacatagtcgctttgttgttactagtgataaattcatgttaatgattctatgattttcggccagctatctcattaattattaagacgtttaagtggagctattagcaatcgtgtatgacataatgattagcattttcatgtgccatgcccatgcatgaggcttttttttgtttaaaattttattctattatatccgaattttgttatatactaaatgaacatttgtctctgatttggtctactagttaattaacctttagcttcactaataaaaaatctcatgattttgatacttaaacccaaaacatattaaaaacaattagcagtcttttaaatcgataatgtgcttagatgattatacgttcgtaggaaactcttttgtttccaatgcatgttaagaactaagaactcgtatccttaagcaccaatgctttatgcttaatgcctcattagagatataaactgagattgactgtgttctgaatcatcataatataaggcacacaaagaacagaacaggaaatacttagcaatataataggtttccaataaaagtgaagaagaatacaataaacttttataaaaaaaaaagtatataataatttcacactcgaatcaaccaaatgtaagatgtcttgtccatttacacatcacatgagtaagtggattacagattgcaattgatgaaatctggatcttagctaaaaatttattacgttactatatacatcgagttttaagatgttcataatcacaaccacaaccacaagtttgaagaaataagaaacagagtaataatatatcaaataaaatttcatggctgatggaatcttttttctaattgtaggtccaaaaaagcctaaattaatggggaaacaaaaaccaaaattcaatagtaattttactaattatgtcttggttaaatagagtaaaaagaaaattaatcacaaacctccaaaaatcaactaattgagatcaaaacacgtgtcgcatgccaatagggcggtggatcacatggtaaaaaaattcactttaatttttgtctttcttcataattcatctcacagatttcaacttctcttttggattctctcaccgtacaccgtcggcgtaccactccccttccacaccgtcggcattaaaaatctcaaaccctaaaacccgtatccaataacccacccggtccaaccggttattcaaacccggtcaatccaaaattcgcctcggaatccaaacctccatacccaatctaacatggaaaaacctccaatcacaaacctccacgtggtgatcactcattggctcttattctggaatccaagaggacctttttagtataaagagccccttcgttggtcctatcaccttctctctctcacacactaacagaaagcacaaaaaacagagacaaaagaatg

SEQ ID NO: 30657 - DNA, 3003 bp, Unknown
  misc_feature (1)..( 3003): 2750-1469P.txt file - cDNA_ID_3034304; gDNA_ID_1974092; Annot_ID_180641
aaatccctaaatctctctctgttgttaccttcccatgggatggtcactaagaactctcataagagcaatctgggcatgacaaagtccatgaatttctttcagaacatcattaaacctttcaaacgcagctccaatcgaggtaagatccgtttgatttgttgattcttagtgtaagattaggtttttgtgaaatttgactaactttttcttcgttgacttaaaggtcttgaagatgatattgagcgaattgctgctatggagcaaaaagttttcccatttcaagttttagtttccgctaccaaagattttcacccgacccataaactcggtgaaggtggtttcggtcccgtcttcaaggtaaccctaattttgacatacccagagcttaaagtttccatttttagggttgtggttgtataattgtgtgtgtgtgttttcgtgggttttgttagtttggctgatgaggttgattggtgtgtaatagggaagattacctgacgggagagacatagcagtgaagaagctatctcaggtttcaaggcaaggcaaaaacgagtttgtgaacgaggctaagttgttggctaaagttcagcatcgcaatgttgttaatctttggggttattgtacacatggagatgataagctcttggtttatgagtatgtcgttaatgagagcctcgacaaggtcctcttcagtaagtttttcttctcaatgagattggtttgtatattaggataaatgatattgaaagaagatggttttaacatgtagtggttgcttcatttgaatgcagaatccaacagaaaatcggagatagattggaagcagaggtttgagatcataacaggcattgctcgaggactgctctatctacatgaagacgcgccaaactgcatcatccacagggatattaaggctggcaatattttgctggatgaaaaatgggttcctaagattgcagattttgggatggctagactctatcaggaagatgtaacacatgtcaacactcgtgttgcaggaaccaagtatgctctctctattgtttacccttaaaaagctcatttacatatcttcttgtgtcatttgaactctttttgtttgttggtgtttcatggtagaatgttatttaacgtccattgcttcttcttttcttatgcgcagtggttatatggcgccagagtacgtaatgcacggggttctatcggtaaaggcagacgtattcagctttggggttttggttctggagctcgtaagtggacagaagaactcgagttttagcatgagacaccctgaccagactcttcttgaatgggtaaagcctctagtctcatgctccattgtttatagggttgttgtgtgatggcctgacccagccaatattcttcagcgtaatataaccaatgctaaattctttctgaatgtgacacaggcatttaagttgtacaagaaaggccggaccatggagatactagaccaagatatagcagcttcagctgatccagatcaagtcaaactctgtgtacagatcggactactctgcgttcaaggcgatccgcatcaaagaccgagcatgagacgggtatctctacttctctctagaaaaccaggacatctagaagaaccggatcatcctggtgtcccgggatctagataccgtcggcgaacacaacgtccttcaggagcagcatcacttggaacattgtcgaccactggttccagcacagattctttcggttcaaacctgaacacaaacacgggaactggtgttagaggtacccccgcatcttctaaagcttcaactcggagtaatgccactagaagtgctggtcagagctctagctcagaccctcacgggaaacgacatatgagttattgaagtacataaaatctggtcataggtgattgtaaatagcgagctgcatatataatatttgtttcataatttatttaattttgcttttgaaaagtaaattaatttatttttttgactgcagtagtgatttagttttgtagtatgatttgttatattagcgggaaaaaattatgattcatttgttacatttgtatattagaataatcacttgtagtcccattatctaggtccccactattggcctcgtacgtataaaagcatattctcttgtacgtattaacggtaccttactttaaacaaaacataaaactaaaatgttttttatgcgttttaaattatttttcagttaaaatttataaaaagggtttttgtaaacaattattttgatagtaaaagaaatactaactgaaattagtggagaaaatacacaaacatatatttaactttctttaatttaaaatatacagattttgtttctttaattttttttttcaaattttagttttcatttatttttaaataaagtatgacatgtcataatgttgtattttgatttgtcattaaaaagggggtgaatcaaattggttcactctagaggtgaacttcgccaaagaatcacagaccgtcagtgttaatcatcagagacatcaacgtaatgttcctcttggttacttcttgctttaatgttcctcttggttacttcttgctttctacctgattcaggttcttcagttaaagtttctcttttcatttttggggtaatgcccggttgggcctcgttgttttatttaggttctagttctagggcctgcgtgtccttttaggcagttattgccatgtatgttctttgggccattcgtgcctctgtcggcttgttgggccttgtaatcgtttcggctctattggaaattaaaaataaaatatatatactaacccgttttgggtaaaaagttaggtccactaaaagacgaaaagagatcctaccaaaaaaaaaaacgaaaagagacgagccacacgcgtcaccttctcgtttagcctcttcatctcctttcctcagactcactgtgtaaaaaggcttttattttatcatcttcaggcttattcgattttcttcagatttgaaatg

SEQ ID NO: 30658 - DNA, 3003 bp, Unknown
  misc_feature (1)..( 3003): 2750-1469P.txt file - cDNA_ID_3034308; gDNA_ID_1974092; Annot_ID_180640
ataaactcgacccaaaaagttcaaagaagtctaaacatattgctgttcacgtgaaaaagacaacgacttaagaatatgacatttggtaaatgttacttgaagtcttgaagactactctttaatactttatcatcatcatattcgacaaataagcgtgtgcctgatttggtgtgatattgtatgtaccgtacgactctttcaaagtgtctccaacaagtatcattggatatactacgcggcaattaaacaaaataatgaaaaagctttaatttggttgaaatttttgccaaatgacgtaacctttctttattttacggcatagcaaaactataagtcgcaaatcgtacgtactatttcgattgtataaagattcaatgattctacaatttttctaaatcaaaaagttgttgaaagattcaatgattctaccatttttctaaatcaaaagttgttgtcgaacctccgtccgagtaaagattgagtttaatattattagttttatctaaatttctttttgtgaatttccaatagtcttcaccttaatttggacatctctctgatcatgctgactattaaattttttaacattccagcataaaaattgatcattttcagggattagtataactacaaccgttttttgtcaatcaattatataagatttattaaaccgaatacaaacgaaaacaaaacattgactctgatcgatatcacgcgttatggcggaataacgtttgtaatgcgattatgcagaaattttacttattagaaaaattttcatagtgtttagttgtttaccataacgtaaaaatatagaaattgcattttcgcctaaaaattataaataaatcattatgcaaataagtgaatatctatatagtagtttatatcattatgcagtattttattttgggatttattgcaaattttattgtgagacacatttgtattttattgtatacatttgtattttaaattttattgggatttattgcgaattttattgtgcgattatgcgacttatatcataatagaattatgtgatgttaccactcaaagtcattatcttatcacttatgaatataagttatgttatatatttatgtgaaatacatttgtacgtgaagttgttattagttatggttacgtatacattggtttgacacaggacagaaacatctaaaataaatgcagcgtaatttgcaagtactatttaatggtttcattgacatttgttgcaagtttctttcggtggatactgagtgatcaacaccctagaaagtaaaagacttcaaaagatttggtatttttattttgtttttttcattgacccatttatttatcactgtagagatataaacacgattgcaaaatatttatctaaatatacaataatgttttaatccgagtatataacaaattggcaagtgaatcagtgaattgattaaccgaatagtatgactcgtatctaaactaatacttaaaaagatcgatgttagagtatctccattgcaaatatttcatatggattatacaaaaataataaaaagtagaataataataaaacattttagctttctcaaatagtagtagaaacccacataaaaaaagtttctattttttctctataaaaaattttctttggattttttccgtactgaaaacttcttatattttattatttttaatatatatatttttattaactcatgtgagattttttcattttgcaatgaaaatgttcttattaaaagaaaaaaaaaattggaaaggtgaccaagcttgaccgatcgagctaagtcaaaagaacgcgtcttgcttgggtcatgttttggttgttccaagtggtatcgttttttttctccttttgaacgtcatcctcagtgatgtcatattttagttttaatttttgtttcaaatgatctcatatatatatatttttttgggcacacaaatgatctcatatagattgattttttttgtcacccatattagaaattagaaaacactacactaaatgcatgctccaaccacatagggttaaaagtctatgtcattgactacgaacgatgactccaagaaactaaatgaatatgatgcaaacaaaatctttattcgtcataagattgcgattatgtataaatactataaggtttaccggatatttcatttagtttgtcttaacctgataattgctctactagtggatctgccattgaaacaaaaaggctttccactcaaattctctgaggttgcacttgcacatgcatacaaacaaatattcttctaattgtttgcgcgtaagaaaaagaaaaaaaaaactatatccattattgagaaaagtagctgaaaaataaataaattaatagacaaaaatgttaatcaaaatttgcttttgagtaaaaattaaccagttgaatgaataaaatataacttctacagaaggtataagagtttacatgttctaatcctccattaaacaattataaaatacccacaaaatctaaaacttttaggtgaatattcattaatgaataattgaataccactaattaattatgttaaattcatcacaactttttcatgatacatcacacataaaccaccataatataataatgaaagaaatgtgaatttggttgaaaaaaacaaaagaaaaaagtaaaaaggttgaagcaagagactgacttttatccaaaaatgtgcttgaattttaattaaaaaacacgaattcttcttgactttcgtttcaaatctaaatccttcctcgcataaactcttccctgaatcaaaaacccattctaataaaaacaaagacgatctcaaacacgcttcttcttcttcctcattcctcaatcatccctaagacgtcacctcacttaaacccaatccaacgccgccgaaccaaaatcaacttcttcggttcttccccaattcaatactactttctgggtcgtcgttaaatccctaaatctctctctgttgttaccttcccatgggatg

SEQ ID NO: 30659 - DNA, 3003 bp, Unknown
  misc_feature (1)..( 3003): 2750-1469P.txt file - cDNA_ID_3034312; gDNA_ID_1974092; Annot_ID_180639
ctctcaattcaccatcatttctctcaccatttttactcattataaaaaataaaaaataaaatctcccataccattaccatttttctaacatgttattattatttagaaaactaataataacatactctaacaatcaaattctttctcaaaaataaaatgttattcctcaatttcaaattaagtgttaccactacttttttcatggaagtgactagcgagttattcttagttttcacatttttagaatcccaagtgagtttcgaaataattttcttcttttccgggattttggagagccattggtgtggaaagttaatcacatgttaaaggcttaacctaaaagcttagactgcaaaccccaccaccattttttttaatttttaaagtctctatattgattcggccgacgaatgttaatcattgaggtcgcttctcctttcttgttttcaatgataaaattaaaatcaaataagtacatagtataataaacatggtaatagaataataatacttcaatttttttgaattaatcgatttccatttactatatatttgcttaggagcgtttctcacgatcacctgtttaattctaaatcaacaaacgatcaagaaatgatgtgaaagttcaactgattgcatgcacctaccaatatttataccttagaaatcttaaaactacgatgaatatgtaaactccaaatcaaacaaaaattcggaaagattctatactataattaagtagtaaattattaggcaaaacagtgaggtgggagtgacctgtcattaaactttgtatgagccacggccaacaccacatggcccttttcattcacagaaattattttgttgctaaaacaaataatcgaaatcacaagtttccaatatctctctatggtatagtgatcgaatatttgatatggttaataccttcaataatattaattaattttctgacatagtataagtttaagtgggatatactggcccctttgaatattaattacttacatgtttaacatacatttggtgatgattatctcttcgcaaacacgcaaattataagttgacaaggccacgaggttcaaaaaacgacatatattgtaatgtgtcttcgaaaaagtcaatatttgtatgtccctatgatgtcaatgtgaaccattcggctaacgaagagaataataatattataacattcatacacaatgttgaaatgtcccgtcaatattttataaaaatggacacggtctaattaattaaaatgaattcggttttgatgtgaaatataaaaatgaagtggcacataatgttagactggtccattaactcttaaaaattttttaatcacaatttctttatttatttgctcatttcgaatatcgattaccttgtctacactacacacgttacatatgtaattgtttatgaatgatgcatagttagttgcatactttcaaaattggataccgccaacttttttatcaaccatgttttttagtagaagtgtttttaaacctcttttatttttaactgtggtctcctttattttggttgtaagctgtaacaaggtcttgtcctctctttatggttctccttacgggcctagttaaacttggtcaaaataatgaaagaagtaaagtggtgttcttaaataaaaggaaactaaaggaaattttgttacccaccttcttattaatcgattttcaattcattgtacgacagcataatgaatatgaatttttggggatttaaatgaaatatccttcacgaattggccaatttactttaaaaacccttagttaaattattaatagaaaaaccttttaaatataaaagttttaattataaaaaaagttagatattagtccatctatttaaaaactcctaactaaattactaatgagaaactctcgaatacaaaattctagtgaaaaaactctttcatataacttcatttaaatatattttgtttttaaacctcactaacattgatttaaaccgttattttacaccgttttaagtttctttccgctgaaaaatactatggtttccggttcaaaatgtgtgggcccttttacgcgcatgtgggtcagatgtatgggcccattctatttttttcctccaaagttaaaggcagagtggcggggtcatttaaaccacgtggcaagttttttttttttatcaactactgtttcttttgctgaaaaagctaaacaacataaataaaattcaacagtatgattgcgtcacgagcaatgcttaatcataaatcactcgcttgacgacaaaaaataaaatcattaatcagtagctttccgctacactaatccactctcctcttataaatttcaaaggattcatagtttttatgttaagtattgataattttttattttttaatatgttaaaactaatacataaaaaatatataactctgttaaatataatttgataaaatatgttattacttactatttatgaaaatacagacataaataataatctatatagactataacctaaaataggaaggtgtgttggcaaaaaacctaaatggaaggttaaaatctcaaaaaaaaaaaactgtaatcagataaaatcgaatccaaaacattgaataaaaatattaataactcggtcaaccagtataaacaataatctttttactagtacttaatttcttattttatataaactaaaacttaatatcaaacaactattgtttccattatatatacctacccgtaacctttaaataatttagtacatacataaatgtgttattatcctaacctttttttttctctgactcttagcttcatttccattttcatatatataatgttgtcaaattcaaattaaaataaaataaaaaagtgtcactaatggtcggtccgatttctccggctaacttacttaagctgacaagtctttctcctccttcctaacttcgtcccccacacaaatctctctatctctctcaagctttctttatcgtcgtctatg

SEQ ID NO: 30660 - DNA, 3003 bp, Unknown
  misc_feature (1)..( 3003): 2750-1469P.txt file - cDNA_ID_3034366; gDNA_ID_2214478; Annot_ID_133192
aaaatgttttttttgtgggacaagttaaaagtggtagaacatcaatttattagaaacaaagagagtgtatttttctttcttccccatcgggaaaccaaacccaatttatttatatattaaactcgtacaatataaaatcttttatatttaactaaaaattcagtaaatatccattcttcgtaaatatttaaactctattttttctttttaaaaagatcaatttacatcttaaattcaaaatataaaccataatatattatgtacatattaatactgcattctaaacaatttcccaatataaaaaataaaaatatatagaggtaaataacttatcataactactttattgatggcctttataattagtttctgctttggtagaattttttagttcagcctttatctcgttatctgcatgtctctaattgagctttgttgctaagttttagcttttttttttcttatgcgatcactttgctggttgttgtgttggttggttcggttccttgtacctttgatgtatcctctatttctctttttatctaggttaagcttttttattaatgaaatattaagtttgattggaaaaaagaggcacattaatagaaagttagctttgttgtttaggttttatttaatatatgtacgtgtgtcatatgtcataggtaacaatcttactatttgattattaagccggtttttgcgtgacggaactcttcttgtatttgccatcaagtgaaagaaagaggaacatctttgccatagtttagtttgcactctctattggtagcttgagttttcagctattcgaatgtggccttctacacctgcttcccttctatttgacatacttatcatgtggtaagctaacccatccgtcaacgaggaagtacaccacatatagtaagtatatatattagactatctagatattttgttaaagattttatgtaaataacttataaaatatattgttattgttttccaaaacaaataaactagttgacacatacttcttaagttcattgttaatttatataatacaacaacctaaacccatggtgatgattacctttagatcactaaaacttttatcaaaaattttgcctaattttcagtagattccatcagagaaacagcttttctacaaaaaaatttcaccaccaaatctcttttctttaaaacttatcaccacaaacacttgtttttctactaacttttttttaatattgtaaaatcttacaatattttaaaagttaaattttgcttatttcacgtcaatttatatgtctcttacaaaaataacaatatttctgcatcaacaatattttcgagtcattaatatatatgttttacaatattgtaaaagctaatgttttttaataaatcttaaattcattgtcaatatacaacaacttggacccctagagatgattacctttagatcaccaacacttttatcaaaatgttttcctaatttttagtagattccatcacggaaactgttattctgccaaaaacaattttacaccaaatctcctttctttaacatttatcactaagactttttcactaacttttctttcaatattatgaaaattaaataataaattttacaatattttaaaagttaatttttgcttattttccacgtcaataatatatgtctctttaaaaaacaacaatacttagcttaaaaagtattatatttctagatcaacaatatttccgggtcattaatatctatattttacaatattgtaaagctaaaaaaaaaaaaatctatcttgcgtgtcaataataaatgtctcttactaagaaaatatcaagattttgtctaattactaattagaaaggaagcactaatttttggggtgaaaaaatatgatttctggacaattagataaaaaacaaaaaaataattggactaaataaaaataaaagataaaagtgaaaatatttaaaaaaattggggataataatccaaataaaaagatttggtcactgggacagattccgcactatatatatattcttgtctaaagaaaataaaaaaccctaaaaaaaagaggcagacagagagatctcctctttgtctttttactttatctcctgaagtttcgcctcagtcatctcgtaagttttctctctctttctcattcaattcaatttttaatgtaatttcttgtttgatttttctattttcttcgagaaaacaaaattctcctgtaaaatttaatattataaaagtggtttctttttcatttatgtttatataattttcatctttaatcttaaattctggtaaccttaatgcgcgatccgcttttctaaagttttgtgagagagaagagatctaaaaaaatccacaattttgttcaaatcttggagttaaatgctgaattttaggccttgttgcttagatttatggcttaaagtttcaaacttttcattggatatggtacaaatcttgtagttaaacactgaattgtgtccctcgtgggcgttgttgctttgatttatggccaaaagtttcaaacttggatatggtacaatcttgtagttatacactgcattgtctctcttgggtgttgttgttgctttgatttatggcttaaagtttcaaactttttcttggagatggttcaatcttgttgttgaaagttgaaacactgaattgtctctcttgtgcgtgttgttgcttagatttatggctaaaagtttcaaactttcttcacttcagagcttcttgaatggaaactatggttttgtggttttggttaatcttctgctaacactttttgccctgttttggtttgggaaagtgagaagaaaatgtcaggatctgagacgggtttaatggcggcgaccagagaatcaatgcaatttacaatggctctccaccagcagcagcaacacagtcaagctcaacctcagcagtctcagaacaggccattgtcattcggtggagacgacggaactgctctttacaagcagccgatg

SEQ ID NO: 30661 - DNA, 3003 bp, Unknown
  misc_feature (1)..( 3003): 2750-1469P.txt file - cDNA_ID_3034366; gDNA_ID_2214478; Annot_ID_183227
tcatcaattaatcagccaaaacaataagaatttcttttggaaaatctttcaaaaacatgcattgaaaatataaaacgataactaatttaatacaaaatttaatttctaaaacataactaatttagaaaggagtgagtgatatttaaaaaaaataaagaaaaaacgaaaatgttttttttgtgggacaagttaaaagtggtagaacatcaatttattagaaacaaagagagtgtatttttctttcttccccatcgggaaaccaaacccaatttatttatatattaaactcgtacaatataaaatcttttatatttaactaaaaattcagtaaatatccattcttcgtaaatatttaaactctattttttctttttaaaaagatcaatttacatcttaaattcaaaatataaaccataatatattatgtacatattaatactgcattctaaacaatttcccaatataaaaaataaaaatatatagaggtaaataacttatcataactactttattgatggcctttataattagtttctgctttggtagaattttttagttcagcctttatctcgttatctgcatgtctctaattgagctttgttgctaagttttagcttttttttttcttatgcgatcactttgctggttgttgtgttggttggttcggttccttgtacctttgatgtatcctctatttctctttttatctaggttaagcttttttattaatgaaatattaagtttgattggaaaaaagaggcacattaatagaaagttagctttgttgtttaggttttatttaatatatgtacgtgtgtcatatgtcataggtaacaatcttactatttgattattaagccggtttttgcgtgacggaactcttcttgtatttgccatcaagtgaaagaaagaggaacatctttgccatagtttagtttgcactctctattggtagcttgagttttcagctattcgaatgtggccttctacacctgcttcccttctatttgacatacttatcatgtggtaagctaacccatccgtcaacgaggaagtacaccacatatagtaagtatatatattagactatctagatattttgttaaagattttatgtaaataacttataaaatatattgttattgttttccaaaacaaataaactagttgacacatacttcttaagttcattgttaatttatataatacaacaacctaaacccatggtgatgattacctttagatcactaaaacttttatcaaaaattttgcctaattttcagtagattccatcagagaaacagcttttctacaaaaaaatttcaccaccaaatctcttttctttaaaacttatcaccacaaacacttgtttttctactaacttttttttaatattgtaaaatcttacaatattttaaaagttaaattttgcttatttcacgtcaatttatatgtctcttacaaaaataacaatatttctgcatcaacaatattttcgagtcattaatatatatgttttacaatattgtaaaagctaatgttttttaataaatcttaaattcattgtcaatatacaacaacttggacccctagagatgattacctttagatcaccaacacttttatcaaaatgttttcctaatttttagtagattccatcacggaaactgttattctgccaaaaacaattttacaccaaatctcctttctttaacatttatcactaagactttttcactaacttttctttcaatattatgaaaattaaataataaattttacaatattttaaaagttaatttttgcttattttccacgtcaataatatatgtctctttaaaaaacaacaatacttagcttaaaaagtattatatttctagatcaacaatatttccgggtcattaatatctatattttacaatattgtaaagctaaaaaaaaaaaaatctatcttgcgtgtcaataataaatgtctcttactaagaaaatatcaagattttgtctaattactaattagaaaggaagcactaatttttggggtgaaaaaatatgatttctggacaattagataaaaaacaaaaaaataattggactaaataaaaataaaagataaaagtgaaaatatttaaaaaaattggggataataatccaaataaaaagatttggtcactgggacagattccgcactatatatatattcttgtctaaagaaaataaaaaaccctaaaaaaaagaggcagacagagagatctcctctttgtctttttactttatctcctgaagtttcgcctcagtcatctcgtaagttttctctctctttctcattcaattcaatttttaatgtaatttcttgtttgatttttctattttcttcgagaaaacaaaattctcctgtaaaatttaatattataaaagtggtttctttttcatttatgtttatataattttcatctttaatcttaaattctggtaaccttaatgcgcgatccgcttttctaaagttttgtgagagagaagagatctaaaaaaatccacaattttgttcaaatcttggagttaaatgctgaattttaggccttgttgcttagatttatggcttaaagtttcaaacttttcattggatatggtacaaatcttgtagttaaacactgaattgtgtccctcgtgggcgttgttgctttgatttatggccaaaagtttcaaacttggatatggtacaatcttgtagttatacactgcattgtctctcttgggtgttgttgttgctttgatttatggcttaaagtttcaaactttttcttggagatggttcaatcttgttgttgaaagttgaaacactgaattgtctctcttgtgcgtgttgttgcttagatttatggctaaaagtttcaaactttcttcacttcagagcttcttgaatggaaactatggttttgtggttttggttaatcttctgctaacactttttgccctgttttggtttgggaaagtgagaagaaaatg

SEQ ID NO: 30662 - DNA, 3003 bp, Unknown; identical to SEQ ID NO: 17000
  misc_feature (1)..( 3003): 2750-1469P.txt file - cDNA_ID_3034370; gDNA_ID_2214478; Annot_ID_183226

SEQ ID NO: 30663 - DNA, 3000 bp, Unknown; identical to SEQ ID NO: 11082
  misc_feature (1)..( 3000): 2750-1469P.txt file - cDNA_ID_3034373; gDNA_ID_2214478; Annot_ID_183223

SEQ ID NO: 30664 - DNA, 3003 bp, Unknown
  misc_feature (1)..( 3003): 2750-1469P.txt file - cDNA_ID_3034376; gDNA_ID_2214478; Annot_ID_183221
tgctctgcctccaagcatgagccaactaccaaactctggtcttgacttgtctgactctggttgattccctgatgtggtgtctgaaactgcatctgcgtagatagcaaaaggtgtcttggatgatctgcaaaagacaaagttgcttaccatagtgagttgcagaataatttaaaggtatgagttgatagaaaatgcagataatgaaaacaacgagaaatatagaaccaatcaaactacttactgatttggctttagctttttggcttgtgggttagaacttcctaacgcctgccttcttgcatctacagaaaacattttcatgtaagatagcttaccaaaacatttcagtggtttccaagttaagttaatgtgactcactattatctcccctggacaataaagtgccaaagcttcttgacggtaagtcattattctcctttggttcctgctggtaggtagaacattaattatgattaggaaaaaccttagtccataatgaatagatataaagtgttacaaagagacaaaactttttacttcatcagctgtgttggaccttctcatcgttctcaccataaacttcttgtacgcgtcattcaacttttccactggctttgcatccctgcacaagttcccactttcaaatcagaccaataacttggagccgaaacatgaaagtaagattacatatctgttcatttacctagagattccaagattgaagatctcattagcagttttgaccttattcttaaactcaatgtgcaaagcataagctatatagtagacagcatgtgtctttccaatctcattgacctccaaaaacttgtaaatcacttccgcatcagcgcaatgctccgccttcaaaacacacacaaaaactatgagtactctctccataacaaagaaagaatcatctagagggtttaattaaagatagaatcattacatattccaaccagactttaagataacgaagatcatccttgtaacgttcagagtgccaaaatttacgaacacattgctcatatatcactaacagtcctgaacattctcctcctggtggaaaagcctcttgtacccattttatacaccttccaaagaaaccaattaagaagctcagtttacaaattggtcacagcataaagattggttcaagaaaaatttcaatttttcaacaacccaatcaagaatgataaaaggaactcactctatccatggagataaagggtcatctccttcatactcatcaatggcttcaatcaaattcctaattcacaaaaacaacacaaaattagacaagaatcgagcgattagactaaaacccaagagcaaagatgtgagattgaaatcagtacctgcgtttctcgatgagattctttctcaattggtggtcagagtgagatttgagagcgtggttgagaataccaacattgcgacctctcttcaatggccggacgttctccttgaaaagctcccactcgtatccagtctcctgcttcgaattaagaaactctgcctctggatctgaaacctgaaccttcgtttcggctgccatcgtcgtttcttcgagcaaattttgaatatcagagagaatatagccgttagtttactcaatgagagagcttcgcaactttttgctttgatgtacgcatactcggagcgtatagacgcttttgatgggcctaacttagatgggccatgatttgatttcttaaacccattaagtggccatctaaaccgaattgtgtatactcctactacaaataatcgataagagaagaaaaatgacaatgagcgaaagtaaaatagtaaaagaaatgacagaatacacttcattaattcaattggctgaacaaaataacacaataatccagagaaaattatttttactgttttgttttcttctaaattagatggttttggtcttttggagaataacaatcaaagcaaaagataaaagagaagatgtactctttttttaccttctttaaataaattacgagcataattcactttttgacttggaagctaaaaaaaagttcatccacaaccacaagatgctctctgtctgtcggttcaacaagggatgatcacatacattgcgttacacgctaaacctagtgtgctcaattatgaattcctaaacaaaacgtactcaagattagaagttgtatacaaagtctgtttttccattgtaacaacttccaccgacaataaaacagtaacagtttattgaagaaaatgaaatgaagaaaacataataaaagaattgatatttatggtatccttcagtttgggaatgtgacacacatgatctcctttattgacgtttaagtttggaaaaaaaaacaagtctttaaatgcatgcaatcgtattcgcaatcaatatacattttgcttgttattactaaagtctaaaactaaaagccttttgccgtacgtttaagaattccataactggaagaacaaatcatgtttttaattcaaatgtttaaaacaaagtctacattcaaaggaatttagaacacactttttttttttactttttgctgggaattcacaaactctttaacgagtctattcacatttcacctttccgtgcccaaactcattcgatttctctaaccgaaactaaatcatcaccaaagaaggtacaccgttacgccaacttgcccaaaggaccatgtgtccccaccatgctgccaattgggagccagcaatacataaaacagacttgatccaactttttacaagttagatgcagtgtctttttcgtaaatcataatagatccaagcccattctcgtataacctccaccacatcactcctcatatcatatgtgagacagccacgagtcttctaatttctacacgccgtgtcggcaaagcctctcgtcacttctctctgacgcttgtcgtcacttttgaatttttttaatttttaaataattgataaccgaaacggtgcgttttactcaccgtcgtcgggaaaaaaaacatg

SEQ ID NO: 30665 - DNA, 3000 bp, Unknown; identical to SEQ ID NO: 11112
  misc_feature (1)..( 3000): 2750-1469P.txt file - cDNA_ID_3034382; gDNA_ID_2214478; Annot_ID_183219

SEQ ID NO: 30666 - DNA, 3000 bp, Unknown; identical to SEQ ID NO: 11084
  misc_feature (1)..( 3000): 2750-1469P.txt file - cDNA_ID_3034390; gDNA_ID_2214478; Annot_ID_183217

SEQ ID NO: 30667 - DNA, 3003 bp, Unknown; identical to SEQ ID NO: 25366
  misc_feature (1)..( 3003): 2750-1469P.txt file - cDNA_ID_3034394; gDNA_ID_2214478; Annot_ID_183215

SEQ ID NO: 30668 - DNA, 3003 bp, Unknown; identical to SEQ ID NO: 25367
  misc_feature (1)..( 3003): 2750-1469P.txt file - cDNA_ID_3034398; gDNA_ID_2214478; Annot_ID_183213

SEQ ID NO: 30669 - DNA, 3003 bp, Unknown
  misc_feature (1)..( 3003): 2750-1469P.txt file - cDNA_ID_3034406; gDNA_ID_2214478; Annot_ID_183208
gcagatgattgattgttacattcaaaccctagcgaaagtcgttggaaggtataatcttcagattatatatgttaattgtctaggttgctgttgaaatataatgaaaaatgtatgaaaaaatctagggcagaaaattctgtttactttgtgtatttgactctgtatagtgtttgttgttggtttttggttagtgaggaagaggcgaagaagcgaatctacaatgtttcatgtgagaggtatttagggtttggttgtgagattgatgaagagacatccactaagcttgaaggtctttttacttagaacttgtttcttatgtttactatgtgttaactgataataaagaagagtattcttaaagtgttactttgtttacaacaggtttaccaggtgttctgtttgtgcttccagattcctatgtggatcctgaaaacaaagattatggaggtaattgttctgcctactattcaagtttaacctatatgtttgctttatttctccaaatgaaatctttgctagtgccattgtcattgcaaattttgagtcttagtgtgtgcctctcttgaaacatgaaggaaatatttttataagtccatcttggcaaagctaatgagtcttttggctatgattagctttgaatgctaatggactgacatcgtctattttctcttaaccgatttgtgcagatagttaataatatatctaactgcagtctggtttagatgaaaacatatattgcatgcaactctagagtgcttttctcttggaacgtgaagacgtgttattgattatcagtccatcttggcgaagctaatgagtctttgggctatgattagctttgaatgctaatggactgacatcaaataatttttatctaagccgacttttgcagatagttagtgtaatatctacctgcagaccggtttagataaaacatacattgcatctcctgagtgcttcttgtttcaattagtccattttggtgaacctagtgaatctattggctctgtgtgcgcactaaattaatgacatgaccagttgagaagataaaatatatacgcactgatagtatctgtgtgtcactctccctagccatgtaaaagatagttcaaagttcatcttggtaaagttaataattcttttttagcaatgtttagtttagaatgctaatagacttgtatcagtttcttcacttggtgtatgtgtggattttgaatagcaacatgattaatttcctggttgagaaaaagtatatatgtaaccataataacccggtatagagatgattggaggttttagtaaagaaccatggaccagaagtccttcttggcaaagctagtagctttctgccatttctagttttgaatgttaatggactcacatccagattcgctctttcttgtgctgtgctctttatattgaggaagcatggactcaattacgagagatacaccagctttacatttctcaaattaaatctcaactatacagaagaacatttactgtgatcgaattctgatttattcttaatcgttgtcgttgacttgcagctgagctgtttgttaatggagagatagtccaacgatcaccagagaggcagaggcgggttgagccacagccgcagagagcccaagatagaccgagatacaatgacagaactcgttactctcgccgcagagaaaacacaagatgaactgtaactgaagatggtatacatacacctaagctaagccagtatgaggatgatgatgatgatgatgataatggtggtgaggatgatgttactgccgccacacgagggctctgtattccagtccgttgcagttaatggaccgggcttactttggatattgttgaaattctaagttttgtttctatgtaacaattttatttaataatgtaaattgaggtttcactgttttaggaaattactttgggtagaagattagttttcttttcaagaacaattcatgtgggaaatggtaaatttattttagtaatcttttagaatgctgaagcatgctaaaaagagacgattactcttgtggtcaatctgtggaaaagcaaatacaatttggggttaaaaggaaacaatgtcaaaataaaagggcgatctgatgatatctccaataaataaggggaaaatgaaaaagtaaacaagttgattttaaaatccagcggacaaaatctgatgtgagtttttttcttttaatctctcgtccccgaaaaaaagttgacgaaactctctaccggaggcgctagttttcgccgtcggcgaggcaatttaactttccggaggtgcgacgcttctactccgcttatttttttctgctcttgttatttctcgtctcatgtcaagcttctttatgccttctctttgggtgtaaatagttggattagtcgcgaaaaaatcacgattggttcttcatttcgatgtatattagggtttgtgtgagcatatgattgctgagaagtagctagtaattgaatgtttatgtggttagtgggtaggagaatgggctgtggagatatctctactctgcgccgtctagttctttaggtcgtggattacttaatgcgattagattcaatcggatcgtagttctgatctattcgttcatcttgaagtttctagtcaagtagttaggaaatggtgttggtttttagaggcgcagtcactgtttcttgtacaatcagttaaataacttgctttttctggtggttaggagcttgttaaatgtgatcgaagatctatgatatgataaaaaaatctggaatagtattgtgttggtaggtttctgtttctgtgattttggctccatgtatcttgtaattttgaagttcctggtaatgatttctatgttggacgagggagtggaaactcatgaattcagctgtgcattgccttataattgtcttttgttctcattctattagtttgtgatttatgtctgctgatgattgtgctctctgctcattatctcaagggaataaagcaggatg

SEQ ID NO: 30670 - DNA, 3000 bp, Unknown
  misc_feature (1)..( 3000): 2750-1469P.txt file - cDNA_ID_3034414; gDNA_ID_2214478; Annot_ID_183202
agtcagattacaaggacgagctcattgttaaactccatgttaatggtggttgattgcggattggtggactacataattgtgcagatgcaggaatctgaatcatcgtcctctgtatcgctaacttcgctgcaagcataaaatggcagacgtaagatatatagttgttttcaattgccaaggggaaaaacaacaatgtaaaagagtaagttcttaaacagaagataactactctattggaccttcaactaccaatatggatgtaaacgacaagcttttccaatgggtttagttagtgtttctagacatagtaagtagattatcttcaaggttctttactaaattcagattccacaaccccaaattgaagtgagaaacaggactacaggtttgtttcgtctatcagttagtacactaaactgctgccagataggagcacaaacgctataagaaatttatcagctacattacacagggaagccaaattgtttctcataggctcatcaacaaaaatattggaaatagtcaaatcaatactaatctaaggtttacaatatggctagagcaactataagaatttctctatggaaaccattcttaaacaaaaagaccaccagtcaaagatcaagaagaccactccaaaagcacggaaatagccaaaacaaaactaacctaaggtttccgatacgaatcccgcatttgcaaatcattaacatttaagtaagagctagaccaaataaaagagaagagaatcacgatacagcgaaaaacttgaaataatactctacagagatagtgttgttaaggatgatattaccttggttcataaactaaaacctcagcaagattgtctcctttaatgtcattccactgcacagtcctcttaatcttgtcagtgcttctagacatgcctcctttccttggaggcaataaacattgtgactcactttcttcttcctcaaagatttgatcttcaatttcactgctatttaaactaactatagccttattctcacatccattagcttctttaccctctccacgacccgtatccatagcaaatcttcaatctatggaaactaaaccccaagcttaaacaatctggagaagatagagatatcactcgtgttccctaattcatgtcaaataccaaataccacctgatcattcataaaccctaagctccctaaccattaacctcaatttcgcttcagtattcaggggtttgaatttgatcctgatacaaaacaaaagataaatatgaatctaacaaaccctaatcacaaaatctgaaaatttgtgaattctaatatatcaaagtcaacgcttggatcatgaatcaagatcaggatacgaaatcagaaaactggaaatgagaaaaagcattacttacgtagtaaaatggctgcgttttctctcgattagacgaacgaaaaaatctcaaattttctcgaggaaaaaaatcaaaactttgacaacgattaacacaaacaacaaacacccatatcgaatttcaacaataatcgaatccaacaatccagggaaacctcgaatttcccaaaattttgttctgatccgataacgagaaaaaaagaaaagggaaagtgaaggattgaaatctgagagacgcgtttctctcagctgagttctgattgggtgtcgagaaagtgtgcgaaaagaaaattcgttaaataaggaattaacggctaagatcaaacttgagatatttttgtagatgagattaaaacttgttttggcacacggtaggtaatctcgttatgagattatacttcggccgttgactaatcatttttaattagcaaacttgcaactttttaattacttgtttttttggttaaacaacaatattttaattaaacaacttgttgagcttttatgtgttctataatttaataagctttgaatttttcatgttgacaaattcaatatagacttctagatttataattgataataaattaaattgatagaggtctagttatcttagcatatgtatagttttatgtgactaagattacttttatagttttaaattatataacaaatcagggtattttacaagttgtattatcaaaatgaatctatataaataaaacatgaatttatatattgatggtcatcataacaaagacacattttgctaaaagattttattttcctgtttcataaaaaaataatattaataaataagttataaattcatgtcagataatatggttttacaatgaccattcttttaccctaagtaaacctcacgtccacactgaatagaaagaagaattgtgacttagtatgtggggtaaactaataactatatgttggtgaagtcaataatagcttgcgatttgtgtgaaaccgacgcttaatgttcattggattagcttggattacattccaagtattgcttttttaatgataagattaatgtccacataatgacaatagaaaaacaatcatttatgtttctaacagtagaattttgcctttgaggttgaataaagatcagggaaaaaatatatgaaaatctcattttccatggtttcgatattttagatgtaatctaagtttttggaaaaaacacattctacctctgtcaaattccttctgtgtcatcacgggaccgtgcgaatcggcgtccatcggatcccacagctttagtccgaaggctgagaaagcattaaaactctttatcaacgggcctatgtttatattcggctcacaggtacatccacatgttacgtttcagtggcagatacaatagctaaaatgttttcttagaaagaaagataaaaaaatgattgcaaatttaaactgacattttactcaacatccaacaattcaccaatgcacgaaagaaaaagcgcacttattaggctctcacacagatatatgtgcaatgcacacataaaaagttatagattgatgacattgtaaattataattattgtaccctcaagtttcttccgaggtgtttcaagaatg

SEQ ID NO: 30671 - DNA, 3000 bp, Unknown; identical to SEQ ID NO: 11074
  misc_feature (1)..( 3000): 2750-1469P.txt file - cDNA_ID_3034418; gDNA_ID_2214478; Annot_ID_183197

SEQ ID NO: 30672 - DNA, 3000 bp, Unknown; identical to SEQ ID NO: 11072
  misc_feature (1)..( 3000): 2750-1469P.txt file - cDNA_ID_3034422; gDNA_ID_2214478; Annot_ID_183194

SEQ ID NO: 30673 - DNA, 3003 bp, Unknown
  misc_feature (1)..( 3003): 2750-1469P.txt file - cDNA_ID_3034430; gDNA_ID_2214478; Annot_ID_183192
tcttccttcacttatggcatttattctgcttagtaaccttggagcatccattactgaagtttctcaagacgctcttgttgcggaatacggtttaagatatcagataaatggtcttcagtcttatgcacttatggcttcagcagttggaggaatccttgggaacttactcggtggatattgcttactcaagacacctcctagaatcttgtttcttgcttttacagctttgttatctcttcagctcattgtttctttatcttctaaagaagaatctgttaacttgccacggatcggagaagtaactccagagataagctctgttttggggatcgtaaagaaacagtttttggatcttaagggaattgttcaggtagatgaaatctcccagcctttgatttggatagtatcttccattgcattggtccctcttctctcaggatcagtcttctgctaccaaactcaagttctaaaccttgatccttcagttattggtatgtcaaaggttattggacagttgatgcttctctgtttaactgttgtttatgatcgttactggaagaaacttcccatgagggcgttgatccatatcgtgcaactcctgtacgcgttttcattactgtttgattatatcttggtgaagcaaataaatctcgcgttcgggatctcaaacacggcttttgtgctctgtttctctagtgtagcggaaattcttgcacagttcaagattcttcctttctctgttttgctagcaaatatgtgccctggaggctgtgaaggatcaatcacttctttccttgcttctactctgtgtttgtcatcagttgtaagcggattcactggagttggaatggctaatatgatcgggataacatcgaagaattactcaaacctgcctgcaggaattctgatacagtctttggcagctttggtgcctttgtggtttattcattatgttccaatgttagagcctggttttgagagagaagggaagagagctatgagtaagaaaagcagaaggaatagacgtgtagggagagtcataggtcaggaaagttttgcttaccggcgggaaagagaaacataaacaagaatcagtctgagttatagttagagctagttcttcagctgacataacattgtttcttgggaggagaagattttgtgcccatgtaagtaaggatggatactgatgttggtaaacataaaagtcccaagattgacaagaatctcataaatccaatcaaagcaatgttatatctcagttcacaccaatcttgctgcagcaactccaagaatctccccactgtttcattcatcgttcttggtttggagacatgagatgtcatttcttccaagacaagccaacgcacagtgtaatatcttgtactaggataacaatgacctagaaatgaaattaaagttttggttagaccattttttgaatagtaatgaaattgctatgtaatgaaagaaaatttaggatgtgaattaaagttttgattagaccattttgaatagtaatgaaattggtatgttattttgtaagagatttacggttttcagaaagattgtttgaatagatttattagcaaattggaatattcagtggctgagattaaagattccgatgatcttgtggttgtgattttaggaacctagtaaattaggaggtgtcactttagggattaatggttttgcatagttgatttctctatttaagagcaactctgacttctctattgcttcattactcgaaatcctatgttcctccttggctcttccacctccgatcacctaccacaacaagtttttctcctccttttttcgagtctttctcttccccttttcaaaatttttgaccatccatcatgtttctatatcatgaagggaaaccatcatcgtcacaaagttcattctttccgagtaacacttttggtaagatttctaacacatatatcacgtttaaactatcctctagagtttaaaataaatcatatatgttagacattgttcaacattaaaatatggtggaggcaatagatccaaagtttactagaccacttatttttgccgatcaacgacggtcaatggccaagtcatattctcaaatttttttctagtagtgatccgaatactctgaccttctctcctagtctaaataggattctaggaatctatctttgacatcaaagattttgatatgaacatctaagtgagcagggtccaaaaattaaatattagtctaaaaagtgtaattttctttataatttattttttggataaaaaatgaaagtttttgtaagttaatatattgatataatcactttcaaagatttcatatatcaatataaggaaatgaatattcttttatgttataaaagatatattttatccaaaagtgataagagcacttgaatacaaatgtggattgtactggcatagaaacaaatcttttatatattaattgagaagtatatttcagagtctaatggtaaaattttaaggaaattaccaaataaatgacattagaaattaaatacaaataatttttcatttattttcctttaatttaaatagaaatgtatagttcctttttgcttgaaaaaaaataaaatataaaaggaaacatacatttatatttaaattaatgaatataataaaatatattgtatttaatggaaacgtcattttggtaactttcttataaaaaaaataagattctagtctgaaatatattttttaattaatatagaaagatatgttttaatgttagtacaaatcacattaaacaattttgaactattaaaatttaatgtagacgattaagatcaaagttaaaaaaaatatctcaaaaagatcagtcatttcctctataaatacgtgattttagtccattgtcaaaacgtcaaaaacttgtacgcaaggatggaaaaaccaaataattagtacagaagaaaatatttgtctcttaagtcttaatagatccaactagccgaagaaatg

SEQ ID NO: 30674 - DNA, 3003 bp, Unknown; identical to SEQ ID NO: 25377
  misc_feature (1)..( 3003): 2750-1469P.txt file - cDNA_ID_3034442; gDNA_ID_2214478; Annot_ID_183188

SEQ ID NO: 30675 - DNA, 3000 bp, Unknown; identical to SEQ ID NO: 11070
  misc_feature (1)..( 3000): 2750-1469P.txt file - cDNA_ID_3034445; gDNA_ID_2214478; Annot_ID_183187

SEQ ID NO: 30676 - DNA, 3003 bp, Unknown; identical to SEQ ID NO: 26934
  misc_feature (1)..( 3003): 2750-1469P.txt file - cDNA_ID_3034470; gDNA_ID_2214470; Annot_ID_182995

SEQ ID NO: 30677 - DNA, 1314 bp, Unknown; identical to SEQ ID NO: 26933
  misc_feature (1)..( 1314): 2750-1469P.txt file - cDNA_ID_3034470; gDNA_ID_2214471; Annot_ID_183046

SEQ ID NO: 30678 - DNA, 3000 bp, Unknown; identical to SEQ ID NO: 11010
  misc_feature (1)..( 3000): 2750-1469P.txt file - cDNA_ID_3034487; gDNA_ID_2214471; Annot_ID_183036

SEQ ID NO: 30679 - DNA, 3003 bp, Unknown; identical to SEQ ID NO: 26563
  misc_feature (1)..( 3003): 2750-1469P.txt file - cDNA_ID_3034495; gDNA_ID_2214471; Annot_ID_183028

SEQ ID NO: 30680 - DNA, 3003 bp, Unknown; identical to SEQ ID NO: 26550
  misc_feature (1)..( 3003): 2750-1469P.txt file - cDNA_ID_3034502; gDNA_ID_2214471; Annot_ID_183025

SEQ ID NO: 30681 - DNA, 3000 bp, Unknown; identical to SEQ ID NO: 11007
  misc_feature (1)..( 3000): 2750-1469P.txt file - cDNA_ID_3034507; gDNA_ID_2214471; Annot_ID_183021

SEQ ID NO: 30682 - DNA, 3003 bp, Unknown
  misc_feature (1)..( 3003): 2750-1469P.txt file - cDNA_ID_3034510; gDNA_ID_2214471; Annot_ID_183020
ggaagaaactactgcaatatagttttggtagtgccaaaagtgatccaatcaattcacttcgctaagcaatagttatgcggtggtcggaggccggtctagtgggaggggaaggttctgccagccggtcgagtgtttcagatagttcttgagtatatcggttggagattcgacggtccattcagaatagtgttggattggagagaacacatagcgctctccgccctgactaagacacgatttggctccgttcaacaacaaatccccttctgatcttacgaatccagctccgggtttctctttatcagcggcctaatcaccaaacacaaaaaaacgtaatgttaactataacattataaagaaaatgatttaagaacctcaagaacgtacaaaggatattacgtaccttctcagtgatgtacttaaagacagttttcttttcaccagcttcatatatgttgcactgagaatgtatctatcaaaacaacgtcaaatgtatgaacctatgaacaaagatgatggcaaaatcgtaaatgtaggttcatctatgttatcttccgattacggacctgagattcgacaccagcaccaacagcgtaaatggcccaatgacgagtgtagttgttgaagagatggacttttgcgaagcgaacgcgagggtgtcgctgacgtgtaccgtcgaagaagcagtgatgtatcgtaactcttatgcatcggtccgtaacgtgacttgtgtccgctcctattaacatagttttgttgtggttcatgaaatggcatctgaaatatttgtttgaaacataaaaacatgaacacaatgggtagtcatagtatatgtaatctgtaaaaaaaatcatgtttaaaacgatttttagaatatcttttcaatacaaacatagactcaaaacaatataagatttaacttacttagtaccataaaagatttaagagacaaaccttgagacagtgatgtcagtgctttctcgtgtgatatcaatcaaaccatcatagtaattcttgagactacaccgatcaatccaaatattgtgcgattttggtttgatctgaatagcgtctgcgtctggtcccacaccgccttcaaattcaagattgcagattataacgttttcacactcttttagccttaacccttttcccgttatcttcactttttgtcctctcccgtccaccgttgtgtgcgatgatacgttgacaaacgaagacagattgatcgttcccgatacatcgaacacgatccataaaggttctggcctcttgcaagcctctcgcaacgatcctggaccctcgtctgcacataagattattcgtttttatatgaactaagactcgaaccgcacaacatcgtactgccactcaattttaatatgaatttgaaaccagaggtgtccaaatttgactaaaccgacccaatgcttagacatcaatatggtggatatcagaattactttggcgtaaatgagtaagaatattttaaaaagacgtaagcagctctgatccaatgataatttcatttacattaccaatttgaacatggttaggatatcagccaccattttttcttaagatatatgcaagcaaaattcagaatccaacaaatggttaatttgcttttttttttttaccacagaaaaacaaattacgttgcttttaagattttttttttttgtttttaaattactttggaagttttgttcctatttggagtatttggctgacatatcacttgatcatattttttttctatttggagtaacaaaacagagaactacaaattaaataaaaaaaatatataaatccaagaatttgagggataaatgaaggaaaaaggggacttttgaaatttaccagctaaagaagtgacgtggcaaatcggaccatttagaccaccaacggcggcgcggccgaaaccttcggcctttccggcgagagagcggaggctggagtctacgtggcaataaggtcccactgtcatgtggtgatcggatggcgatgacggagctggagctggagctggagcggctgtatatggtggtgggaaaggtgaattgggagcttcgccgggaaaattagaaccgccgtgatgggatctgtgaatgccatgtaagtttcccatatctaatttatataacaaatgttgaattcaatttcggacagtttcagtttttgtatttttgggatataattgctctttgtttcaactgaaccatattgatggtagctttgttggaactgtgccagaatattgttctttttttgtcggaaaaaaaaaaactttttcatttttttttgttgccgacacaaatctatttttatttatttgaataaaatgttggaaaatgtttgtctttttgttaagacgatttcaaatttatagatattttcgcatgataagattctttaatttttatagagtccctttttattttgaatttacattttcatatcaccacttagcttaattttaaaaggaaatgacaaaccaaaataaaaatatgacaaatttttttttttggttattggacagaagtttaagaaatgtggctaaaggcttaaacatgatttagaaataatttttcaaaagtatagatatccttaatgaagcccaacacacatgtttgagactcgtcacaagtgttgacaaaccaaaaactaaagcccattgctaactaaccaagtttttttttccaattttcctaaaccgtatattgaagatatatgtacagtattcggtgaatttaaatcggaatgaaatgctgacgtgggaaacatccctaactgaagaagatgaagaagaagaaaaggcaacccaaaaaaaggtaattcagctgcttctcctacaaataatcagatcgcaaacccttgccgtgacactgaaggcaccggtggccgacggcttattcatctttctccaatcggagagtcgtcgttttttacaatatcatgatcccgctttgaaatttctctgttttctaatctctcaaaatg

SEQ ID NO: 30683 - DNA, 3000 bp, Unknown; identical to SEQ ID NO: 11003
  misc_feature (1)..( 3000): 2750-1469P.txt file - cDNA_ID_3034514; gDNA_ID_2214471; Annot_ID_183012

SEQ ID NO: 30684 - DNA, 3000 bp, Unknown; identical to SEQ ID NO: 9878
  misc_feature (1)..( 3000): 2750-1469P.txt file - cDNA_ID_3034546; gDNA_ID_1974096; Annot_ID_180709

SEQ ID NO: 30685 - DNA, 3003 bp, Unknown
  misc_feature (1)..( 3003): 2750-1469P.txt file - cDNA_ID_3034550; gDNA_ID_1974096; Annot_ID_180708
ttttcaggtctttgagaatcggttttactagattgaagacgagagttttgaatgattggtgaatttgttgatcatcaatggagaagaagagatcaccaagaagtagtaagagtcctggacctgcaattttccctaaaagccctcttgtctacgagagttataagtctggttgtggttggaaattgataaagttcttcgatttcggtcatgtcaaatctggtaataagagacttggttcagagaagaagaaattcgtcagagattctgctggttagtagtttttaaaacactgtttcttggatcatttcgttacatgatcttagtgttaatttgattcttcttctttttttgtaggtaatgtttatactaaaagtcagcttgatttgcttaagaagcttcatgagaagtgtcagtgtaatgatgtaagttttttttgtagttttttggtttagcttaaggagagatttgtgagtgagaaactaaatctcttgatttgttcagcggattgtggaagaagagagatcatgtaagcctaaaacaaggagaagatctttgagttctgatagagaacttgagaagtatgaatctaaacctgttcagggattgctagagagagagataagaaggatcaagaatctaaaggatgaaacttgtgatgtcccggataaacaaaagcaatcttcgttgagtgaaattgagaatgatagtgataagcagatggatatgaagaatgggagagattgtaagaagagttcagagattaaccttcaagcttgtgtgaatgaagctgctgaaacctttatctgttcaaaggcagaagagaaggggaaagatcggtctaagcagttcatggaggcgttagatattctaagttcgaacaaagaattgttcattacactcttacaagatcctcattcattttcggcgaaaaaaagcttagacttggagggatctaaggtaaaagaaccgcgtgataaatctccatcaatggctgatgatttggatagcattgttctcttgaagcctagattatcaagctcggttgatgataaagtgtacttgagattcaaacatctagccaagaagttgaaacttgttgttggatctaacaaagacagcaatcacgcagaaaacaaacccgaaggtagcagtagaggtagagaaatcgaggctgctgcttttagaacaagtgatgtttctaccagtacagttggtcatagaagcccggagtcaccggtgtttaggcgcaagaaacgggttgaatccgatgttttcaagctaagtatcgagaacgatgttttgccaaggagattcatggtggaaaggcaacaggagagattaaattcttcaccggtttatgaagttccttatgcattgagtagtttgcagacaaagctcaaagaaagaagacagaagctagagaagaagagagagagcttcaagttgtggtctttggacaagaacttcgaggtttttgacccgaatccatacaattctaatctaaggtttctcgaaaacaattgtacaggtaaaagattacataacttttaacaaatcatcttcaagccaatgagactaaactgttaaaatgtgaaacaggttcttctgagtacaaaagtctgagaactcatgtagaagacggattcgtggaagatagatatcttgagagctcattagcggtaaatactgagagaaagagtagacatttgttatgtctctactgtctacgctgatttggtgttaatatatgctttataatcgttgcaggagacgaatttgagcctagaaagacaagactgcaacattcatgacccgaaacaggagcaggaacaaccgagtcctgtctctgttcttgaaaggattcatttggaagacgaaacagttatccccggaaatgttaaaatatctaaccttggtaaaagtccatgaatcaaagctttcactattatcatccttggatctgtttgatttacctgaaaaagtctgttactttcttgcagaagagaagattggattatcatttgatgatcctaacattgatcttatagaaaaagaatctgttcatgagtttgtgaagaaagttcttgaagcttcaagattgaattggactaatcttatggcaaggtgcaacgaagacacatcactactcgatgaattctcacacggtagtcacaacgaccagcttcttcttgttcttgattacaccgacgagattctccgcgagatttaccgtcaagacatcaagttttggcctttctcgccatcgaagagctcgagagtcctcaatctagaatcatcccttagagaagatgatctgattcacgagacgatgagacattttgactggagtttactctgctctgactctcctacaagatcattggatcagatcattgaaactgatctaataaagccatgtctttggttggattttggtggtgaatctgaaggtgttgtgtctgatattgtggaaaagattcagcaacaattggtgcttgagatctctcatgagctaagaacaatgcagagaagcatattatgtcgattaatctgaatctcttcggagatattcaactttttttttgtctgtataaaaaagtttataatttgagaatctactcttcatttttagttatctaaattaagaaagattcgatcttttgattctttcagccccgaacataggctggttcaagtaaaaagcttctaattcattgaaaaggttttgacttttgaccaattgagattttgtattggatttagggttttagcagcggccggaaattgtgggcaaaaagattcgaactttttttcattatcccaaatattaatgacaaaagatctcggctttctcgatttttgtgattcagacaatattcacaaaaccctagttgctgctcctgctctgtttttataagcctccacttcccgccaagcccctcttagccataaacagtgaaaaacccttttgttccttcaccaagctctaagaccctatccatg

SEQ ID NO: 30686 - DNA, 3000 bp, Unknown; identical to SEQ ID NO: 9882
  misc_feature (1)..( 3000): 2750-1469P.txt file - cDNA_ID_3034554; gDNA_ID_1974096; Annot_ID_180706

SEQ ID NO: 30687 - DNA, 3000 bp, Unknown
  misc_feature (1)..( 3000): 2750-1469P.txt file - cDNA_ID_3034558; gDNA_ID_1974096; Annot_ID_180705
tcggtgattggagttactggtacggatgggaaaacgactactacgtatttgattaagagcctctatgaagcgatgggtgtgagaacaggaatgtttagcacagtttcttgttatattcatggcgataacaaattggatacgcctaatgctacgatgaatcctgatgctgttttggttcagagtttgatggctaagatgttgcataatggaactgaatctttggttatggaagcttctcctcaagaacttgctttagggaaatgtgatgaagtggatttcgacattgcggttttcacaaatttgactagagaaaatacggattttcgtggtactgatgaagagtatagagatgctgaagccaagttgttttcaagaatggttgatccggaaaggcataggaaagtggttaacatagatgatccaaacgcagcattctttgtccagcaagggaatcctaatgttcctgttgtgacatttgccatggaaaacaccaaagccgatgttcacccgttaaagtttgagctttccttgtttgagacacaggttttggttaatacccctcaaggtatactggagatctcttcgggtttgttaggacggcataacatttataatattcttgctgctgtggctgttgggattgctgttggagctcctcttgaggatattgttagaggtgttgaggaagtcgatgcagtcccaggaaggtgtgagttgattgatgaggaacaagcttttggtgttattgtggatcatgcaaacacacctgatggcttgtcaaggctgctagattcaattcgagagcttaaaccgagaagaatcattaccggtatagatattttcttccatctaatagatactctttgcctgttcggccgttcctatggtctttatatgtgtggtcatctgattattttagttgttttatttatttattgaagttattggttgtgagggtgagaatgaaagagggaaaagaccgcttatgacgaaaattgctactgaaaagagcgatgtgacgatgttgacatctgataatccgaggaatgaagatccatgtaagtaactctaagaattagattgagtctatctcccttgagtgtttctggaggtatattaacagttaattttccaatgtggttttagtggacatcttggatgacatgttgtctgggattggatggacgatgcaagagtatttgaaacatggcgaacacgattactatccgcctttggcaaatggtcatagactcttccttcacgatattagacgtgtagctgtacgttgtgctgttgctatgggtgaagaaggtgatatggttgtaagtattcaaataaacccacactctatacagtactttactgagtgtgttatcaaagttgctggatttacctttatgagcaatcaaagtaatatagttctcgggtaaatagctttgcttgacactgatttttgcaggttgtagctgggaaagggcatgaagcgtatcagcttgaaggtgaaaagaaagagttttatgatgacagagaggaatgtcgggaagcattacaatacgttgatgagcttcaccaagctggaatagacacaagcgagttcccatggcggtaagtagaaccgtaacagctaaaacaaccaacgataaccaaagtttctaatctgtgaagagttgctgaaacttgtcaagatgcttcacgatcactaatctgttcttccttgtattactgtgcttctgcaggttaccagagagtcattaatatctctgtggtgaaatcattagaagagaagttagcttagtccatgaaaccagattttcttccaccatggtccaattctcttgcgaagatcgatttgcacagaggtaatgaattctacacaagtgacataaaaatcatgcccaaggaaaagagattacaccactgggaggtacttaacgttccaatcaccattaccttaaagttattccattgctcacttcacctgtttttttggacaagaggaaacctaagctatcgaaatgtaatattagactaaacttaattcagattttctgtcattgttaccgcaggaggaagattttaaaggtggaagaagatgcgtacaaattttgtaagggttaaaaacccaaaaatgtaagtggttctgttttgggtatgttttgatagcatgtgtttaatttagatgaaccaattcaaaccgaaccaacaaaaatagattccggtttaaattatttattttcttacatgtatccaaacttgaaaaaagtgaattcaaagaaaaaagaaaacgatgaaaatacggtttcaatttcttaatatgaaaaattgagaaagtaggaagacatgattgaacaataataagattaggccttgtgatatattgtgacaagaacataaattacgaatgtttggcaatggtgctagggaatatagtcttttgaaactattaagcatactttgaattttatattctggttataaattaaaagatttcccaatatccattcgtatttttgggaccactccaccaaaaccaatctaatcaaaatataaaaccaaataaataataatttgcttagagatagaaaacatgttatgtccgaggaaattgtcctaaatgtcgcaacaaacgtcaattcattaatcgttttgtttaatacaaatttcgacaagattgtgatagatccagaaccagtttagctaaaccggttgaatcagaagaaacgccaaaacccggtccaatagctcgacctaacgccgtcgttttcaaagttccttcactctacttccttctcgcttacgtcactttccacagatccaacaatgatatcagataaaattaaaatattcccaatatattttctaagaatatctccctatttatttttatttatttaaactattttaatctcttccgtgtttcactcttctctctctctcgcttctcttcattgtttgtgtgtgattacagcgaagaagagagaatccttggagcattccatg

SEQ ID NO: 30688 - DNA, 3003 bp, Unknown
  misc_feature (1)..( 3003): 2750-1469P.txt file - cDNA_ID_3034562; gDNA_ID_1974096; Annot_ID_180701
tcgttttgttaaggaagtctgaggggtccatttctaagatttttcttatccaataacaatctccgatttatgttcttcctaattagaccatggttctgtggattacgtcgagtagtatcggttgtgggtggaggcgatatttttttgcaaatgtcagaccaccatgcttctcttagccaactatgccggacgcttatttttcagagttcttccaggatttgtaatcattcggaggtgaccgtccgtcgtgtggaacggtctgaacataccatcaccagtacatgtgcttgcgaagccatattcgagtttgagaacattttgagatacatgatcgttagattccactagtaggaagtagattagatgaattagaattgaggttttagaataatttttaaaaaatgtgaaggaagcaaaactgagtttttggtatctgatttgagaaatgcttaagtttgatttgtaggctacatatatataacattctcttcacatatttgtggtctaatagtttcaaaattctaataactgctgattaattttggtaaagtttgatcaggtttggttacggaaaatgtttatttcttcaaattatagtatctcaaatgaagctttttaaacatacgtgcccacatgaacaaggcaagtgaacttggtctctttctaaccacatttacacattattaatttattatatatccaaatattatagctaaagggttcataaagctggtggtaatggattttttctgataagttcgaatcttaaagtagatttatataatctgacttttattgttctatattgtctttggtatgccttttacttggaagaaatctcacatacacttcttgttcatttgttcatccagctttgatgcacgtgaaatctggtgtcatgttattatctcaacaaataactataatttatctgcgaagttaaacttttaattagaggataatagcgaattttctcacttcataattagtctttgcaaaattgtcttcctttttaagacttgttaggaaaatactaaatctatgagtgcaaagttggttggttacacgtgtcaaaagcatgagttcggaagtggggttgatgacctaactcattgaacttatgattttcttaataatccaagttatgattttcataaaaatttatattttcttaaacggacaataatgtgtttttaacttttaacgacgtgactcttttgttttcatttcagaaaacgacttaaatctaattcccaaagctcaagttcatgttcctaatataactaagaactaaataatttgtgttctgtttataaaaaatattgtgatttagtaaaagtagacttttaatgtactttctaatcgaaggtcaagatttccttagaaagatttcattttattaaatatcgacaacaaagatgacatgtttaggattaaattggtgtcttagacctaatctatgactcttgtattggaactagatgttgatgccgacaaaaagaagacgaatgaaataggtgttgatgatgatatttaatttcaaggcctaaacttttttcagcttattaatctcgtaagaaattatatggatttttatcgatatgattaaagtattaaaccagattattattagctacagatattttttaaaaatatactttcccaaaggtaggtgaaatgcttatcaatctcaataaaaaaaataaaagcaacatgacgaatgtatccttaaacttggccataaacctcatcattttctactttttttttttttttttttttttttatctttttacatttttaactctttagatttaattcttctaactcccaacaatctccttaccaaaatttcctccttaaaattcaagttttttggaacgttcaaaatagtactataagtttgtttttattagattttagtgagctcaatcggtgacagctaaacattattgcacaattaaatcacaataactctctgcctgtcttccttttttgtgtaaatgcttcaataataattttcccctttttggaaccaagaatcagtcaattgcattgattcttttttaaccaagtaagctaccaaagtttgtagtattattcaaagatgaaaccaaaaactactgtaattattggtcacattatgtgactcacatagatatttcaccaaagctgaaaaagtcgctttattattgggtatggggtagagaaaagtaaataagacccaaatataaagtcaagccaccgtgcaaaacaaattgaaattgcgttgtgacatgttcttataaatttctgaattatcttattacttagtttagccccacacttaatgtgcacacgagaaacctaaaactaaaagagatagattcgattctcccacacgtgcgcttctgctgtgtcacctttctctttgaaaggaatgatcgtcattttcttttgcttaaattatcttcaatttttttttccttaaaatatcttcttccactaatcttcgttagttatgcacacaaaattctgaaatattttgacaaacaatttgtcatttttttttttaaagagaaaatagtcgttataaattaatattttaaacaaaataatgatatcttaataaataaattagagaaagaaaacagggaaaaaaacaaattagtcaaaattttcgcaagtgcaatggacaaaattacccctaaagatcgtataatttacaaagaactttgtctttgccgtgttttgaccttaaaccttgacacacacatacacacgaacacacatatacatatacatgtatatatgtatttttctggaagagaaacaataacattcccagaaatttcggggttacgtgtcgctttatttgtaaaacgatttttcagattttgattgttaaagaagctttctgtgtattatttttgatttttactagagaaaaactcgaatgctctgttttgttctctcgagaaaattctcagactcagagaaaagtaaaaacagagaagaaagatg

SEQ ID NO: 30689 - DNA, 3000 bp, Unknown; identical to SEQ ID NO: 9883
  misc_feature (1)..( 3000): 2750-1469P.txt file - cDNA_ID_3034569; gDNA_ID_1974096; Annot_ID_180698

SEQ ID NO: 30690 - DNA, 3003 bp, Unknown
  misc_feature (1)..( 3003): 2750-1469P.txt file - cDNA_ID_3034573; gDNA_ID_1974096; Annot_ID_180697
atgcaacgcagactcgtaaggttaaaaaaagagtatatctacaggaaaagcttggaaggtgatgagcgtaaggtctatgagcagaagcggctgataagagaagcccttcaaggtctagtgatgattttttttttcagtatctgttgaaacaatcattgattcgatgtgtatttttcgtttttctgattttggtttatatggtttaacagaaggaaagccgattcctactgagctccgaaacgtcgaagccaagcttcgacaagaaattgatcttgaagaccaaaacacagctggtaagaatttggaagctagatttttccaattggtttgaacctgtgatatgaatggtttgtggcatcagctaatggttatcatctaatcatgttgttactagttccgcggagtcatatcgatgatgaatatgcaaatgctacggaagcagatccaaagattttgttgacaacttctaggaatccaagtgctccgctcatccgattcactaaggtattgttttgtttagtttccgtcgttgaatagatgctgacgttataatgttcctgattccttttcattgatggtgtggtttctgttgcaggaattgaagtttgtgtttcctaactctcagagaataaatcgtggtagtcaggtatgtgtgttgttctggcttctgcacttaaagtcatttggaaatatctaattctctttttttctgtaatctggttttgttttgcaattgatcattgcttgtggtttcttcatcgatgttgttaaattgattgccaatggtattagctcccttttgtttcctgggtataactattgcatgtgcatagacttgtatcagattattgttgaatttatgcgcaacactggtcatatcaatgaattgcatattagatcaagctttataatttaaaatgtagttgagtctgtccaattctgcagaatctagatttcaaataaaagcaagactaatataaacgatcatttaagctggagttgtactgacacttatattcaacacaaaacctctctatgtaagtgtaacacggaaactatgttgcattcgaatcgtaatctaagtttctttcccactctgttaatttgcaggtcatttctgagatcattgaaactgctcgttcccatgattttactgatgttatattggttcatgagcaccgtggtgtgcctgatggtctcattatctctcatctcccatttggaccaactgcatactttggattacttaatgtggtaagtaactctttgaggatctgatttttatatccaaatctttcttctttcaactcctagtttagcctttttacttaatccaaagtcccttctgtttaggtaacaagacatgatatttcagacaagaaatccattggaaaaatgcctgagcaatatcctcatctcatttttaacaactttactactcaggtatatctctagagccaaaattcacttcgttcttactgtaatttggtattggaaaccatcaagcttcgtcgtgtctcatagaatgatcgctctggtttattcatttctaatgtaaacatattttcaaatttgatttccctttgttttgcagatgggtcaaagagttggaaacatcttaaaacatatcttccctgctccaaaactggatgcaaaacgtatagttactttttctaatcaatccgattatatatcattcaggtaaaattttctcacaatgatcagattttacgaattttaattggtgacatcaattgtagtatgcaaagcctaaggtcttaaggcttatgttagcatttggtaatctgatccacatagaaacagcatgtaagaacactgtaaatacaacagatggagatttttataaattcttgtgggtatatatatataggaatcatgtctatgataaaggagagggaggtccaaaatcaatcgagcttaaagaaatcggtcctcgatttgagttgcggctctaccaggtacgcattctgcttaaccgaatcaaaactgttttcctcgagtaaaataatggtttgataaagaatcattctagttccttagtaacaatgttgtttctgtgtaatgcaattatttttgcaggtgaaattaggaactgtggaacaaaatgaagcagagatcgaatgggttataagaccgtacatgaacacctctaaaaagcgcaagttcatcggtgaatgatgactaaacggaacagctttgaaccctttatctaaattctgttttacttatcattctgttggaagagctgttcagtttttgtgtccttagagaaaattgcgatgattttgttttaacgtttagcttataaaaacaaaactttcttgtcttcaattagtatttatcttcaaccatatactgttgcgtgagtcataataaaaaattttgtagtagtatttttatccacgaattcaaacaaaaattatctgagcagcatcgaagtgctaaaaggtattggaaaatggataaacacaaaattgtcaaaattctaaactataatttttattttttaattataaatatctttcatcgtgttgttatatatatatcagtcccaggtttcgtctcatagtttcagttgtgtctctttcatctgatcatcggatctatcggtaatttacttcttcgtcttcctcagatcgatttgatctctgtgaaagtcgcgaaatcgaattttaatttcgtttaatcatttgcttgcttcccagttttatttttgttttttgttaatattatatcgaattttctcggccatatttttcattttaaattctatccattagttttataaaagtccataacttactgctctgtgttttctcttttgattcttctctgtttatagtgagtagagagagttatcatctagggtttatagattggagattttagccgcaacaaggaggaagtgtttttaatttaattttattgttaagagttattgttgctttagggatttttagaatttgggtgttcttttaaatg

SEQ ID NO: 30691 - DNA, 3003 bp, Unknown; identical to SEQ ID NO: 30690
  misc_feature (1)..( 3003): 2750-1469P.txt file - cDNA_ID_3034573; gDNA_ID_1972138; Annot_ID_179199

SEQ ID NO: 30692 - DNA, 3003 bp, Unknown
  misc_feature (1)..( 3003): 2750-1469P.txt file - cDNA_ID_3034585; gDNA_ID_2096290; Annot_ID_195346
aagggggtgagtatgagctcttgagggagatttttccttcaattttctttaagcaagagccttgatcgatcattgttataactacatatattatatatattgagagagagaggtagagaaaaaaaaaacttatatgtaacttaagatcttattttgtctctcttatttgcatgtacatattttttcatgaaagaatgagacagttgggcttgcttatatatttgatgatgtttaatgtgttaccgttggatacatattttcgcttccattttgtgaaattatattttcttcttttggttagttttttacattatgatattatgctgtgtaatttgtactatcatatgtagaagcgaaaaagacataactctagctaggagcctacgattgatctcccaaatgttgattataatatatacatatgcttttgggaaacttaagtattaaattgacaagttcaaatggtcaacttcttactgatttatatcttaataatcaaaaattacaaaaaaaagttacaagctcatatgtgatgaagaaattagaatcggaaatttaatgtaagggtgttgatataaaaggttcaagttgtagacgacgaatatctatgtgtgtgaacaagtaaagaaaaaacaaaacaagttgagatctaaccttgtgtcctaagagaatggacccgaataaaagatttgactgcttctgctttctatcttatccacacacacatggaaacatagactgtggaccaataatattacccctaccatcaaaactgaaaacaatgttttaattcaaaaaacgaaaaataaaaagaaaatactaaacaataataaaattatatatcaaatctcagatttataaagagtgaatgaattacaaaaaaaatttgaaggaacgagaaggatgcgaagaagaaccttagaaaaagatctctttatatattaacttgtaaatgtgtttgtgcaaatgaaagtataggcaacaaagtaatagtggattctctatatataagtattttatgaggaacaagaggaccaaatttctgaattaataagcaatactattatttgggagcgcatttgtgtcatataccaaagtcattgaatttagctgaaacttgaaatcatgagatgaacgagtcatgagatcatagaacatgtggatttctgaaatttcaacatgcgcgctccaatgtaacttcagtttcctatttgaaaactattcttaaattttgaaattcaactgatatgtccaatctcgaatcttttcattatcaattatcatactcaatttgtattaaatcacttcaaatacagtagtttttttttttttagtttaaagacgtttcttaaaggttttaaatgttatgacacattcacaattatcatcactggtaaaatttgcattggagtgttcttggaaaacattctttcaatatagtcataaaattacgtttgacatataattcttacaaacctaaggtatattcgcaaaaatgttatagcaactttgagaaaacatattaaatatatacataaatcctttctatgttctagattttgactaaatatgtacatghttttgactgaagaatgatttggcctacacagataactattaaaatgatcatataccaagtcaaatcatatattgaatcatacgggaaatccatttgacacaaatctgtattagatggaacatttattttagtattttcatattattttgcttataaaaagaaatctcggtgataatgattttggttttgttttcggggtcgttatcaaattcacctaacaaaaacaaaaaaggaagccagaatgttagaaagagaagcaaagttataaaagatcttccgggagaatcaagtaattgccaaaccccctagtccctagacaactacaatcatatgacaaacattatattattttagaaaatacatacaaaagctccgtttttaaattgaaaaataagcttatatctaaagaaagatcaatttattacgtcaattttaagaagaattttaagcatattctaatggtggaatatcatctttcaaatacttcccaaacaccaaatctaggcatcgaaaccgttgtggacgtgtagatatcatttgtaatctattgccaatgaccgattgattgtatcatcatcaaaatgaaaaatgcgtggatattgtaaaaataaaaattttagttgacaaactcatgtcatgcgacataactcattgggtcaggcaaaatactacattcgaatccaaatctggcaattatagctagcactattccttgtatcaaaccggtaataaagctagaggtaaagttggcaaacatagatagtttataaacaactatgctttcggatatcattggtcttctttttgacttacattcatattatataatgttgttgcaagtatatgatatgtttcgaatgaaaagaaaaaaagtttcgaatgaccaatcttctcttctcgatcaataattggattttgctggtaaatgaattatttactatatatcttctttgatacgtctcttcttatttaaatgacataaaacaaatacaataatccaaattttaggcacgtcaacattattaactcttaagtggacataaataatctcactcttgacggtctttcaaaggtattgtattagcatgaaattctatattaattcttaacatttacctttatcttgtttttgttcctaagaacgttttctaaaattctccaaaatgggcccaaaagtatgaaatccaaattgagcccaaagttgtgatccagtgaaacgataaagctctcacgaggttcaagctcccacaagctcagatcgtgggcggtaaaagaaacggttaactaattgtaaaaaatgatttttttttttctacttcactaaaatattacagttttttttagcaaaagtaaaagtttcgagaaactctgaaaaagcagttttcaatcttaggagcagtgtatgtgtcatgtacatcgagatg

SEQ ID NO: 30693 - DNA, 3000 bp, Unknown; identical to SEQ ID NO: 9909
  misc_feature (1)..( 3000): 2750-1469P.txt file - cDNA_ID_3034595; gDNA_ID_2096291; Annot_ID_195395

SEQ ID NO: 30694 - DNA, 3003 bp, Unknown
  misc_feature (1)..( 3003): 2750-1469P.txt file - cDNA_ID_3034595; gDNA_ID_2096291; Annot_ID_195417
tttcttctgactctttttcaaattcgataaatgttggttgatcgtatctttcattatagttctatgattcagagtatcatttcctattagatccctttgaattccatattcgaagttgcgatcaggtctcttcattaaaaagaatcgattcaatacatttcttatgtacccatagggactatattggaattggatttgaatcatatttcggatcaatctatattgattgactgcctccattatgttgttgctagcaaataccactcttttttgatcttccaaataattcccgcaggagatccggacccaaatttttctgagccttcgataaaaagattcattttcttcataaaaaataggaggtagaaccaataaagatttcttttttgattcatccctgaagttgaaaacctccttcaagaattgtctttgatccaatccgtaggaatcaatagaaaaggcaaatcccttatgatacaccagatccggctcggttattgatagagtgaatagatctgccatttcttgaaatctctcttctgactcgtggcgtaacgtgtatccccccctcttccgttcatggaatagatgaaataaatcaaaaaatggatttttgttcaagaatgaaatcttattggaactgtccatatccagttcatccttcggaaccatatcacatcccagatctgatgaaataggatgaattgagacggtattttgtaaatacgtaattatcttgaatatattaactatttctttattttccgatcgcctggaagggacaaaagaaacatcttgttctttcttcaacaatttctgatccctagtggacctctcagtaggattcgaacccagatgaagttctgaccatctgtcagagaaaaaagaacgaatggctcttgtaggattcccaagaaattcttcgctttcttccggaagcagatgattattcattcgcttctcacgttccgtgaatagccggggcattgaggaatagccagaaaggtatttagggaatcggtctgattctatctctcttccttccgtttgaataaaggaaggatccaaaagaatcgatctttcttttagttgttgaatctctctttgattgatcaatgtgtgatagtgatattccgaatcctcattactaatggaatcgaaaggatctatgaattgatcagaagatccgttcaattggctagaatccgttacttgaacgaaactagatcttgtagaatcatattgaatatttgacgatacgtttcgtaccttgctaaaaaatctatccttgtttaccaaccacacattgtctaaccaaatccaattctctctcgatattttcctaaaaaaatccgattcgtgcggattcttcccccaactaacgaagagatcttggtggaattgccacatatgaaattgagcacaattttgcaaagaaatagcccacttgtttctcgagaagagatgggaaacatgctcaatatcatttgattgaatagttgacccagctccttgttgtttgcagaaaccctccacttcaattggtattttttcacgaaaagcaaacatgagataacaaatccagtctttcactaagatttcgaatagctgtcccgaattcaagttgattatgtttcgcctcttactcggagaaagacgatcaaacaattcccaatcatggcccttgcggatcggatcatccatataatatacaaaaagaaactccagatatttgatatctttctctttaaatgagatatcaattccagcgacggtttcattagatatcttacaacaaaaacccctcttttttccgatccagttcctccaccaccgcgaactccagttagattcaggcatgatacacttttgagttattgggagaacccaagtactctctttcggatcccggaaacagctctcagagatcttttttccttttgtaagatacaggagcgaaacaatcaacctattgatattgcaagacccaaaagattcttccgatgtatcatttctgggtccaatggaattcataggtataggaagaagccctttcaaatagagatttttgctttcgaccatatttcgattgttaatacgatatagaagggccgctactacaaatagtactacacccttgatcgtgaaatatcgattgcttgttgaaccctgtgaattgcgcaaaagtaggatactaaaaatccgagggtccaagagttttctaaaacgttcttggtggaaaaaaatatgaatgaaagatcccactgaattgaattgggtccatgaatctaagaaatagtgagcattcttgatctctctcactatttctctcaattcgaaaatccaggatttgaattgatgtcctttcattgattcctcctaaattgcattgatttatcctaaagatttcatttcaattggaatttggttattcaccatgtacgaggatccccactaagcatccatggctgaatggttaaagcgcccaactcataattggcgaattcgtaggttcaattcctactggatgcacgccaatcggaccctccaataagtctattggaattggctctgtatcaatggaatcttctcatcatctatacataacgaattggtgtggtatattcatatcataacatatgaacagtaagaactagcattcttattgagactagaactcatagggaagaaaatcgatttatggatggaatcaaatatgcagtatttacagacaaaagtattcggttattggggaaaaatcaatatacttttaatgtcgaatcaggatcaactaggacagaaataaagcattgggtcgaactcttctttggtgtcaaggtaatagctatgaatagtcatcgactccccggaaaggttaaaagaatgggacctattctgggacatacaatgcattacagacgtatgatcattacgcttcaaccgggttattctattccacctcttagaaagaaaagaacttaaatcaaaatacttaatagcatg

SEQ ID NO: 30695 - DNA, 3003 bp, Unknown
  misc_feature (1)..( 3003): 2750-1469P.txt file - cDNA_ID_3034602; gDNA_ID_2096291; Annot_ID_195415
gaaaagaaaagaactgtcttttctgtatacttatgtatactttccccggttccgttgctactgcgggctttacgcaattgatcggatcatctagatatcccttcaacacaacataggtcgtcgaaaggatctcggagacccgccaaagcacgaaagccagaatctttcagaaaatgaattcctattcgaagagtgcataaccgcatggataagctcacactaacccgtcaatttgggatccaattcgggattttccttgagggatattggtaaggaattggaatgtaataatatcgattcataatggattcatatcgatacagaagaaaaggttctctatcgattcaacaagtgctgtacttatgggaaagcgatagagaaagagaaaaaaaaaaacgaagatttcacatagtgatttttttttttttttttgatcaaaaataaatctgattgaatttatttcgtaccccttcgctcaatgagaaaatgggtcagattctataggatcaaacttatgggacttaagaatgatggaagggaataaaatcaaaaaagaaatcaaataaagaaaagagagagaaaataaagaaaaaataagtaaatcaaaatgaagtagaagaacccagattccaaatgaacaaattcaaacttgaaaaagtctctttctgattctcgaagaatgaggggcaaagagattgattgagaaagatctcttgttcttattataagatcgtgtgattggacccgcagatgtttggtaaaaagaataatcttatcctttgagaataatcaaaaatagaaagtgttcagttggaacatgaaaacgtgaccgagtttgtcctagttactcttcgggacggagtggaagaagggaggagattcgcgaacgaggaaagggacccaatgacttcgaaagaattgaacgaggagccgtatgaggtgaaaatctcatgtacggttctgtagagtggcagtaagggtgacttatctgtcaacttttccactatcacccccaaaaaaccaaactctgctttacgtaaagttgccagagtacgattaacctcgggatttgaaatcactgcttatatacctggtattggccataatttacaagaacattctgtagtcttagtaagagggggaagggttaaggatttacccggtgtgagatatcacattgttcgaggaaccctagatgctgtcggagtaaaggatcgtcaacaagggcgttctagtgcgttgtagattcttatccaagacttgtatcatttgatgatgccatgtgaatcgctagaaacatgtgaagtgtatggctaacccaataacgaaagtttcgtaaggggactggagcaggctaccacgagacaaaagatcttctttcaaaagagattcgattcggaactcttatatgtccaaggttcaatattgaaataatttcagaggttttccctgactttgtccgtgtcaacaaacaattcgaaatgcctcgacttttttagaacaggtccgggtcaaatagcaatgattcgaagcacttatttttacactatttcggaaacccaaggactcaatcgtatggatatgtaaaatacaggatttccaatcctagcaggaaaaggagggaaacggatactcaatttaaaagtgagtaaacagaattccatactcgatttcagagatacatatataattctgtggaaagccgtattcgatgaaagtcgtatgtacggtttggagggagatctttcatatctttcgagatccaccctacaatatggggtcaaaaagccaaaataaaagatttgagcccttataaaaagaaaacagattcttgaacccctttcacgctcatgtcacgccgaggtactgcagaagaaaaaactgcaaaatccgatccaatttatcgtaatcgattagttaacatgttggttaaccgtattctgaaacacggaaaaaaatcattggcttatcaaattatctatcgagccttgaaaaagattcaacaaaagacagaaacaaatccactatctgttttacgtcaagcaatacgtggagtaactcccgatatagcagtaaaagcaagacgtgtaggcgggtcaactcatcaagttcccattgaaataggatccacgcaaggaaaagcacttgccattcgttggttattaggggcatcccgaaaacgtccgggtcgaaatatggctttcaaattaagttccgaattagtggatgctgccaaagggagtggcgatgccatacgcaaaaaggaagagactcatagaatggcagaggcaaatagagcttttgcacattttcgttaatccaggaacaggatctatatagacacatagatccatggatccatacatctcgatccgaaaagaatcaatagaaaaagaaaaaatcggaattgatcgatctctttctcgaaacaaacgaaaaggaaagaaaagacgaaacagaaatcatggatcaactaagccctctcggggacttgcttaagaataagaaagagcaatctcatgtaaataccatggaataaggttttatcctattcatggggattccgtaaatattccattccaaaaatcaaaaattggtttttttttggagattggatgcagttactaattcatgatctggcatgtacagaatgaaaatttcattctcgattctacgagaatttttatgaaagcctttcatttgcttctcttcgatggaagttttattttcccagaatgtatcctaatttttggcctaattcttcttctgatgatcgattcaacctctgatcaaaaagatataccttggttatatttcatctcttcaacaagtttcgtaatgagcataacggccctattgttccgatggagagaagaacctatgattagcttttcaggaaatttccaaacgaacaatttcaacgaaatctttcaatttcttattttactatgttcaactctctgtattcctctatccgtagagtacattgaatgtacagaaatg

SEQ ID NO: 30696 - DNA, 3000 bp, Unknown; identical to SEQ ID NO: 9902
  misc_feature (1)..( 3000): 2750-1469P.txt file - cDNA_ID_3034606; gDNA_ID_2096291; Annot_ID_195410

SEQ ID NO: 30697 - DNA, 3000 bp, Unknown; identical to SEQ ID NO: 9903
  misc_feature (1)..( 3000): 2750-1469P.txt file - cDNA_ID_3034610; gDNA_ID_2096291; Annot_ID_195402

SEQ ID NO: 30698 - DNA, 3000 bp, Unknown; identical to SEQ ID NO: 9906
  misc_feature (1)..( 3000): 2750-1469P.txt file - cDNA_ID_3034614; gDNA_ID_2096291; Annot_ID_195399

SEQ ID NO: 30699 - DNA, 3000 bp, Unknown; identical to SEQ ID NO: 9907
  misc_feature (1)..( 3000): 2750-1469P.txt file - cDNA_ID_3034616; gDNA_ID_2096291; Annot_ID_195397

SEQ ID NO: 30700 - DNA, 3003 bp, Unknown
  misc_feature (1)..( 3003): 2750-1469P.txt file - cDNA_ID_3034620; gDNA_ID_2096291; Annot_ID_195396
gaataaaccaatttaaaaatgggataacatcctcgataaggcataagttctaatatcataagtgcttcttcataggaacgtccacgtatttgatcaattactctccgtgctttatgggcagacatagatatatattgccctaaagcatatacttccgtatatgatttcttttttctcttctttatcataaggtttacctctcactcaaaaaaaatctatattcattttttttaatttatttaattaacgacgagatctattatcatttttggcatgtcctcgaaaatttatagtaggtgaaaattctcctaatttatgtcctaccataagatctattatataaacgggtaagtgttcccttccattatgaatagcgatcgtatggccaatcattgtgggtataatggtggatgcccgggaccaagttattatgatttctttttccgcctttgtattaagcttctctatttttcttaataaatgctttgctacaaaagggtttttttttagtgaacgtgtcacagttaattaactcctatttttttaagacgaagaaagaaattcgattttctctcctatttactacggcgacgaagaatcaaagtctcactatattttttcctttttctagttcttcttccaagtgcaggataaccccagggggttacgggtttttttctaccaattggagccctcccttcaccacctccatggggatggtcgacagggttcataactactcctcttactacaggacgtttacctagccaacatttcgatccggctctacccaaacttttctggtttaccccaacatttcccacttgtccgactgttgctgagcagtttttggatatcaaacggacctctccagaaggtaattttaatgtggccgatttcccctcttttgcaatcagtttcgctacagcacccgctgctctagctaattgtccaccccttccaagtgtgatttctatattatgtatggccgtgcctaagggcatatcggttgaagtagattcttctttttgatcaatcaaaaccccttcccaaactgtacaagcttcttccaaagcatacggctttctggatgtagatgatgatatctatacggatggatcttatatatatcgtagaattcttctatatatggtagaagtaccacacgagtggatatataggaatcaaaatctgccgaataacttatgttatgatcttctacatcctaggtcttcccgttccgtcatctggcttatgttcttcatgtagcattcagaccgaatgactctatgaaattacgtcgatacttccacatattatgggtaacgtaggagacatctctatttttccccgggggaatctttagaattaccactgcttagctttcaattcgcctctgaccatcaaatgaaatgtgaataacccgtcctcctctctttgaaacaaggggcgcttatggttctgtcggtgcttgaaacaattttgtcttctccatattactatatctctagagtcaataattttatatgaggaactactgaactcaatcacttgctgccgttactcttcagttttctgttgaggtctatcctgtagaggtactcaaattggatcagtgatcgatttctaggtttcgtcgtaaacctaattggttacttccaattacgtaaatcaaatagttcaaaccgcactcaaaggtagggcatttcccatttttataggaacttctgtaccagaaacaatggtatctccaattatagcccctctgggatgtaaaatatatctcttctcaccatccccatagtgtatgagacaaatgtatgcatttcgattagggtcgtattctatggttacgattctaccatatatgtcttttgcatttcgtcgaaaatctattttacggtatagacgcttatgacctccccctctatgccttgcggtaattattcctctggcattacgacctttaccacaatgatgctgcccacagatcaaattatttcgtggattggatttcacttgactgtctacggctccattgcgtgtgctcggggtagaagttttgtataaatgtatcgccatgctattaagtattttgatttaagttcttttctttctaagaggtggaatagaataacccggttgaagcgtaatgatcatacgtctgtaatgcattgtatgtcccagaataggtcccattcttttaacctttccggggagtcgatgactattcatagctattaccttgacaccaaagaagagttcgacccaatgctttatttctgtcctagttgatcctgattcgacattaaaagtatattgatttttccccaataaccgaatacttttgtctgtaaatactgcatatttgattccatccataaatcgattttcttccctatgagttctagtctcaataagaatgctagttcttactgttcatatgttatgatatgaatataccacaccaattcgttatgtatagatgatgagaagattccattgatacagagccaattccaatagacttattggagggtccgattggcgtgcatccagtaggaattgaacctacgaattcgccaattatgagttgggcgctttaaccattcagccatggatgcttagtggggatcctcgtacatggtgaataaccaaattccaattgaaatgaaatctttaggataaatcaatgcaatttaggaggaatcaatgaaaggacatcaattcaaatcctggattttcgaattgagagaaatagtgagagagatcaagaatgctcactatttcttagattcatggacccaattcaattcagtgggatctttcattcatatttttttccaccaagaacgttttagaaaactcttggaccctcggatttttagtatcctacttttgcgcaattcacagggttcaacaagcaatcgatatttcacgatcaagggtgtagtactatttgtagtagcggcccttctatatcgtattaacaatcgaaatatg

SEQ ID NO: 30701 - DNA, 3000 bp, Unknown; identical to SEQ ID NO: 9910
  misc_feature (1)..( 3000): 2750-1469P.txt file - cDNA_ID_3034624; gDNA_ID_2096291; Annot_ID_195393

SEQ ID NO: 30702 - DNA, 3000 bp, Unknown; identical to SEQ ID NO: 9911
  misc_feature (1)..( 3000): 2750-1469P.txt file - cDNA_ID_3034628; gDNA_ID_2096291; Annot_ID_195390

SEQ ID NO: 30703 - DNA, 3003 bp, Unknown
  misc_feature (1)..( 3003): 2750-1469P.txt file - cDNA_ID_3034631; gDNA_ID_2096291; Annot_ID_195389
attttttttatagagtttttatcataattttgcatataatagaagtagtaattataaaaatattatatattaattatcaattgggtttttgctaaacggagcctggatacttcattttattagtccgatcacgtaaaccataaaaaaattttgataatctaatatcaatctaaatactccctgcatttaattccactttattttttgcgcttcgcgttacaaatttttgataattcaatcaatctttttgagcgaaacagaggatatctcgatcgagggagaaaatggggaaatcccatatagcccgatatatctgacaagtcgcactatatgtcaacccaagatgtatctccttctccaggacttcgaaaaggtacttttggaacgccaataggcatgaaatgaaaaaaaaagagaatgaagttctctatttcactttgatgtggaaacgtaaaattggggtttcgttttttaatactattatccttttttcctactttattaatcatatttaaattaatgatatttaatacataagttgaataagctaaaataaaatataaaataaaagtaaagtaagagagaatgaataaaactaaaggaaattttttacgaacgggcttctgaatgatcaacaacaatagctatcttggttcatagaaaataggattaacccccattgcatattggtacttatcggatatagaatagatccgcttccctttttttctatgaattgaattgttccattattactaacagaatagaacaaatattaatcctttctccgaaataattacctaaaaagggggggtacgtagcatagttttttccaatgcaataaagttacatagtgtctatttttcgttgataaaggggtatttccatgggtttgccttggtatcgtgttcatactgttgtattgaatgatcccggtcgtttacttgctgttcatataatgcatactgctctagttgctggttgggctggttcgatggctctatatgaattagcagtttttgatccctccgaccccgttcttgatccaatgtggagacaaggtatgttcgttatacctttcatgactcgtttaggaataaccaattcttggggcggttggaatattacaggggggactataacgaatccgggtctttggagttacgaaggggtagccggagcacatatagtgttttctggtttgtgcttcttggcagctatttggcattgggtatattgggatctagaaattttttgtgatgaacgtacaggaaaaccttctttggatttgcccaagatttttggaattcatttatttctttcaggagtggcttgcttcggttttggcgcatttcatgtaacaggattatatggtcctggaatatgggtatccgacccttatggactaaccggaaaggtacaacccgtaaacccggcgtggggcgtggagggttttgacccttttgttccgggaggaatagcctctcatcatattgcagcagggacgttgggtatattagcgggcctattccatcttagtgttcgtccgcctcaacgtctatacaaaggattacgtatgggcaatattgaaaccgtcctttccagtagtattgctgctgtcttttttgcagcttttgttgttgctggaactatgtggtatggttctgcaactactcccatcgaattatttggtcctactcgttatcaatgggatcagggatactttcaacaagaaatatatcgaagagttagtgctggactggctgaaaatcaaagtttatcagaagcttgggcgaaaattcctgaaaaattagctttttatgattatattggtaataatccagcaaaaggggggttattccgagcgggttcaatggacaatggggatggaatagctgttggatggttaggccaccccgtctttagaaataaagaagggcgtgaactttttgtacgccgcatgcctactttttttgaaacttttccggtagttttggtagacggagacggaattgttagagctgacgtcccgtttagaagggcagaatcaaaatatagtgtcgaacaagtaggtgtaactgttgagttttatggtggtgaactcaatggagtgagttatagtgatcccgcaactgtgaaaaaatatgctagacgggctcaattgggtgagatttttgaattagatcgtgcgactttgaaatctgatggtgtttttcgtagcagcccaagaggttggtttacgtttggacatgcttcgtttgctctacttttcttctttggacacatttggcatggtgctagaaccctcttcagagatgtttttgctggtattgatccagatttggatgctcaagtggaattcggggcattccaaaaacttggagatccaactacaaaacgacaagcagtctgatgcaacattgctttttttcttctagtttctgtttgttattttatttaataggtagggtactgtaggaatctttatttaaatcgctgccgtttctttgactctttttctttctttatcctcccaagtaaacaaaacgtaaacaaaacaggtatgaaagctataattgtaaaccacgatcaaatttatggaagcattggtttatacatttctcttagtatccactttagggataatttttttcgctattttttttcgggaaccacctaaaatttcaactaaaaaatgaaataatttttcattatcttcattaacgtaatcagcctccaaatatttggaggctgattacgttaactagtccccgtgttcctcgaatggatctcttagttgttgagagggttgcccaaaggcagtatatagagcatacccagtaaaacttacaagtaacccagatataaagatggcgactagggttgctgtttccattattatagaattgaaagaccacaccggatctatgctaagatcatttatttacaacggaatggtatacaaagtcaacagatcgtaatgaatacaaaataagatttatg

SEQ ID NO: 30704 - DNA, 3003 bp, Unknown
  misc_feature (1)..( 3003): 2750-1469P.txt file - cDNA_ID_3034635; gDNA_ID_2096291; Annot_ID_195388
tttcccccgcttaatggatactcatttgttatcattgggggttttctaaaaaatggagttgattggatttgcaccaatgtaaaccataagtttcagacacaatagagtatatgaacgatctatattttgtaaataatgaatcgagttcgtccattctattttattcataggtactgatccgtgatatttcaaaaagaatttcctttttatgtctcagtctatgatctaaacgagtcgcacatacacccgagtacatgttcctcgtcgctgagggcatccccgaagcgctggggatttcgtgacgtttcggattggctgtcttgtatttctaataagttgtttaatggttggcatacggaatcatataaataatgggctggtttagattagttctaaccggctaattctgaattacttctcttcaagattctcttcaatatttttttatttttatattgaagagaatattaaactaaacctttaatctaaaaagatataaaattctaaattgtagatttgcatgaaatcgctcctattttttattgaaccgctacaagatcaacaattccatgagcttgggcttctgttgctgacataaaaacatcccgttccatgtcttcggatataacccatataggtttgcccgttctttgtacataaacccttgtgatggtttcgcgaagtttaagtaattcttccgcttccaagataaattctcccgtttgtgcctcataaaacgaactagcgggttgatggatcattaccctgatgatataatagaaaaggtttttctatttcgcagaatgagacgggataacaaaaaaaaaaaaatagataaatttgaataaccgtacaggctttttttgtgcattgcatacggctccacaatggaattgacttttttgacctttccttaaatcatccaattaccatccttcttttttttgtaggagttaaaaaaatactatgatggttccgttgctttatatatcattgttttgattcgtcgatgattcagcaatcccaaagtgtctttttttttttttacggtgtgaaaacaaagtttgtgacgctgaaatgtgcccgaataggtaagatatcatttgaaaaacctcttccttatctcatactactctttcaatatataatcgaatttttttttaatctaaaaaatttcatattgaattcgaagtgccatgctattattacttaactaattcatatttcaaatggcgaaggcatagtatttttttctcgaaaataaaaaaactcattggcgccaagcgtgagggaatgctatacgtttggtaattgctcctccgactaggataaaggatgctattgaagcggccaatcccatgcatattgtctgtacatcgggtcgcacaaattgcatagtatcataaatagccattccagatattacccatccaccaggagagtttataaacaaataaagatctttggtatccttttctatactgagatatatcataagactaataagttgattcgagatttcggtatcaacctcttggcctaaaaaaaataatctttctcgataaagtcggttgattaggataattttttattccttaggagccgtacaggcaccttttggtgcatacggttcaataaaaattgtgaaaaaatcaatgtgttgattccaacctacccttttttcatagagggtttttctttctaacttataacggaagggcttgccccaaaagtaaaagaaattttgagttttggcgccttttattagatattaaaatcctctaaaaaaatgattgattcattgatatttttttttttcatcgagattcagttgaaatggcgatggttttttcttgttcctgaacgggcttcttcctttttttattccattttttaggtttatgctctaccccgagtaaaaggaaaaatttgcccgattttgatttgcacatataggacaaatgaaccaaataccgcgtctttttttactactccttcttttttttcaattcagttctttcacttgtcttctgtcaaatagtcaacaaattttgaattatattatatattatttgtatttgatttgagcaacagttttagatcgccctgtttcaattttttttatagagtttttatcataattttgcatataatagaagtagtaattataaaaatattatatattaattatcaattgggtttttgctaaacggagcctggatacttcattttattagtccgatcacgtaaaccataaaaaaattttgataatctaatatcaatctaaatactccctgcatttaattccactttattttttgcgcttcgcgttacaaatttttgataattcaatcaatctttttgagcgaaacagaggatatctcgatcgagggagaaaatggggaaatcccatatagcccgatatatctgacaagtcgcactatatgtcaacccaagatgtatctccttctccaggacttcgaaaaggtacttttggaacgccaataggcatgaaatgaaaaaaaaagagaatgaagttctctatttcactttgatgtggaaacgtaaaattggggtttcgttttttaatactattatccttttttcctactttattaatcatatttaaattaatgatatttaatacataagttgaataagctaaaataaaatataaaataaaagtaaagtaagagagaatgaataaaactaaaggaaattttttacgaacgggcttctgaatgatcaacaacaatagctatcttggttcatagaaaataggattaacccccattgcatattggtacttatcggatatagaatagatccgcttccctttttttctatgaattgaattgttccattattactaacagaatagaacaaatattaatcctttctccgaaataattacctaaaaagggggggtacgtagcatagttttttccaatgcaataaagttacatagtgtctatttttcgttgataaaggggtatttccatg

SEQ ID NO: 30705 - DNA, 3000 bp, Unknown; identical to SEQ ID NO: 9913
  misc_feature (1)..( 3000): 2750-1469P.txt file - cDNA_ID_3034645; gDNA_ID_2096291; Annot_ID_195373

SEQ ID NO: 30706 - DNA, 3000 bp, Unknown; identical to SEQ ID NO: 9916
  misc_feature (1)..( 3000): 2750-1469P.txt file - cDNA_ID_3034649; gDNA_ID_2096291; Annot_ID_195370

SEQ ID NO: 30707 - DNA, 3003 bp, Unknown
  misc_feature (1)..( 3003): 2750-1469P.txt file - cDNA_ID_3034653; gDNA_ID_2096291; Annot_ID_195368
gaaaaaagaaaaatcaaataaaaagataaatgaaaccattttcatccccttgctcggaaacaaaaaggggagttgatgtattgaatccgccgggactgacggggctcgaacccgcagcttccgccttgacagggcggtgctctgaccaattgaactacaatcccatggaaataaagcgggtagcttacatattccttcttatgatttcattttaatcatttcaattttaaattcaaatttttgttttgtaacaaagaaagtcacaagtgatatattgatatctatatggatatcactttagtgagagcaagacggattactgggtaatccttacattattatcaaatcaattgataatctattttttacaaaaaaatagattattttatcgactctgttcattaaagtttctctttaaaggatccatatcggaatccttagcaagatcaagatcggaattttttatggaaaaaaaaagtaactaaacataagaaataaagaaaaaagtaaagtcgaactataccctataccctgaaatttgacctttttttcttaccccttctctgtcatttatgcaaaaaaaaaaaaatggttatgtagacagctaattattgggccgagctggatttgaaccagcgtagacatattgccaacgaatttacagtccgtccccattaaccgctcgggcatcgacccaggaagaatctattctaactttatggataatccatgatcaacttcctttcgtagtaccctacccccaggggaagtcgaatccccgctgcctccttgaaagagagatgtcctgaaccactagacgatgggggcatacttgctcaaccgccatcatactatgatcatagtatgatcagtttttttaaattgtcaatataatgaaatgaaatggtatgactagcttataaggttttttcttttttctatagaattctatatcattttttttttacatttgtattcatattctaatcataattctataacaaataaatatactttctttttatatttgaagtggaaatattaaaattaaaaaataaataaaaaaaaatctaaaaatcgtctagtacggaatcttttcaagaagtgattggtctaacataaaaaaaaaaaagaaaaaaagagggttaagtttcgttttttttttactttccttgatagattgcctcatctcattgttaagaaatagtagtatccctgtctaacactaatccaagaaagtcagccagaatccatcttctaattagggaaaaaggtggatttataagttaagttatcaaaaatttgctttttttttttttagaaaattattgttcagaggataatccgtatctcttcatcacatgtcaagataaaatatcttgggtgtatgtcaacttgctgagtacatgtataaatcaaattaatttcgttcgatgcgctaggctattaaaaaaaaattcattgcatggatatttatcaaatccaatattaaaaaagcaaaaaataccccgttaagtaaatttgaagtcaattcaaattctcatttctagttcccaaatgagctactaaccactatgcgtctattgtatatatatttaatatatatatatatatagattttatttactaccggctcagtcaggaattaaaccaagacggcccttttaactcagtggtagagtaacgccatggtaaggcgtaagtcatcggttcaaatccgataaggggcttttacgttctttactttctaatagtcaaaatttcatttgaaagtctataatttaatttcaaattttgttaatttcattctaataaatttcattctaataatataataactaataataaagttagcgagtaatttaaaaaataaaaatgaacatttgtatattataatacaattacaatgaataatgataagtcgtctcttgaatcgccaaatatatattctttttttttcgatttttcgatagattagaaatcgacaaatccaaaagaaaaagtaagtggacctaacccatcgaatcatgactatatccactattctgatattcaaattcgatagagattaaattgaaacagtagattttttttatttcatatttttgtattaggaaatccgtcgatatctcttattgaatcttcttgtttctatatatttcataggaaatatattgcgttcctgcctagagaaagagagtatttttgcaaagtaataactaaaagggcgtttcaatattttttttgattcgagaacataacaagatcctacattctctttgtattaagaatcaatttgtattaaaaataaacaaaaatcgaatcataatcatggcttcagatatcaattaaatatttccatattgatgcatccgagatgacaatgtaatgtgatcgaaggtgtatgtgagaaagaaactctcatttacagtttcctataattttatttaaatattgaattaaatataaataagaaattttccccttttttgacagatacataagggcatgtacatatagatatcaaagaaaatagaaaaaaatattaaaagttccctttttgcttcaacccgtcaactaaaaaaagggtataaaaggaaaataacaatagttgatactatagtatttaatagacaagtatttaatacacgcaaaaaagaaaaaaaaaagttctttattctttatctgaataatgagtcatccgacaattcatgatttagattcaactacttatacttattaataaactaatagcaaggaagaaacaaattgagttgatccgtttacctaagtaaggaccaataaaatcaaaaattttgatcttcgaaaccaattaaatgaaattctaagggttccattttatggggcagtgcgcgagaaattaaatcataaacaaatgatagaatttgagcgccctgaaaatgccataatatataacatcaaaatctataacattaaggtgttcggaaatggttgaagtagatgaataggaggatcgctatg

SEQ ID NO: 30708 - DNA, 3000 bp, Unknown; identical to SEQ ID NO: 9915
  misc_feature (1)..( 3000): 2750-1469P.txt file - cDNA_ID_3034661; gDNA_ID_2096291; Annot_ID_195364

SEQ ID NO: 30709 - DNA, 3000 bp, Unknown; identical to SEQ ID NO: 9914
  misc_feature (1)..( 3000): 2750-1469P.txt file - cDNA_ID_3034665; gDNA_ID_2096291; Annot_ID_195363

SEQ ID NO: 30710 - DNA, 3000 bp, Unknown; identical to SEQ ID NO: 9918
  misc_feature (1)..( 3000): 2750-1469P.txt file - cDNA_ID_3034669; gDNA_ID_2096291; Annot_ID_195361

SEQ ID NO: 30711 - DNA, 3003 bp, Unknown
  misc_feature (1)..( 3003): 2750-1469P.txt file - cDNA_ID_3034706; gDNA_ID_2096292; Annot_ID_195434
caattgttattaagtaacgtccttccaaacccgttctgccaaacccgtcctgtaaaaaaaaaccgcggtaccccgctagttgaaatttataattaaaataaatattttatggattgcgattgtgttttagtttgtcaaacaaaattttgttttaaatagttgtcgaaatctagttcaaattttggagaaataagatttagtgaattgataagaaatgtatttagttgcgtttgctcattttaagggattgcaattgtcttttgggttgtcaaacattttttgttttaaatagttgctgaaatctagttcaaattttggaaaaatctgcgtgatatatgggattgaaatatatttggaatgtttttcgtttgttaatcaatttattgctgaaaaaactaataattaaaagccagtgacagccattgtaaataagtttcaactccaggatttatttcacaaaatggatgcaaaaatatatatatagattatatctatatatatgtattttaaaatctttctcactttaacctcaacatccaaagtttatatgtatatatagtttatttgctcgatatgcaaaagcgtctgtagtccaacggttaggataattgccttccaagcaatagacccgggttcgactcccggcagacgcatttatattttttaacaatcttttctgaaaatttgaaaagacaacattttgcatacaccaaacatatgtacatatgttgtgttcttgttggactcgatggtttatcaaccccaggtccaataggacaacacgaaattatcatacaaaccacaatgattgattgtccccaaacccttatttctgttaccaactccaccatattgtcacaacttttcccctgttatcaaaacttccaaatcaatgttctatgaattttagtttaaatttttaccaattgtttattgatttatacgaattcaatcaaatgtaaaacaccaaacagaatggatcagtaaatataaaactttgttatcttctccaaaatttacattttcatgtgtgtatagactatagtatggttacgatgaagttgatgatgttggtgaccaaggagtcatatccatgggataactcccaagcacccgcaagaacgatgtaaactcctgaacctcggcaagcgcgttctgagcacgcgcctccgccatcgaggcctcgaagtcaacataaaacatgtactcaaaatgcttcgccgtcccgacattggcatcatccacgaccctgatcggacggttgtgattcggcctcgattcgatcttcgtcaagctaatgtctctgaaggcgaaagcagagagcaccttgaaaagcacgctggttcctttctcgtgcgcaaagacaatgctagtcttgaacggtctatctgttctaggtatgattggctcacgcgccagcatcacgaagcgcgtcacgttactcacgtcgtcctgaatcccatcttccaaaatctccaacccgtatatctcggcggcgcgtgcactcgcgatagcggctgtgtcgcggaggttgttagaggcgatgaactcagcggctcctgcggtgtcatcaactgcctcacgtgcgacattaagtccgagctttgtgagcgtgtgctcacactgagcgagaccttgagggtgtgagatcacacgtgtgagaaactctttacgaacgccgggaagagccagtaaacagtgatgaacagggagttgaacttcgccgactatatgaagacggtgacggaggaggagatcgtaattacggtggatagaaccgccgagagagttctccaccggtaaaacagcacgatctgcgatccaaagctccaccgcttgaaacgcaacctcaaattgatcgcaaggtatagcttgacaattaggataagctttaccagcggctgcttcagagtaagcaccgggaacaccttgataagcgacgcgtagattagatccgtgcatcggagccggcgagagatccgtcatgctaaggggtttcagtggattatgacgatgctgtggaaccaacggattgctatcagatttctcaatcggaacaagattcattcctggaactcgtgcggcggcgctgttatggccgttgagatgatcaactccgccggaaactggaggcacaggtaaggattcagattcttcttgagaaataaccttgcttgttagaatagcgcaggagctctgccattcagaacgaccagatcgcgcgataagcgcagtcgccgtcgccggctggctagcacctaatattggagaagaagatgatagagctttcatgttttagcaatggcgtcttaaaattggttattcaagctcaatgaaatagcaaagtcgagaatgtagaaaaacatgttttcctggggtagttcgtttgtgtggtcacttctccacctaccacaaccaccttacaagtcacagtcgtatggaccataccggcatttaactgaaaattaattcgacccgatccggtttaagttatttggtttcataaaccgattttctccataccccaattgagatatgagagtgtttaagactttaccggaggtgattcgagttcaaggagacagtctacacttgtgacttgtgagtcggagcttgagaacacctacagctacaagaaggaagtttgttttcgcctcgagctagaaatcctaatttgtcatcatcgtctcgaatggaaaggctgtgttcgaaatccaaaatgcaaatgcgataaagatgggcttttagataggcccaattagagtccaaaaatgaggggcttatcagtgatttggttgccaataccaaaagcgcgggaaaatgataaaagatttttttttcctctctactctttcactcactttctccggcatccacgaagccctaccagtaaaagcccttttgttgaccctaaattctccttcaaagcttctccaggaataaagctcctctctatataggaatctctctctgtcccgcgtaatttataatcgccgcaaaatg

SEQ ID NO: 30712 - DNA, 3000 bp, Unknown; identical to SEQ ID NO: 9927
  misc_feature (1)..( 3000): 2750-1469P.txt file - cDNA_ID_3034710; gDNA_ID_2096292; Annot_ID_195432

SEQ ID NO: 30713 - DNA, 3000 bp, Unknown; identical to SEQ ID NO: 9926
  misc_feature (1)..( 3000): 2750-1469P.txt file - cDNA_ID_3034719; gDNA_ID_2096292; Annot_ID_195428

SEQ ID NO: 30714 - DNA, 3003 bp, Unknown
  misc_feature (1)..( 3003): 2750-1469P.txt file - cDNA_ID_3034723; gDNA_ID_2096292; Annot_ID_195427
atttattaaaataggtatataaaagtgatcgaaaattatgtgtaaatcaagtaaagaaagaagagtatatctacagaatcaaatttgattcaggcactattactccttcgtttcttacggacatggtttggttcgtgaacaaataaagtctctacctcttggctcccgacgtcggtggcttcaaagaaccgaagatctttggacaatcttgtcttctttgtgagagaaatctcacgcggtcgctttcttggcggcggaggacacgtctccacctccggaatcttgtgatcacttgaagttggagtacacagagattctaacaactcttctttcttcgagctatcttgatgatcttcttcttcttggcttctgggtttctgctctactgtcttttcttcttctagggtctcgagaagcttagacatggtcacatggatgtgaaagtttcgtgggcttttaccttccaaaggaaagaatattaatttgaaagtgaaattggaatatagaaagtgatatcatataggtagagagagagagagagagaaaaaagaaggggattaaagagtttgtattttgcgaaaatgtacatgtatgaattaatcttgaatattcggatattcaatgctttttgtgcaacttaattgtcttgggaattagaagtgaaacttttcaactgcccctatgtccaaacctatagaaatactatgccggagtcaattagttagttagattcatttgtgtttactgtttaacgtaattaatttgaatataagtttggttaattacccttgttacctattaaaacttgaatgttaacggagaagcttatccaaattaatgtctcatgtgtcacatcattcttcgattgtatgtctaaatacgtacaaatggttggcataggataccatttcatcaacttaaaaataatattttcatttcataattgatgtccactttccgactcgcccctttggaattattcgctccttcgcagcctactatataaaccaatcagataccgccatgtcatcctccactgatttgtgttcgagaattgctcatgttactgtagtcttttctccatgaacaaaattacttacaacttacaaggctaaatgatgtttgataggtttaacattttaattactctgtgctctatataagtccacaatttgaataatcaaactgaaacctgtattttaagtttgtccccccattgaagtaagtatatggttatgttggcatttagtgtttgcatcgaatggtcgtttatgtcaatgaaagacgtcccgtcgctgccattgaacgtacgtaataagcattaaatcttaacagtgtgatgcaaaatttctcttatagctcatcatcctcttttttttttcttaagaatttgttgcatgtgaagatatttggtcactagagtatcgtttctatagatgttcaagacagtagtagttggaaggccgtattgaaaacagtctgagatggtagaaagaaaatcttattttacattgatctaatatatgaagactcttctgatgatgcatatatatatttccaacttcgtttgcgctttattcctacggattgtcaaacttttaagagaaatatgttgtccttttaggttgttattggtcatcagggagatgtaggggccatgactgtacattctttttggcctatcaaaactcgattctcttttttaactcattggattcgtgctgatcatgctctttgagaatgtattcttatagtcaaattcaaaactgttgtagttaacatttgttaaacaattaatggctttaaagtcatacttttgatacctactaaaataaaacgttattaattatgttgcaaatggttagaaggtgtaagatatacaatgcaatttggttaggattccagaaaaggctaaagaacagtgacactactagcaaaagtgaaaaaaaaaacatggccatatttatgtatacaaagtctacgcttaagaggaaaatgaaggcaacagtaaaatagtgaagaaaatgacaatcttataactaagaagatagagacatataaccccatttagtaaagaggaaagttgtaatgagaatggaaaaaataaaacctagagactcagttaatgggttgaaatttcaggctaaaatatgtttcgtcttcttgtacgactacatataacacacataacaaaactaaaactcgtaaggtgtatgtgtgaaactagttgtgtatatacataagaacaaatggtgaaaaccagtagttagggatagatctctgtccaaacatattcttgatcgatcttagatcaatcatgcactcatagagatctacttcgtttgtttgtttattagactcattatctctatgagtgattgagtattatatgaatccgtttctaaacaaagatgccgaaggagttgatgttggggtctgatcgcgccagaaaacttaggtttttctctctgtgtttgaaccaaaagtcgtggtaactctgtctcaaagaatctaataaatctctaattagaccgtttgtaagtaaaagaaaaaaagcttcaagttcaatgaaaaataaagataatgattgggacttttaggtttgtttgtgcttctttaattattttctaacaaccttttatagaaaaaaaactctagactagtgaaaattcggagagtttcatgttgctgcgactacaccacgtctctatctaaacagaaaagggtcaggtaaaggagattaatgtaacaatcgcacacgtggcacctttttctttgtcgccttccaaatcattaattaaatttccatttatttattttctctgctgtcatcaccaataattttaatttaatttttaccaaaaccagaatcaaaattttgaacggagaagaagattgaattcagaaaggaagaggcagatctgttattctctgttgaagtctgattgatctgatcggagctattgcggaggaggggtttactgcaattgcacggtggtaatg

SEQ ID NO: 30715 - DNA, 3000 bp, Unknown; identical to SEQ ID NO: 9929
  misc_feature (1)..( 3000): 2750-1469P.txt file - cDNA_ID_3034727; gDNA_ID_2096292; Annot_ID_195422

SEQ ID NO: 30716 - DNA, 3000 bp, Unknown; identical to SEQ ID NO: 9919
  misc_feature (1)..( 3000): 2750-1469P.txt file - cDNA_ID_3034735; gDNA_ID_2096292; Annot_ID_195420

SEQ ID NO: 30717 - DNA, 2683 bp, Unknown; identical to SEQ ID NO: 14596
  misc_feature (1)..( 2683): 2750-1469P.txt file - cDNA_ID_3034789; gDNA_ID_2684204; Annot_ID_137266

SEQ ID NO: 30718 - DNA, 3003 bp, Unknown; identical to SEQ ID NO: 27150
  misc_feature (1)..( 3003): 2750-1469P.txt file - cDNA_ID_3034794; gDNA_ID_2096294; Annot_ID_195494

SEQ ID NO: 30719 - DNA, 3003 bp, Unknown; identical to SEQ ID NO: 27151
  misc_feature (1)..( 3003): 2750-1469P.txt file - cDNA_ID_3034797; gDNA_ID_2096294; Annot_ID_195491

SEQ ID NO: 30720 - DNA, 3000 bp, Unknown; identical to SEQ ID NO: 9936
  misc_feature (1)..( 3000): 2750-1469P.txt file - cDNA_ID_3034801; gDNA_ID_2096294; Annot_ID_195489

SEQ ID NO: 30721 - DNA, 3003 bp, Unknown
  misc_feature (1)..( 3003): 2750-1469P.txt file - cDNA_ID_3034805; gDNA_ID_2096294; Annot_ID_195487
gagcttcctgatttcggaccaacagtacttttatccatcacagcagaatggctgtaaaccaaaaaacacaaaacaaaaatcatgagaaggatcatctatagagtatatccatgctggaaaaaggcccacccatctttaactgagggtgttatacatccacctataagtcacatagaatcaaggagaatgatacataaaaggaattagtactataggatgacaatcaccttgagaccagagctatatctttcgtttttatctcttgagaggttgaagttgatggatcaataacctgctttggaccgttttcttttttgaaagaattctttgcaccagcaacatctgatcagaagtaaacattcaccacacagttcatcaattacagaaaaattaaaaagcaacatgttacagactgccgctagggaactttctctttcacattctttcgctaaacatactaaaagccaatcatgaacacaactagtatgtcctaggaggaaaatcaggaaagaatcaatactgagtaaatataacaaaaagtattgtgaccgcaagtaaccaccttccagagacaactaatgtggcatattaagagatgcgagttcatatgattgtaaaacattgagttcatcagattgttatttaccatttgatgcatgacgagaagagaaattcatccgaccacccctgctaccacggccccctccaccagatctccattgtgattcagcagaatccttgttgttgatgttctgtaccatttcaataacattgtcaatacccatgtcccaaatatatgcggtttaatagacatcctttacacagaaacccatgaagagaccaaaagaactgcaaaaaccccatacctctttcctcttatcacgcttttttttaacctcatggaatggatctgcagagtcataaacaattttttgcattagcacataagattgtatagaaaaacacaacaaaaaaaaacttaaaacatatcctagcaaccatctctaaattacatggtacacaagcaggttacatgaagcactcgaaaagcctgatgcaataccacatctccaaagaatcctattttcataacaatttgttttggtaagatgatgaaaatgtggatttctaagcactagattcatctacaacgcagcagtctttgtttagaactcatacctagcaaaagtattattcctagacaaaccactcagaaaaattctagttagaagctaattctctttgtttcacacatcactagtgtaagtaattgattcccgtatattccaaatcaattcgtgaacctttttttgtgaaaaggaggttacaacacaatatcacataaacaactagagacagcttaaaacttaataggcgaagaaaccgatgatagtgaattcagataaaatctgaaaaaaaaaaatcaaagagcagagaaatcagatgctaaaacctaagttacaggagaaaaccccaaatcgaaaaatacaatctcgatccaatcaaagaagagaaattaggtaaagaaaaaagtgcagagaaggtcgagattataccctgaagaagtaagcgttgagcggtctcatcaggatccatgttacattcatgaagcattgcgataatctcatcctcgctatagttcccagcagtggtctccttaatgttctgaatcatcttccgagtagtagccgaaatcgaaaccctagcgccactgccgaccatcctctcttctatcaaacgtaaaatctcgcttctgatattttaacaggaatcgaaatctggacctagaccaaaagaggtctgagtacctatatatgtatacgaagaggcgagtgataaatcagtacgagaggatgggatttgaaactagtttgggtcgacgaaggagaagaagaaagaagaaggaacaagaaaaaaaaaaaaaaaagaggaagggggcgagagaaaggaatgagcaaaataatacgcactgtgattttggaagcgtagggctctcttttcttttttcaattttgttttgcattcctttgtagctttttaatattgagtttttttgtttgttttaatctgaatctttggtaaataatgataaccaaattgttgtcacaatctttttttgtccacaaatatatttaaattaggatttaggatatcttctgaatatttacactacataataatgacaaacataaaacatagtatttaagaaaataagaagaagataagttttgattgtaacttgatcatattaaatctcaactatctcaaacgatgttacccatatcattatgagatgagcgatttaatgattagcatattattatttatatttttacatctcagtaacgtattattgttttctatgtaaatatttaaattatcaaataattataatacgttattattatccccaccatgataattacatatatatttaatttactgaataagtttattttttttgtctttggtaatttcttttacaataccaaattaaaatattttaaaaattggatttcaaaaacataatgagttatatggttgtccaaatatttaccaggtccagtacgcttttagcattattaatagcaattagcaactctagggattgtcatttacataaacaaatcttcaattttttcattaattttcctgtgttttgggtccctattgcttctaaattctaataaaccgtccagatattgctgttatggaaacaatttttcaataaatctcatcaactgattctatcaaaatctaatcactaggctttttcccattagcattagcgcataacaaagttttgaatattaatatcattatccataggcagcttagattttttttccttagcatcaaattaaactcaaaaccgaaccaaaccgtaaatccacaaactaattttggttcgaatttaaaaacattatcttttaattttgtcatgccccctctgctaagtgcaaccattcgtcttctcgcttcatcgttttctcttttccgatg

SEQ ID NO: 30722 - DNA, 2683 bp, Unknown; identical to SEQ ID NO: 14596
  misc_feature (1)..( 2683): 2750-1469P.txt file - cDNA_ID_3034805; gDNA_ID_2684204; Annot_ID_191329

SEQ ID NO: 30723 - DNA, 3003 bp, Unknown
  misc_feature (1)..( 3003): 2750-1469P.txt file - cDNA_ID_3034847; gDNA_ID_2096295; Annot_ID_195534
tataatttgtagttaactacaaaaatggcagaagaggaaaaggacttccataaacgaagtaaacaaacactaaaaatcttcaacacaccacacacacacacaaaaaaaaaaaaaaaaaaaaaactttttgttattgcgtaaattgtaagataatccagttcggccactgagactattatgtaaatcgtcattgtattcaaagattcaacatttgccaaaagaggtttccgaagttttggtagaaaccaatttgatgcaggtaagaaaaaaaacaccagatctgaaatacaaaacaacaaagaacagaagcgagaaaaagctaaagccggtaaaaccagatcgtagaaacgcaaaagaaaaacaaaaacttgtattagaaaaaatgtaattcaaacatcattcttcaatcaaacatcaatcagatgaagaatccgaaccagcgacgaagagattcagaaattacacaaagagaagaagaacccaaaaaaaacaaaaaaatgaaagagagagagatcttaccaatatgaagagagcagatgagaaatttgttgaggaaatacaaaaaaaacgtaacgccaaatttcaacaaaagtctccaaaccctaaattctcctttcttcggcagcctctctgtctctcacgatctctccttcgccttttctttaaaactttttttttgtttttttttgtatttctctttctcaaatattttttacaattcagtttttttgcgattctcaatactttttggggtaaacaatagtaaaaaaaaaatacaaatttttggtgttgagagaaaaatagggcgagaaaattctataaggtgggtgagagagagatatatgtggatatgagagtcggtttttatataattgcctctcctcttcttctccatagtttcaaaacaacaacgacacatttttatttcattttctatatttcccattttgcccttttcttgttacaagattggttaacctaattaggcaaatttattcaatttttattcatatggactacaaattttctttgaatttcatttagcacgcaaaacttgatttgcgcttccgtggaaatttcctttggacttggaaatttttttttgaaaaatcgaaccaatcaaatttgtaattggagagaaaaagacacatatccgaatgtgtgagcaagcttgttgtcaatactggcaccgacgctgtgtaataataagtgggcagagacaacaaggtacatgtgcatcaatctctatcttacttgtatttattaagactaacgaaaactacatttaaactaaacctaactctagctttttctcatttttttagtttaaccataaaactttgtcgaacgtgtaaagtcagccttcggatttatatatttattccaccgaaaacataatttaaattaacttcttcaaaattttacgtaccaagtaatctatacaaataatgttattatacaaaagcaacgtgttatttttttcaaatcgaaacaatatagccaatccaaatgtttaggagagtaggtagatacacttcccaacaagaacatcacaatatataattaccagtttggagagatcaattttgccttcagctatcattttggtagcgtataagaggctaacaagaagatatgataagctattgaggaccaggttcatggaattgactatgattgccaatctttacaaggaccatatccgtctcttgtttgctccatattcgtggttaaatttgacgatcataataaatgtgagacacatgcatgcatgagatgatggcaagcgtagatcaataaaagtttgacaacacatatactagggacatagataactaccacgatcgagagacgtgtgggagatgcacactcgcacaagcatgcttagcatacgtcttgaaggagacggtataaaactttgtagagcatgtgatctactagtacttccgaagagccatatggagaaggagacttaagcgaaacgtacttacaattctaaaatgagccatgagagcagcctattagtcctcgcatacgctacaagaggagcctgggaccaataatagtataaccattgagaaagtacagtagacatcgactagatcacaataaactttattttatgttgactatttcgtcattgatgatattacttatctttgattattattaaatctctcatttggacgctttaatttgcttggagacgagtcaagaattaagtcaggagaaacagcagcgttgataattctgttttcattttgaatatatatcgtgtttaatttggtttacattaaaaagtcttaattaaacaaaaaagatgattcaaaacctttagttgcatttgcatatttatttttcatatacaaagaagtacagatgattatgccttttgaaaacctagttattacttattgcatagtttattttctgatcaagtaaaaaaagttatgaacacaattcttcttatgaatgactctcaaaattaaggatgttgccttggagatttataggagttagcctacttttcaccttgaggatcaattttatagtcaaagctaataatgtttgtggtctatattagttaccacttgtttactacatccaagcgattgaattcgcatttcccatactcttgacttaattaaaccttgagatttcatgatttattatgcaaaatttaatccttcgctatctatttgttcctaaaagatataaattgaataaaaacgtaactctccaattaataagaaaaacttctttaattatttttctaggttaattaataaatttataaaacaataaatatcatattagaaattcatactaataaattttgagacattttattgaaatcttaatgtggatagtgctgcaatcaggaaaggatgacgagacaaaagatagagaagcaaaagtaagctgataaggtttgatacagtagaaaatactatctcttaacttcttcttcttcttcttcttcttctcctatctttgaaaatg

SEQ ID NO: 30724 - DNA, 190 bp, Unknown
  misc_feature (1)..( 190): 2750-1469P.txt file - cDNA_ID_3034847; gDNA_ID_1620762; Annot_ID_50017
gaattcacacttgactcttctttatatgtgtcctagatttggttcagctatatgatcatttctatttttggatttggctgaattcaacaaagcttggtggaatttttcagtttaatatgtctgtctctttgttcttggattgatatctattcagtatgtcctatatttacttacacaccttcaggccatg

SEQ ID NO: 30725 - DNA, 190 bp, Unknown; identical to SEQ ID NO: 30724
  misc_feature (1)..( 190): 2750-1469P.txt file - cDNA_ID_3034847; gDNA_ID_1620762; Annot_ID_167172

SEQ ID NO: 30726 - DNA, 3000 bp, Unknown; identical to SEQ ID NO: 9957
  misc_feature (1)..( 3000): 2750-1469P.txt file - cDNA_ID_3034854; gDNA_ID_2096295; Annot_ID_195532

SEQ ID NO: 30727 - DNA, 3000 bp, Unknown; identical to SEQ ID NO: 9952
  misc_feature (1)..( 3000): 2750-1469P.txt file - cDNA_ID_3034862; gDNA_ID_2096295; Annot_ID_195530

SEQ ID NO: 30728 - DNA, 3000 bp, Unknown; identical to SEQ ID NO: 9951
  misc_feature (1)..( 3000): 2750-1469P.txt file - cDNA_ID_3034865; gDNA_ID_2096295; Annot_ID_195528

SEQ ID NO: 30729 - DNA, 3000 bp, Unknown; identical to SEQ ID NO: 9958
  misc_feature (1)..( 3000): 2750-1469P.txt file - cDNA_ID_3034876; gDNA_ID_2096295; Annot_ID_195525

SEQ ID NO: 30730 - DNA, 3003 bp, Unknown
  misc_feature (1)..( 3003): 2750-1469P.txt file - cDNA_ID_3034887; gDNA_ID_2096295; Annot_ID_195522
ggcgccggatgcttgtgaggttagctttttttgttctaccccatcttaattttacttcttcggtgtgttataaacaaatcaatatctgtcaccaaattgtttgttggtgatgataaaatttaggcagcttctgtcacatagttttgttcaaatggtaaaagctgatgctgtagttgataaaatgcatgtattttgagcaaatattctacctttgtatcgtactgagaaggtcgaaatgggataagctgagaagatctcattcttgtatccatttcccagttttgttgtggaaactgaaaatctcagttttgttgttattggtataatgtgctgtgtataagtttatctcatgtaggatagtgtttgctaaagccggaacttttatagaatcgagttgtgttcaagatatctttcgtatataaaccaaactagagtttatagatgtttgaccctaatcaatcttttggattgggaagtttataggtgttacgcatgcttacatgttctcctgtattttggtttagccttgaggaaaatgaaaagctagtgttgactccattcgaaaagaaccttgacatctggagacagctttggagagtgcttgaacgcagtgatttggtaagtctttgtcaataatgtattaaccttctcaataagttcaatttctgcgttttagttaattgcaaaacagttttgattacttatacttgtccttttttcagattgttatggtagttgatgctagagatccactgttttaccgctgccctgatcttgaggtaatgcattttctcccagcttgaaactccacttggcaccgtattcctgattcatatttacttgaagattcatcgtgacacaggcatatgctcaagaaattgatgagcataaaaaaataatgcttctagtgaacaaggcggatcttttacctactgatgtcaggttagccaatcctcttgtgccttaatactttgcctccaaccttttttgtattctaaccgattggtttaacttttgacttgtagggagaaatgggcagaatatttccgccttaacaacattctgtttgttttctggtcagccatagctgctacagctaccctagaaggtaaagtcttgaaagagcaatggagacaacccgataacttgcagaagacagatgatccagacattatgatatatggcagagacgagctgttgagtcgtttgcaatttgaggctcaagagattgtcaaagtaaggaattctagagcagcatccgtatcatcacagtcatggactggtgaatatcaacgtgatcaagccgtggttggatttgttgggtacccaaatgttggaaagagttctacaatcaatgcattggtgggtcagaagcgaacaggtgtcacctctaccccaggaaaaacaaagcatttccagactttgatcatctctgatgagcttatgctatgcgattgccctggtttagtcttcccttcgttctcaagctcaagatatgaaatgattgcttctggtgtacttccgattgaccggatgacggagcaccgtgaagctattcaggtggtggctgacaaggtccctcgccgtgtaattgagagtgtgtacaacatttctcttcctaaacccaaaacctatgagcgtcagtcccgcccgcctcatgctgcagagctcttaaaaagttactgtgcttctcgtggctatgttgcctcgagtggactaccggatgaaacgaaagctgcaaggctgattctgaaagattacattggaggtaagctgccacattatgcaatgccacctggaatgccccaagctgatgaaccggacatagaagacactcaagaactggaggatattctcgaaggttcagagtccgatgactctgcagtaggagatgagacagaaaacgagcaagttcctggtattgatgatgtgctagatgatctgagctcgtttgatcttgccaatgggcttaagtcttcaaagaaagtgacagcaaagaagcaaaccgcgtcacataaacagcacaaaaagccacagaggaaaaaggatcggacttggagggttcaaaacacagaagatggagatggaatgccttctgttaaagttttccagaaaccagctaacacaggtcctcttacgatgcggtgattatcaaattgtagtccatccaagcaaagatggcaaccgaagctacttaaagtttttttttttttttcaaaaaatgtaacagcagttgaacctgtcgcagtagttctcgagtgtcttgatgtttttgtttttatgattaaagtcttattttggggaaaagtagaaaaaagtgacaactcaaatctggtggaaaatggagaattgtttttgccagttggagatacctatcgctttgttttgagaatataatagccataaatagagttttcatgtaactttaaacttttttcttatttggggtttggactcttttgaacaataaatagtgataatgaaactttaaagtttaaacatttcaataaccaattcttgttgctaaatatgtcattaccaaatcgatataaaaccaaagtaaatagaaatgttatagtgatttcggttcgtacgtttggcaatgagttggttcgtgtctctcgttccattggcgtccttgagggttaagactgattaggctttgttgtacttatggagagaggagagagaaacttgagataaacaaaaaaaaaaaattggtttttcctaaatgtgtgaatgtctgcttgctgcatcgttttattaatttccctggaaaataactgtttctgtttgttgtaaacaagcctcgaggatctgaccggtgaatgaaagaaaactagggtttcgattttaccggaatattctccgagagagcggcaagtttaacatcagatatgttgttgatcacagattcgcttttctgcgaattttagctggatcggtctttctttagttagttttttttttttgttttcccacttttgaagctttttgataatg

SEQ ID NO: 30731 - DNA, 3003 bp, Unknown
  misc_feature (1)..( 3003): 2750-1469P.txt file - cDNA_ID_3034891; gDNA_ID_2096295; Annot_ID_195521
gactcaaatactgatacaattttacaaaaaggcattcattactagtaagacctacaaaattgttccacaagttgaggagacaagttagaaataccaaacaactttagacaagtatttccacttcgacttagagctcctctcaatcgtgccttttcttcctcatgcatcctcaacagcctaagaatctctcgcacacgagggaaaaatgcaccaggacgaacacaataaggtttaagcacagtaagaagtgcctctgcgtcaacttcaaacctatcaaacttttgtctccgtaaaacaggttctcctgagaaaaatttacgagaaacataatggtcaagcccttccgcgagatttctccacaagtccaagaagtctttcgggttcatgtttagatgaagaacacacagatgccttcttaaattgtccaatgcttctgcgacaccctgagacactgttaaattgctggagctggtaatgacgtcttcgtcccatgaaactgcattgttgtggaagtggtcgctgcaaagattgtcaaattggtggagaaaaactgttataatctccataagccaattggtttccaactcaacaaggcttttcagttcttccccaaaaaagcagccttggcaggaaacttcaggttttctatcaactttgacactggtttcggcagcccacatctctacaaaaaccaaatcatcactccattctcgtagttttgattcaagataccgagcagcattaaccggtccacatgcttgtatcagtgtatcttcagacaaaccataatgagagagatcagtctttttgaactccaataacagaattttgaatatacaccagagaaatctggtggcagtagctcttataaattggatccttggtagaatggccggtagagatagaccatggtctatcaacctccaagtcctattaagaaaagagtctgctactaatggcgctttataatcttctcttgtagatagaacatactttgcagactgtgagttggattcattaccaagtctagttctttcactatcaattacccaagctttctcattcttaatatcctctttactttttctataagcatcctttagctcaatcttcccccaggttttgagccactcaggtttcttacaaaacagtcccattactgatataccttgagaaaacgctgtcgaagagccttcataagatagacaagtatctgtattcacaaaagactgcattcgcttatcaaatgtaaccatctgatcgacaagatggaaccacgatgaaataccttcagatttcatgtgcttctccttgtacatatctataagcccaggaaaaacttttttctctaagaaaccagatagcatttggaccatcgctgaaacccaagcttctttagcactacagcttactaacatagccctatcaatcaaaggctgtaagaaatcgtcaaccccatcagcaaagtctcttgtaactttatagacaagttcaaaaataaactcaggttgctcagcccattttagaaaatgatactccatccgagatgcaaccggtttaactagttcatcggtcgcccaaagtccatcattatcagtttctttggtcatattaagcttctttcgtttttccttctgcgtattatgttgctgtaaaccacagaggagtagaaagctttgggaataagactcttttttatctccttgcatcaagagtagaggattagggatactatcaacctctccatgctcgactttggatgttgcaagttttggtggccagccaagagatgagagaaaagctcggtgatctgcgataatctgtggacgaagaacagacagacttttatctactctactatcaacagaatctacaaggcgacgccaccgtgagtgatgccttgtaacatcaccaagtatttcttcaatctcattcatggtcttaatagcatgactgaatctctcttgcttcaatgcaagatcctgcacgtacaaataaaaagttttaatctttcatatttaccaatcacaactccatatagtacttaacttgtggattgaaaaagctttacttgaagcgtacttcctttgcgtttacttatcggatgaaacacagaatcttcaagatcgccaacaagactttccaactttaaggcagtcactgaaaaattgaatctttcttagctagctcttgatgataatgttcaagaatcaaaaatcgagtcaaactcaccgaaatatttacgccgattctgtatacgacacaattcctctacgacttgctgtaactcccaattcgtttgctttccgacagaatccgtagctacaatgaaaaattggagacaataagaaaactcaatatctttacgtcaccaaaaataaaacacgagggtttggtaacttacggagacagaggaggctctccaggttcaatctcaaatcttcgagtgaaactttagcggaaagtgaggttgagatccaggaaacggcgtgcttcgtgagatccgtccggagatggagaagacggtcgtttagatcagaacagtcgtggtttaaattggacgtcagagtcgaagcgcggaggagcagatcttggaggtctacgaaattaccgtcaataaagcctagtgcgagaccgggaagggtggccgggtttggcaagacgaacgacagtggaagtggatgttccatcggaagcatttgccgggaaaaaggttgttccttttgttttctaaagccttcgtgtcctctgagtctaatgatgggttatgttatgatttttaatttcccttaagtttaactaaaaattagtatttactttgaagaaaataaaaagtaaaaaaaatcgctttgataaaaaaatttagcttctccgtgcagcgagtgtagtcggcggctgacgttttctttaccctaacacttttgaagcaacataacaaacgcgccgcgaatccatttttaagggtttagagacttttagggtttacttgagaacagagagatg

SEQ ID NO: 30732 - DNA, 3000 bp, Unknown; identical to SEQ ID NO: 9961
  misc_feature (1)..( 3000): 2750-1469P.txt file - cDNA_ID_3034899; gDNA_ID_2096295; Annot_ID_195518

SEQ ID NO: 30733 - DNA, 3003 bp, Unknown
  misc_feature (1)..( 3003): 2750-1469P.txt file - cDNA_ID_3034901; gDNA_ID_2096295; Annot_ID_195517
attctctaacttgatctcctcctcttagattactcacccgtcatcataagccaataaaaagcaaaatgcataagaattaccaaaagatttgaatttgagaacaacctcggattgtggagaggacccactttgttgacgaacaaagggacatgatcgccggcattataatggttcgacgagcctgatccgattccgatccagaaggtcaatgcaagtaggacttgtagtacagtaagcagaaattgcgccatgaattggcactcttcttctgctgggttccaaaagaaacgaatcaatatgtgcaacaagaagagctccagaagcagtcatcttctaaaatcttaatctaacaacagctcaagaagaaaaaaattccatagctagagagaacacaaagtcacaagacgacgtcgtagaggcacaaagtcaaacctgaatggcttaagccgaactgagtggttttgactagaccatcatcagaaaagtctccaagacggtagtcggatgttagatcgctcaagtaatttttggttttgttggtctcacgttttcagctgcccatttgatttcagtttgggcttttccttatctctaaaggcccaatttcatttaggtttagtttatttgatcattatccttactataaaggcttcgcctttcgagaaatttagggtttcttctgtctgtctcgtcactcaggtttgtgcctcaacgactgcttcacttctagcttgattcttcttcttcgtttatatgtatactgtacattagattattcttgtttctcgagcttctgctatagattttgattcttttttttgttgtctttgtttcgtttccaggatcagatcttagctaaattgagacaagctcaaaatgaggtacttgacgcatctcttacattcactgtttaattagagaacaatacgtctctgaatcgtgattcagagacgtattgttcttctgtcatatgcaataagtttaattagagaacaatacgtctctgaatcgtgattgttttttggatgtgcgttattgatagctttatgatgttaatagtctaggattgacacgaagttgttctgcagttttgcataaatgctctttactaaggcctctaaatttggatgacaaatctaaatcttgcctcataaaaatttaggtgtattaagataagattattttgtatggtagtgtctataatgtgggttgttcatgttgaggttgtcaatgttgtgtatttttgtttgtttagttaatttgcttaactctgttctttgtgggttaatacagtaagcttcagagtgaggccgttcgtgaagccatcactactatcacagggaaatccgaggcaaagaaacgtaactttgtcgagactattgagctccagatcggtctgaagaactatgaccctcaaaaggacaagcgtttcagtggatctgtcaagttaccacatatcccccgtcctaaaatgaagatctgcatgctcggagatgcccagcatgttgaagaggtgatatatcttttcatggaaattgatcattttgtgctctgtttcttgtataatggttttgtgctcatttcatttggtggctctattagtttcatttgatgttgtatatgtcttctgaatgtagatgcatgatgttttcggaatttggtcattgtttatttaggcttcatttcttgcataattaaatatttgcttatttcatcttgtatcttttcgtaggctgagaagatggggttggaaaacatggatgttgagtctctaaaaaagcttaacaagaacaagaaactcgtcaagaagcttgcaaagaaataccatgctttcttggcctctgagtctgtcattaagcagattcctcgtcttcttggtcctggtcttaacaaggcaggcaagttctggctacagctaatattccattgttcttctttacatccgttttgattttggataggttttagtagtctatttcttttgtcaatgtctttttgatacaatgccaatcctttatcctgtgagattatgcttctttgatgattcttaagtaacattcctttgctttactttacacaggaaaattcccaactcttgtgagccaccaggaatccttggagtcaaaggtgaatgaaacaaaggcaacagtgaagttccagctgaagaaggttctgtgcatgggagttgcagttggtaacctttcaatggaagagaagcagatctttcagaatgtgcagatgagcgtcaacttcctcgtctcgctattgaagaagaactggcaaaatgtcaggtgtttgtacctcaagagcacaatgggaccaccacaaagaatcttctgagctttcacctacttaaaattggtggctataagacacttcttcttaccctttcgtttttgtttcagacatatctgttaaacagtgtaagagttgtgctgctactctcctctttagcttttggtttggataatttgaaataactgcagtgattttggttaatggattttgtagcttatattatctttgaattagatgtgcttatttcaaagacgaatcaatccacagatgtgaataaaaacagaaattttcgttttcaatttgaaaattgtcctcgtggactgttccataaccaaattctattgactatgcagtaattgatctttgaattaaaaggatcaacccactgattatactccaattgaataaatattcttctttaatgttgtttataatctcttaagcaagctctaatgatgtatttttgaagcaaactctaatgcttttatggtcagtatatttattctcttaagttttataactaaattaccatttttttttgccaaagcagacaacaaaatagcgaagtgcgttccaaaagttagcgttttcgtctccgtccccaaatctctcagctaccttaaatcagaattctagggttcttccgattagggtaaaatcgaatccagatttcccaaaattctgatctttgatttataaaagatg

SEQ ID NO: 30734 - DNA, 3003 bp, Unknown
  misc_feature (1)..( 3003): 2750-1469P.txt file - cDNA_ID_3034905; gDNA_ID_2096295; Annot_ID_195516
ctttggaaattaagtgattattctaaaagcacaatcatgtttcacatttttcctactatgaccgtttcaatctatatactcaaggtaaatatgtatcaggtgatggattctcatcatacatagtcaatcaaatccacatgtttggatagaaaagaacgcagtacagtataagaatacgtacctccaccaccattcatgatcttcaccggatagctgaatgtaggtcaagataataccgacactcgaactcaagaagataagcacaatgaatgtaaaaagcattattccaggcgaggtatatatcttaaatccccacaagcttgcatagagttggtgccattcgagaacaactgcactgaaaggtacaaagcctccaagaaacacctgatacagctttctacggtaccaattctgtggtggaatttctcgggggtttcttttaacagcggatgggggttgaaactctaataatccaaatcggttacctaacactcctcccaacatgagaaatgggatattcaaaagagtgaaaatgagtatgatgatgactattgtgccaaaggggagtgcagctgttgccccataagtaattgccacagtgttgagaaccgaaagtattatgaagaaaggaaccggatagaggatcccagcaagacgaacactccttttctgaaaaaggcaataatgatttaacaaataaggttatacgaacaatgaatctttcgaggtcagaaaaagtagaaagcactagaaaagtcaatcacctgtttatttccctcgaattggctatggaaagaagtagatgtgtaaccagccactattgatgttagagtgtacatgatgacgagagaagtcaacagcattccacgattgtatgggtagagaaaaccggtgaaggccaatgcaaatagagcaataatcctgaagacgaaaaacaagttagaaacaacaataataagaagccaaatgttttttttttggtaagtagaagccaaatgtttatagataatagaagcttacaacagtaataatggaattatagataatagaagcttacaagattagcaactgagtaccagttcctaagattgcacaaagccagctgatgttccgaggacatcgaaatacatcactatgtacgagtttccaacctgcttcctttctctcttcttcatctccgatagagtaactgaaatgcataaaggagaagttaaactcaaaaatgtaaattttatcaccacatccgttaaactacgcaaaacaagaatagtctcctaagaaaaaattgtcaccttcttagttcattcttgagatggcgcatgaagagaaaagatataagtccaattaacaaaacaacaacagttatcgagttgagaaatgagaagaagtgaatcttctggctgataggatgaaacgacgcccgggagtacttattcattcttgtctcagagcgttctgaagtcagattccaagaaaccgagtatgtaaattgaacatcaatctcagtgttctcggatatatcaaccatataactcggatcactaaaactgttgatctcaataactttgtctgcattgtacagaacattgaactttaagtgactgaatatataatacttagtatgcttctccccttgaccaaaataatctccctctacttttccaacaaatccccacaaagggagatcatcgtagtacatttgaaagtagtaatcttgagcaataatatctctgaacctggcaatatcactcgatgttaatctcttccggcacaatacaaaatgagttttgtcctccctaaatttcagcttatataaagagctcattaaacgatcaccattaagaacttccccaagagtttcctgtttctcaatcacaggccctacaaaatataaaacaatcctaaatcaaaagaccgaaactagggacagatacaaatcctaatgtaaaactaaaaggacatcattgagaaacctaacctcgacggcagaacggcaaatcatagtattgataggtctcactgcaaacaaaacaaaacaccaaactttaaaatggggtttaagaaaatgtgccatctttgagttccatggtcaaactaaagctagaacaaaaacatatcttacacattctctaacttgatctcctcctcttagattactcacccgtcatcataagccaataaaaagcaaaatgcataagaattaccaaaagatttgaatttgagaacaacctcggattgtggagaggacccactttgttgacgaacaaagggacatgatcgccggcattataatggttcgacgagcctgatccgattccgatccagaaggtcaatgcaagtaggacttgtagtacagtaagcagaaattgcgccatgaattggcactcttcttctgctgggttccaaaagaaacgaatcaatatgtgcaacaagaagagctccagaagcagtcatcttctaaaatcttaatctaacaacagctcaagaagaaaaaaattccatagctagagagaacacaaagtcacaagacgacgtcgtagaggcacaaagtcaaacctgaatggcttaagccgaactgagtggttttgactagaccatcatcagaaaagtctccaagacggtagtcggatgttagatcgctcaagtaatttttggttttgttggtctcacgttttcagctgcccatttgatttcagtttgggcttttccttatctctaaaggcccaatttcatttaggtttagtttatttgatcattatccttactataaaggcttcgcctttcgagaaatttagggtttcttctgtctgtctcgtcactcaggtttgtgcctcaacgactgcttcacttctagcttgattcttcttcttcgtttatatgtatactgtacattagattattcttgtttctcgagcttctgctatagattttgattcttttttttgttgtctttgtttcgtttccaggatcagatcttagctaaattgagacaagctcaaaatg

SEQ ID NO: 30735 - DNA, 3000 bp, Unknown; identical to SEQ ID NO: 9962
  misc_feature (1)..( 3000): 2750-1469P.txt file - cDNA_ID_3034909; gDNA_ID_2096295; Annot_ID_195515

SEQ ID NO: 30736 - DNA, 3003 bp, Unknown
  misc_feature (1)..( 3003): 2750-1469P.txt file - cDNA_ID_3034909; gDNA_ID_1590766; Annot_ID_150021
ttgacaacaaacaaagatccttcaacgtccttacgactctgaatgacaaaagacagatcaatcattaggtagggaagcaaacatcaaattatgtaatcgaagattgattgagactaacccattggctgagctcaatgttgaattcatagaaagtgacatgagcggctgtgatgaggatttcctcgatgtatggatcgatccgctggagaactgtgagattgaggagcctcgtactgttttggtccagatttgggattatcttcccgttttgagacatcttttataaatcaaagatcagaattttgggaaatctggattcgattttaccctaatcggaagaaccctagaattctgatttaaggtagctgagagatttggggacggagacgaaaacgctaacttttggaacgcacttcgctattttgttgtctgctttggcaaaaaaaaatggtaatttagttataaaacttaagagaataaatatactgaccataaaagcattagagtttgcttcaaaaatacatcattagagcttgcttaagagattataaacaacattaaagaagaatatttattcaattagagtataatcagtgggttgatccttttaattcaaagatcaattactgcatagtcaatagaatttggttatggaacagtccacgaggacaattttcaaattgaaaacgaaaatttctgtttttattcacatctgtggattgattcgtctttgaaataagcacatctaattcaaagataatataagctacaaaatccattaaccaaaatcactgcagttatttcaaattatccaaaccaaaagctaaagaggagagtagcagcacaactcttacactgtttaacagatatgtctgaaacaaaaacgaaagggtaagaagaagtgtcttatagccaccaattttaagtaggtgaaagctcagaagattctttgtggtggtcccattgtgctcttgaggtacaaacacctgacattttgccagttcttcttcaatagcgagacgaggaagttgacgctcatctgcacattctgaaagatctgcttctcttccattgaaaggttaccaactgcaactcccatgcacagaaccttcttcagctggaacttcactgttgcctttgtttcattcacctttgactccaaggattcctggtggctcacaagagttgggaattttcctgtgtaaagtaaagcaaaggaatgttacttaagaatcatcaaagaagcataatctcacaggataaaggattggcattgtatcaaaaagacattgacaaaagaaatagactactaaaacctatccaaaatcaaaacggatgtaaagaagaacaatggagtattagctgtagccagaacttgcctgccttgttaagaccaggaccaagaagacgaggaatctgcttaatgacagactcagaggccaagaaagcatggtatttctttgcaagcttcttgacgagtttcttgttcttgttaagcttttttagagactcaacatccatgttttccaaccccatcttctcagcctacgaaaagatacaagaaatgaagcctaaataaacaatgaccaaattccgaaaacatcatgcatctacattcagaagacatatacaacatcaaatgaaactaatagagccaccaaatgaaatgagcacaaaaccattatacaagaaacagagcacaaaatgatcaatttccatgaaaagatatatcacctcttcaacatgctgggcatctccgagcatgcagatcttcattttaggacgggggatatgtggtaacttgacagatccactgaaacgcttgtccttttgagggtcatagttcttcagaccgatctggagctcaatagtctcgacaaagttacgtttctttgcctcggatttccctgtgatagtagtgatggcttcacgaacggcctcactctgaagcttactgtattaacccacaagaacagagttaagcaaattaactaaacaaacaaaaatacacaacattgacaacctcaacatgaacaacccacattatagacactaccatacaaaataatcttatcttaatacacctaaatttttatgaggcaagatttagatttgtcatccaaatttagaggccttagtaaagagcatttatgcaaaactgcagaacaacttcgtgtcaatcctagactattaacatcataaagctatcaataacgcacatccaaaaaacaatcacgattcagagacgtattgttctctaattaaacttattgcatatgacagaagaacaatacgtctctgaatcacgattcagagacgtattgttctctaattaaacagtgaatgtaagagatgcgtcaagtacctcattttgagcttgtctcaatttagctaagatctgatcctggaaacgaaacaaagacaacaaaaaaaagaatcaaaatctatagcagaagctcgagaaacaagaataatctaatgtacagtatacatataaacgaagaagaagaatcaagctagaagtgaagcagtcgttgaggcacaaacctgagtgacgagacagacagaagaaaccctaaattcctcgaaaggcgaaggctttatagtaaggataatgatcaaataaactaaacctaaatgaaattgggcctttagagataaagaaaagcccaaactgaaatcaaatgggcagctgaaaacgtgagaccaacaaaaccaaaaattacttgagcgatctaacatccgactaccgtcttggagacttttctgatgatggtctagtcaaaaccactcagttcagttcggcttaagccattcaggtttgactttgtgcctctacgacgtcgtcttgtgactttgtgttctctctagctatggaatttttttcttcttgagctgttgttagattaagattttagaagatgactgcttctggagctcttcttgttgcacatattgattcgtttcttttggaacccagcagaagaagagtgccaattcatg

SEQ ID NO: 30737 - DNA, 3003 bp, Unknown
  misc_feature (1)..( 3003): 2750-1469P.txt file - cDNA_ID_3034913; gDNA_ID_2096292; Annot_ID_195443
gtacttggcaattgatcagatggagtggacgatctctattcatacacaaacctgaaatgtagaagttaaacagaaaatcaaaagtctaagagtgcttaattaaaagagctttatccttgttaagaaaaagaatggagctttatctttggtaaagaataaaagagccttatccaatatgtagaagataaataagatgattggatataagattaattggaccgatcacaagaaaatggaggtagattattaagaaaactatcgacttctctaggtagaaaaaaattgagcgagaagaaaattaaatgagagtttgtaatttagtccataaaataaaaatagaagaaagagagcagaaaaagaggaggaacccactagaatcactgactcctactccacaatctctctctctctctttgtaaccgcctgtttgtgcttattggctctttttcatcaaatctctttttgggcttattcacgtacacattttttcaataatctatcatcttttctgtagtattattcatcgtattcacgtacatgcctatatcaaaatacgtatctgtatatgtgaaagtaaagtggtgaaatttgcataaaagaattgggtttcactctatcatcttagcagcatggatcatgcatgaagttattttttctaagtagtctgtgtgttaatctaaaaccaaaagaaaactaacaggaaaattctagaattatatcaagaatctttgaatgggcatgatatatacagcatatactttatatttttgccaaaaaaaaaatgatatatatatctttagtctagtaaacaaatatatactataactaaatgatcgaatacaactccccagctatagtttaagctaaattatatatattatttggatgatctaatgagtttgttattggaatagtactagagatagtgatgaaataatgttaatacacataatcataaattcataatcaaagacaatgcattaatgtgggataaggaatgtttgttgatttgtgtatgtatattaaaatagcagaatcgagtgagtttctatttctaaactacaactctttttgttaaatgacctttgagacagagagagggataagaatagtatgaatataatacgtctacttatatgtaacacactatacataattacagatttttttttagtttcatcttcagtctataaccttttgaaagccgagagtgataatatgtgaaacagtttctgaaagttttttcttcttctcaaaaattaacagcttttaggctttaagtttcaaatttggatataatagaactagagcaactttctctagtcggttaacctaacatacttaagtattgaataattaactattttgcctctaccagttcaaccaaaaaagccttagaataatgacaattatgtagaccaataagataaaattaaacggccttcttgcattaatcgtaaataaatatagaaaatagcattaaaattatcaataattattgtaaacatctcaatcgagtgttatttaaattgattagtttggtattatcctataattttgttgatcggtcaacatccactccctgtcatcacctaaatcctaatgccacatttcagattcctttcctttattagaaattgttatatgcctcctttgattcgtatagctgttttagtcaatgcagctctcttgcaaatccacatttgtcatggctttattcctttagtttgtgtcataatgaccccctccgaattgagaatttatttttcacggctctttagatgctttttttgggttcggtagaagtatataactcacggttaagcttttatagaatctcaatattaatttgtccatcaaggcatcaaaataatgtttagattaccatctcagcccaataccggccataatcttatatggaggatgcatattattatgtagacatcaatgatcaatcactttgggacaactactcaagctcgttttctaacgaattgggatttttgaattacttactcaaaatagtgtagtcggttttggtctagcatgatctaaaaagtccaacaagccgagaggcccaaaaccctaatattcaaaacttcgtggcctaaatgtttcatcctgtgtaattttcttcaacaaccattatcttgggtgaaaattgtcaaatttgcatattttccattattgtcattgactttctgattcggtaacagtcatatgatgtaaaaatgggccacatccttatttggtttgcttcaggcccatattcgtttgggctgttagattgtagcaatggtacaaagatctgcaattgatgtaatttaaccttggttaatggtgtaattttattttattttgttggggtcaaactgaaagcctcaaaggataagagtttttttctgttttttttttttcacacttttttttgttttgttagaattcataaaagggtaatataaacttgttaaaaagaaatacagtagatacgtcatatatacagaaaaagtaagagagacagatgttatcaaataggggggagtaaaacccactctaatactacttgttatgcttaaatataaaaatgaataaaagacttggaaatcaaataaggaagtgagtgattcccacgtcgcaccttcctcctaacccttttcttcatcgccactcaatctttctctctgcaacatcctctcttgtaacgtgtaacttgccaaccttttcttttttattaacccaagttcgttgccggccattaccaattcctttatcccataatctcttctctgcttccttcttccatcacattccccaaaaagtctcaacacagagcgagaagaagactcaggttttgcgagaggagagatagagagacttagaaagctcggtaagtccgaactttggtggttcggcggctctacgtcgtctgtaggtcgagtcgtcctggagctcgcccgttgtttctcgacggcggaggtggaagacaacgaccgaccagccatg

SEQ ID NO: 30738 - DNA, 3003 bp, Unknown; identical to SEQ ID NO: 30737
  misc_feature (1)..( 3003): 2750-1469P.txt file - cDNA_ID_3034913; gDNA_ID_2096295; Annot_ID_195514

SEQ ID NO: 30739 - DNA, 3000 bp, Unknown; identical to SEQ ID NO: 9921
  misc_feature (1)..( 3000): 2750-1469P.txt file - cDNA_ID_3034917; gDNA_ID_2096295; Annot_ID_195513

SEQ ID NO: 30740 - DNA, 3000 bp, Unknown; identical to SEQ ID NO: 9967
  misc_feature (1)..( 3000): 2750-1469P.txt file - cDNA_ID_3034936; gDNA_ID_2096296; Annot_ID_195566

SEQ ID NO: 30741 - DNA, 3000 bp, Unknown; identical to SEQ ID NO: 9966
  misc_feature (1)..( 3000): 2750-1469P.txt file - cDNA_ID_3034940; gDNA_ID_2096296; Annot_ID_195563

SEQ ID NO: 30742 - DNA, 3000 bp, Unknown; identical to SEQ ID NO: 9972
  misc_feature (1)..( 3000): 2750-1469P.txt file - cDNA_ID_3034944; gDNA_ID_2096296; Annot_ID_195558

SEQ ID NO: 30743 - DNA, 3000 bp, Unknown; identical to SEQ ID NO: 9973
  misc_feature (1)..( 3000): 2750-1469P.txt file - cDNA_ID_3034956; gDNA_ID_2096296; Annot_ID_195553

SEQ ID NO: 30744 - DNA, 3000 bp, Unknown
  misc_feature (1)..( 3000): 2750-1469P.txt file - cDNA_ID_3034982; gDNA_ID_2096298; Annot_ID_195602
ctccattttgttttttgagtagtatctaaatatctttatgtttttgtaaatgtagaattgaagatgaggctccacttcctgtaatttcacaagactggcttagaaaactctatgaagaactggaaaagcagagacttagcttaccagagaggtactttcagattgtgatttatgaataagttctcccttttttgagtttcagtgttaaattctgcgttagatcataatcgtttagtctcattttaatgtagactcaatgaagacgagcttcatagattctacagggtgtcaaatggagacttcacatccttactatcttcgataaaaaagacaattcattggagggagacttacagaattctttctgaagaagaacttgagacatggtcaagtttactcttttggcatggatatgataagaaccaacgaccttgcctcattgttcgtttggggctagcttttctaaagttgccatctcatgagagacctcgtttcgctcaggcaatcagtacgtccttactccttagtggctttactacattttccagtattttatttgctacggtatcattttaattttccactattgttattgtttcagtatctcaggtagagcacggcgttttgcatcttctgacccctgagaattcagaacttacagtgttagtcgattgtgaaggattatctcctctgaggattcccatgcagatgatgagatcttgttcttccattcttcaagatcacttccctaaccgtcttggctgcctattcatcattcgcctccctcctgttgtccgtgtcatttcccagactttcatccaagtaaaaaatctacctaagctaacttcaatttttcggttttcttagtctttgttctcggatctatgatcgttgcatatcccttgcctaaacttatgttcttctctcatagattcttagaccaaccacacgcaagaagctgagaattgaaggggaaactttccatcgagtcctctctgaatacctccagacacttccttcataccttggtagcaactgcaactgcaaaagatgctcaaatctcaacgaacaagatccaccacagccacaaacacacccaagaagaaagagaagaagctcgagtgaaacagagaagctagacgacagccactggagttacaatgcccagacacctgatttatcctatgaagacgagccgagcctgaacatatgcagccaagttctgcgaacagcagtcgtgttcttactcatgatatggctcttcggtgcactactagctggatttgctgatcctgagagcagacccttttaagcttccataaggtaagaaccatccataattaatttcaggcacatgcgtatgtcttctgtatacatagtaatagtaagtgtgataggcgttgatatatacatagtcattagtgaataaaccccatctctcatccagcgtggtcattgcaaacgcggactcaacgtagttttgggtcttggtttagggttaatggttgttgcggttgagtacatttgtacgttgggagaaagtaattatggtccagttaaatcgtgatgagactttggtcaccctctgcagtaaaactctgtgtacaattgttgccattgttggtaatgttttgtaaaaatcagatttatttaatgtgattagaaattgagaaatgtgtagctaaaatccttgatggatcatgctaatcatattttgttaaaaagctgagaacacaaagaccaaagtcatggatcatttcatgattctttttcagtccaaaccaaactaaaccaaacagaaccaaactaagttttatagatttattaaaatcgaaataacccgaacctaaaccgaaatgtccgcacccctacttttcgttgctgcaagttataatcataggtgagtgtcataaacttagtttaatcgatgattttttgtacaagtttttgtcttttctcaaaagaaaagaaatgattattcattcttcaccctgatttaaaaggtttacgttttctattttaagaaaattaatcgaagaactgatacaaaatcatcactgatcaaagaaatagtttatagttgtcaaacatgtataggacgtttactaatttttaatttcttctgatgatataataaaaaaatatattattatactcgtaatgtacaaaactgaagtcaaccagagaacaagctttttattagttctacgatctagcaagcaaacaaacaaaccaataataacaaaactatttgatgtatcattgtataaacaaacatttttaaaaaatctgaacttaaactacaataactaacaataattaaactatgctcaataataataatcggatttttcatcccaaataggaaaatgtatatgagaattcaaacaaattaattttcataaaacatgggagtatattgaaaattttagctagaaatctttaacaaaaagaaaaaaaaaaattagctagaaattcgcctaataataaacaactaaaattccctaaaattgtggaattttagtttcttgacgagtaaagaaaatgccacatcagataatacgtttggtcaaacgttgtcgttgtaatcgagtaaccacaaattaacatttgatattgatttttccacttttcgtgttttttaagtcactaatcttatctcacccaaaacaaattaaacaaacacacaaaaaaaagtctaaaaaaagaatttctcaacaaaaaaataaaaatatctaacttttccagataatatattcaaaattttacagagaggaagaagaagttcccgacacttgtgagagactataaaagtatacgatctcctcctctcgctctcttcagatcacaaagttttcgtttttagggttctctcatcgatctcgtaaatactcctctcgaaccctttctttaatcggaatcttctttttctctgttgtttgattcgattttttttttctcaaaaaaattcagggtttgtgatcttcttcttcatcaatg

SEQ ID NO: 30745 - DNA, 3000 bp, Unknown
  misc_feature (1)..( 3000): 2750-1469P.txt file - cDNA_ID_3035041; gDNA_ID_2096299; Annot_ID_195646
tacaaaattgtttagtagactacaatttttagataactttgtctatcattttcccacttgtttagtataggagcatttttgtcagttcaaaccacattaattcaaaattatgacagtttggaaaaaaataaaaatttatggcattattggtaagtttattggtcaaagtggcaaccaaaacttttggtcaagtgacatttttggtaagttttttggtcaaagtggcaaccaaaaatattattcaacatgcaacccaaacttttgaagaaaatttattatatatggagactacaagtaaaaagcctcaagacaaaacctacccaacgtggttaaaaccaccaactcttatatgagacaaaagagaaacacacttttcttggagtgtttccactttattacttcattcagaaagactagttgtcacacaaggaacacgagagtcgagagagtaatatatatatagagagatagagcttaagcaatggagaaaatggaagagaagaaaaggatagtgttagttccggttccagcacaaagacatgtaactccaatgatgcagcttggcacagccctaaacatgaagggcttctctattactgttgttgaaggacagttcaataaagtaagctcatctcaaaactttcctggttttcaatttgtaaccataccagatacagagagcttgccagagtctgtgctcgagagactcggaccggtcgagtttttattcgagatcaacaaaaccagtgaggcaagcttcaaggactgtataaggcagtcgttgctgcaacaaggcaatgatatagcatgtatcatctacgacgagtatatgtacttctgtggagctgcagctaaggagttcaaccttcctagtgtaatattcagcacacaaagtgctactaatcaagtttcccgttgcgttttaagaaaactcagtgccgagaagttcttggtggacatggaaggtgcctaaaaccagcttaataacctatcttgaaaccattcgtttcactaatacgtcattttgttttggctttttagatcctgaagtgcaggaaacgttggtggaaaatttgcatccattaagatacaaagacctaccaacttcaggagttgggccactagatcgattatttgagctctgtagggaaatagtcaacaaaagaacagcttccgctgttatcatcaacacagtgagatgtctagagagctcgtctctgaaacgtctgcaacatgaactcgggattccggtgtacgcattaggccctcttcacattacagtttcagcagcttctagtttactggaagaggacaggagctgcgttgaatggttgaacaagcaaaaaccgaggtcagtcgtttacataagcttggggagcgtagttcaaatggaaaccaaagaagtgttagagatggctcggggtttatttaatagcaaccagcctttcttatgggtcattcggcctggctctatcgcaggctccgaatggatagagtcactgccagaggaagtcattaagatggtctccgaaagagggtatattgtgaaatgggcaccacagatagaagtacttggacatcctgcagtgggaggattctggagccactgtggatggaactcaacgcttgaaagcattgtggaaggagttccaatgatatgcaggccctttcatggcgagcaaaagttaaacgcactgtgtttagagagtatttggagaatagggtttcaggtgcaaggtaaggtagagaggggaggggtcgagagagctgtgaagaggttgatagtggatgaagaaggtgcagacatgagagagagagcccttgttttaaaagagaatctcaaagcctctgtaagaaatggaggctcctcatacaacgcattggaggagatcgttaacctcatgtagcagttcttaaaagaacataatgaacttcatgtatcataaaagaacattgatttttattgaccctacaaagtttacaatgttcgattttataatttatagacccgtttggagcatcatgccaaaggaaaattttaaaaagattagaatttcgaggcttaccactaactcctcccaaagactctttgcctttcatagtgtagaggctttcatagtgtagaggcacaagcttcccagttcttgaatatgtttgaagaaatcccctgtcaacaccgaaatacagttttagcaaaaggattcacaaacacaaatttctcgcgctttatgagagcacgatctaaatagcaaaggaatctatgagtataaagaagatatatccaaaggttgcatgtgctattgctatttgaacataaaaatacggtataaatacagaattaagtctcaaatgttgacaaacatatagcagagaataataacacagcaatacagcagatggtattcattcttacttctcaaatgctcttcctaagcatttgttggaaagattattgcttcttaaaaatgagttatactaaatctttgaatataaagaagatagaggtttgcatctactgattgctatttgaacatcccttagaaactcactaacagactaataaattgtgctatgtataattatactgacctgatttacagagtaggtgtttggtttatgaaaatcaaaatcaaatacgattatctcttttggcattttactcaggatagaattgatgcagcagaaaaagacaatttttttggtatggaccatcttttgatatgaagccaaagtcggcaaaagaaccaagaagacaaaaccatctttgcttttttttttttggttatcaagatagagagatataccaatgtcaataagtaaagagagccaagaaaaacgaaatacagatgaaacaatgtccacaagtctgagaatctgatatttatctcagaaacatactcattttaatattctcatagatcggtcacagggaagaaaagaaattggaggaccaaattcggaaagcacgaggcagagcagttcttgtaaattttcgaaatg

SEQ ID NO: 30746 - DNA, 3000 bp, Unknown; identical to SEQ ID NO: 9983
  misc_feature (1)..( 3000): 2750-1469P.txt file - cDNA_ID_3035045; gDNA_ID_2096299; Annot_ID_195643

SEQ ID NO: 30747 - DNA, 3000 bp, Unknown; identical to SEQ ID NO: 9990
  misc_feature (1)..( 3000): 2750-1469P.txt file - cDNA_ID_3035052; gDNA_ID_2096299; Annot_ID_195633

SEQ ID NO: 30748 - DNA, 3000 bp, Unknown
  misc_feature (1)..( 3000): 2750-1469P.txt file - cDNA_ID_3035098; gDNA_ID_2096300; Annot_ID_195688
taaagtttgccacttggaacgctaacagagcttttctatctctaatgcgcgcgtgacgtccacacgcatcggatcggagaggcctgacttaatgaaaatgatttactttttgtttcccgacaaaatatttgattaagctttgttcaaactatttactgtaagagaacattaaaataaggtaaaatgggatcccgaaaaagatatacaattagttacaggatttgtttattacaagagaaattgtgattcacatttagttaagggtaactatataaatggattcgtttactattttattgcctctcagattagttacgacttcaacgaatcaaatgtacataacataaagtcttatacagttatgcacatgtaataagagatatactatcaatttaggtctgttgtctgttgataattacattattgaaaaactaatctttttttatataactaaacaagtaatggttgttttgtaggaaaagacgaaaaatattatagcaatttaaaaaaacaataagaaaaagtgtatgctctatattaattgaactaacctaaaacctgaacactttacaaaatgataaccatgtgagacatatatattgatgcaataacaagtagagtttatttttattacgctaatgattggttattttaggtatttattaagattatttagtatctaaacattgtatttcttatttagatatgtacaatatgtgctaggacaatatgttattatagttttgtaaatgatcaaattttaatgtccctacgtagcatttttcatactcgtctgaatttgacactaaaaattagatactttacaaaactataattttgtatttctggtttatccaacagctatttactttttcctataatatataaatcgcgaaagatgttactttttcgtaatgaaaaaatgacttgaaaagattaaaactttgcgacaagatttaactatcttttatataaaacatgaacttcatatgattttcatagataaaaagactttgacaaactatactatgcactcaacaaaaaaaaagaactatgaactcctatatatgtgtaatttaagaaaaatcctgttatttattgcgatggtacggaaaaaagaataatgattgagaaacggctaattattgttttgttctataaagaaacatgaatatcaggattaaaaagagctaaagtgaaaacggcataataatttgacatacaatgtcacgtgaactaatttgcttggtaacgtaaattaagtgagatcactttgcaaatctcactttctttaaatatcttattaaagcaaattccagaatgtcgtcatattttaatgatagagaactagtggaattctcaattcattacatcatatttatatggtgtatcgatttatattacttgtatatctatatataactaaacgcacaataacttaaaatataatttttcgctacacatgcaaattgattttgcaaggtatatagtcattcagattgatcatttgtagttacttggttggttttaaattagcaacgaaatcacgtaagcgtcaacataaggaaacatgtagaataaaagtgaatgaactaatcactaattaagaaaaaatattagtttaaaccagtgttttcacgcccgacccgaaccgtccggtccgaccggttaacccgtaatccgaacatttttccggtttgggtttagtgctaaaacccaacaagttcaaaaccgaaaaaacccacaaaaactcgcaattaacccgtgacccggtgaaccagttgaaccggtcgggtgtgggttttaaaaagttctcttgattttacaataaaatatgggattttagactttattcaattatttttagaagttttttcagttcttaaattcatttgatgttttagattttgttgatgactttacaataccgccttaaaattgaatcgaatggtgagagagacaaccgagattagttgttttaattcacgatgttttattaatttatttctgtcattgatgatctcctaatatatttgttacggtgttagacatttattggatttcaaatttttaaccactttattattattgtttgattttttctatatatatatatatatatatatatatatatttgggtgtaaatgattttatattttgttaaatataatataattttatatttgattaaatatgatatgattatttttgttttatatttataaatactacaaattttttttattataaaatactctaaaatttctattagtattaaatttattaaataaattttaactaattaacccgtggtccaacccggttgacccgatgacccagtgacccagaagatagtccggttcatcgtccgggtcgggtttcaaaacattggtttaaaccgaagttggcaaatatacttattacgttgtgtaaataagttaaataataggattggtgaaaaccctcaaaatcgtaaaatgattaggtcataattatgtcattgtatatatagagaattagagatgcatacgtagaatctagacataatccttaagaaaatagcttgcctaaacagctgagattgacaagcattattaacataactaattatgttttatttcttaagccaaaacctaaaaaaggttatttggtaacagaattgttatttgtacgtcaaaatgtatatgatttggtaatggtttagcgtgtgaattattgttgcgggtctttttttgttatacaactacaatgacattaacgctttttaaaataaataagaaattcaaacattattcaaaatattattgttcacacaaacatttctcctttttccatctcccacacaaaccccattcctccctttagccctaacccctatatatacgtgaagtccccgaaacactaagctcgtgccattagcttttacattaagagaaaacacttgcaaaactaagtgctatctctcttcttcttccttctcctaacaacttatataccatg

SEQ ID NO: 30749 - DNA, 3000 bp, Unknown; identical to SEQ ID NO: 30748
  misc_feature (1)..( 3000): 2750-1469P.txt file - cDNA_ID_3035098; gDNA_ID_1972174; Annot_ID_179942

SEQ ID NO: 30750 - DNA, 3003 bp, Unknown
  misc_feature (1)..( 3003): 2750-1469P.txt file - cDNA_ID_3035102; gDNA_ID_2096300; Annot_ID_195687
ctacaatgtgatcaagaaatctctctcagaggttcttgttcattactaccctgtcgccggaaggctgacgatcagtccggaagggaagatcgccgtcaattgcaccggagaaggtgtagtggttgtggaagctgaggctaactgtgggatagatacgatcaaagaggccatctcagagaatagaatggagacgctcgagaaacttgtttacgacgttccaggtgcccggaatattcttgagattccaccggtagtagttcaggtgaggttttgatcgatctcttgcgtactaattactatatttttcgattagcttttacataaacttaggttttgcgggaaaataatgtatttacaatgacggcgacatgcttatagacagcagcaaactagagtagcaaatatcctacataatgttcgggagtaatttgcttattttagccacttgataattgatataaatgatcgcatttaatgtcagaaatgagtttaactttttgagtatcaatcacatgtgattgtccaaaatgtagatttatgggagttttgcttgagaaattcaattatacttatttatatgatatatgacaaaatacttttttgtttgtaatagtaaaatcttaatataaaaaaaaaaatcttaatataaaaatataatccaaaaaaatacaactatatatgtaaatatctaaatcatagtttattttaataacaatctccctgaatatcattgggaaaaatgtcaaaaaaatcacgaactttcaaatttgggatgatttaatcttgaactccacggaagacaaataaatcgtaaagtttttgttgactttcaaaataaataacaaagtttttgttgacttgccatttgagtcatgtcgttaaataggttaacagaattattttacggcgttaatatctcgtgtatctgctctgttagaacaaaacgacatcgtttattgcagagacaaaggaacgtcgttttgtttgttgaaacaaatttaaaccctaaatccccaaatcgatttattatctgcgattttgaggtcaaggtgggtctgtgattttgagataatgaaatcgatttggggatttagggtttaaatttgtttcaagacaaaacgacgatgttttgtctctgcaataaacgacgttgttttgttctaacagagcaaataaacgagacattaacgccgtaaattttttctgttaacctatttaacgacatgactcaaatggcaagtcaacaaacactttgtcatttatttcgaaagtcaacaaaaactttacgatttatttatcttccgtgaagttcaaaattaaatcgtcccaaatttgaaagacatttttcccgaatatcatttatgaattatgatacaatgttactaaaaaaatcatttttatgtctcatgcatgtagtaacgaacacacactaatatagtaacaaatgatcagacgttactcttaaaaactagagtggtcatcatgttcaaactttaaggtacattagaccatctaattagaaccatgcgtaattagtattgttaagtaaccaaaagaaataacgacgatcaatagtaagttttttttttttgtgtgtgtaaccaataggtagtacttaagttaaatgtatattatttcattcctatttctttaaattggtatcgattcattctaaaatgttgcatggattttttttaacatctttagataaagttttatgttccgttttttttttcaggtgacaaatttcaaatgtgggggttttgtcctaggactaggcatgagccacaacatgttcgatggagtcgccgctgcggagttcctcaactcgtggtgcgagatggccaagggtcttcctttatccgtcccaccattcttggaccgtacgattctccggtcacgaaaccctcccaaaatcgagttcccacacaatgaattcgacgaaattgaagatatttccgacaccggaaaaatctacgatgaagaaaaactcatctacaaatcatttcttttcgaacccgaaaagcttgagaagctcaagatcatggcgattgaagaaaataacaataataaggtatcaacatttcaagccttaaccgggtttctttggaaatcaagatgcgaagctctacggtttaaaccggaccaacgggttaagcttctgtttgcggcggatggacggtcaagattcatcccacgtctcccgcaaggatattgcgggaacgggattgtgttaaccggtttggtgacatcatcgggagaattagttgggaaccctctttctcactcggtgggtttggtcaagagactggtggagctggttacggacggcttcatgcggtcggctatggactacttcgaggtgaaccggacacggccgagtatgaacgcgacacttttgattacatcctggtcaaaattgacattgcataaactggatttcggttggggagaaccggttttctctggaccggttggtttaccagggagggaagtgatcttgttcttaccaagtggtgatgatatgaagagtatcaatgtgtttcttggccttcctacttcagctatggaagtgtttgaagagcttatgaagatctgaaaaagaacatacattttcataatcaaattatgatatattctaccaaattataagcaaaggaaaattataatctagtcattatttatacatgttatatttgaattcacgtttgtatccattacaaaaatttatgtaattcgcagaaaatatatatatgtcaaattaagttatcggaccggatcgggtcaaagaaaccggattggttaacaaagtcaaacaaacaaatattgacttgagtttcagattccagtaaaatcaaaccggatcgggtctgaatttaaaccaccgggtcggctccatctaaaatctgaagatcatctccgccttatcttgttgactatctctgtactacttacgagcgcaagtgagagagtaacagagaaacgtagagatatagcaaaatg

SEQ ID NO: 30751 - DNA, 3003 bp, Unknown
  misc_feature (1)..( 3003): 2750-1469P.txt file - cDNA_ID_3035110; gDNA_ID_2096300; Annot_ID_195682
gaggaaacaggaattgcttgtgcagaacctgagacaacttgtagaagagaagaaaaaagacatgaaggagattgaggagctttgttcagttaagtcagaggaacttaatcagttgatggaagagaaggagaagaatcagcaaaagcattaccgtgagctgaatgctatacaagaaagaacaatgagtcacattcaaaagatagttgatgatcatgagaaattgaagaggctgttggagtcagagaggaagaaactcgaaatcaaatgtaatgagttggcaaagcgcgaagtgcacaatggaaccgagagaatgaaattgtctgaagatcttgaacaggtatccatttactctctgtatctctcttttcaagatatatgttcaagaaataattggtttttttctcttatcagaatgcatctaagaatagctctcttgaactagctgccatggaacaacaaaaggcagacgaggaagttaaaaaacttgctgaagaccaaagggttagtgactttcttcttctttgtaaaaatggttgggcttattttcgtgattactgagaaaattctgtacctaacagaggcaaaaggaggagcttcatgagaaaatcataagactagaaagacagagagatcagaaacaagcgattgagctagaagttgagcagttgaaaggacagctcaatgtgatgaagcacatggcatcagatggcgatgctgaagttgtgaaagaggtggacatcatcttcaaagatttaggtgagaaggaagcacaactcgcagatctcgataaatttaaccaaactcttatccttagagagcgcaggaccaacgatgagcttcaagaagctcataaagaattggtaaacgtatgtatcattcaaagtgttgttcttttcaatcacatcgaaaagctatgagaaagcttgacattttactaaaatcttggttttgtttgtttcatgtgccttcatagattatgaaagaatggaacacaaatatcggtgttaagagaatgggagagctcgtgacgaaaccattcgtggatgcaatgcagcagaagtattgtcagcaagatgtggaggaccgagcagttgaagttctccaactttgggaacactatctcaaagattcagattggcatccattcaagcgggtcaagctcgaaaatgaagatagagaagtggtaagaccgccttcttgactctgtttgttatgttgaatctctctgaaagattaaaaagcttttttggtgttgttgttaattgtgtttaggaagtgatagatgatagagacgaaaagctgagggagctaaaggcagatttgggagatggtccttacaatgcggtcacgaaagctttgttggagataaacgagtataacccgagtggaaggtatattacaacagagctatggaacttcaaagcagataagaaggctacacttgaagaaggtgtcacttgtttacttgatcaatgggaaaaggcgaaacgcaagcgtggaatggcttagaggtttaaccatttttgataaccgaacaaaaatatgttttcatttgcaattgttatttgctaatataggatttcgattgatggtttgcagctgcaagatgatggacatgggactgaataaaaagccgatgcggtttttagttgcagagaaatgtgtttggtttgaccaaactttggtggattctgtttgtttttcttctcagaacttagtgaataattgacacaactttgatgtcttgcatcggttcttttcattgtaacatttgtaggagtttggccgctttggacaataagaaataaaaatatcattgtaatataattcacatgtaaaacaactagatttggcctctcttctgtctcatatcttaagcatgtcatttagaaccttttattgtaaaaacaaactttgtcatgagttactttttgtagtcaaatttgatattgaccccttccttattatgctaacactgttttcatcttataaccctataaatctaagtttcgtgaatatagccaaaatcatctacatcattgcaaagaaccttaaaggagaaagaagaaaaccggcttgagagagatggaaaacaactcaggagctattctctttgtgatcttagctatgaccattgttcttcaagtgaggccagggttctctcaagcactccctacgatccccggacttttcccaccgggtcttcctattgatatcataaaatgttggtcatctctctttaacgtccaaggatgtgtacaagaaatctacaaatcgatattttctggtcagtttgctagcattgaagccccatgttgtaaaacgttttcagctatagatacaaactgttggccacatatgtttccattgaacccattcttccctcctattctcaagaacaactgcgagcgtattgctacgactccatcatcaacacacaagtgaaggctacacacaaatgttgcgagccagttgttagcttcgaggtttaagaagttcttttatcgatttgagagatcacaatgcccaataatccaaaattctccttgcagtaatttttttttttttgtaatctttagcttaaaataaacaaagctaagctttttgatgtactcgtatgtgtttgccatgtagtttgttaaaagagtggttataacataaacaaaattttgtttgcgtttatatatgaaaatattgttcttacactatggaataaaacatatttcagcatttaaaatttgtaaaaacgacgaacacgaacgcatatcaataccataccaaaaagattatatcgtacatgaaacttgttgcagacaatggcatgactaatgggcctctattaacttagcccataaggcccaataaaactttccaaatagtttcatttttcagattttgaagaatctcccgacgactcctctctgtctcctcctccgggaagctttctgtctctctctctctctctctacacaagaccttgaagaatccgattccataacaatg

SEQ ID NO: 30752 - DNA, 3003 bp, Unknown
  misc_feature (1)..( 3003): 2750-1469P.txt file - cDNA_ID_3035113; gDNA_ID_2096300; Annot_ID_195675
aataggcataaatactacatataagttttttggtcagtagtttcaaaactatttatatatcaagttcaaaagcggagtgttcttgttaatttggaaaaaagcttgaggattctactaaaaagcaatgcacactaagaacaaatttgtaaaattataatagagaaaaagagaactaaccggttcctttttgaatccaaggcgaaaccataatggtaggaacacgaacacctaaccggtcgaatttaaagaaaccaggagccggtccagtattcccatcgggatttggtataccgacataaggagtcttgacgtgatcatagaacccaccatgctcatcataggttataactaggagcgtctcgttccactgtggactcgacctaagtgcctcgtacacttctttaaccagcttttgaccgttagccacgtcatgcgacgggtgatcatcgttagccggtaaacctttgagatcgaaatacctcggttcgattacggttaagctcggtaactttcctttggccgcgtctttcttgaatttcaaatcgtattgatgcaaattgaaaatgtactttagctgtcggagattacggtagaataatgtggtcggaatattctgaaagtatattccgaagtcgatgtcgttgctatgaagcgaatcaaatatcgtcttctgtggatacctgaaattaaatgatgaatacataactatgcaaaattttataatagtttatattatctcaatattttctatggaaactaatcttaaaaattcagtaatcaagtgtgaaattaaactaatgaaaattaacaaggactaatgaaaataataatttaaagaaagaatttgataatgttacccttgagcgagttgtttcttgacatggctagtggaaccatgtgaggtagccgaatagacaaataaccggtttggttgagtcggaccgggaattgaagaaaaccaccggtcgaacacagcgaattccttaaccagctcagcataaaccggaacagcttcaggcctaaagcctttcattacagtctccgacaaatttcccggcatggaaagcgcttgctcaacgaaacccatcatggacgggatctgacccggcccagacccgaatacttgttgctcaacagcttcaaacgaatgacccggatccggatccacaaactcagcatcactagtgaaacatatagtttgtgtagaattcggaaccgggttacattcttgacccgttacaccgtttattgtcgggtttactgagttcttcatccatcctaagagatgatcgaaagatcgattctccaacactaaaacgacgacggttttgattggtgattgccattgatgagatccttgagctacatgtgtttgtgtgagaagacagtagagtgtgagaaagtgtgagaaagttaaagaaaatcttgaagctgatgatggtttcatggatgggttttttcttgggaaaaatctggttaagcttttggtgtagaatttgtgtctgtggttttgttttgccttagattggttacatgaaagaagaacataaagacagtggagagataattgtctctttgtaaccaaaatacaaaaagataaaaagttttaaatatatagtattataaagattttgggtaaatgtgaagtgtagagagcaagaacaaaaaagctgtggtgtctatttactgctttatttgtttccactactactgctttgatttaggtgggctcgatatgtagaagaagattctgttctcactgagaaaaagtaactaaaaacgcagagatttactcggtcaatgaaattcttgaattttggctgattttattatttgtagctatattataaaacttggaaatatatatgcacgtgaagtcgtgaagagttggtcttgagaaaaccacgtagatgacctcagggttgatgttgttttcttgtagattttagtgttacaagtggattcctagagttctaaatagtttactagttgtgagagatcttgacaaatgtatatcataactttaaaaacataaattggatccacaatccatacaaatgtttataactttatatctgagttttttttaaggagtattgtataaattctctgtaccaagagtatcggaaagtagtattaatatacttaaaataattgaacaataaatcatcatcatggtagttacttttgtctaaggtgccccactgatcttccattaggaaaaaataattggaatttgggagttaaaggaagaaccaatgcttagtgctttttcattctccaaatttctttagtatttttagtttttctgcctcaagtttagtgtttttagaccatgtacataggtgatataattagagtatcaagagtcacaaaataatttttaatatatcaaacaatagatttaggcctgatactgtatcagtgcagtgattcttttgatacccagtatcggatgacgtggaggcttatgattcgtctgtgaaattcgtttttttctggaaaaaaaaaaacatttttctctccgatagtctttctactgttttagctaagtagctacattttccgcaagtgagtaattttgccaacttttcgtgattatgcgacataattttacagtaattttgtaactctatatttttataaatttattttttgattttgcaaatatttttttttttaatgataccaatatcggtatcaccactggaaacaatttattaccagtatcataaaaaatctcaaataataaataaacattaaaattaatattaaaatattgttaatgatactcatagtgtatcaactatgtgcatgctctaaaaattgttagtttaccatatatagtttattttgtgattcacaaaacaacggaataacgaaattatttcgaattttttgtaaattaaataattacgtaaaaacgcattagaaagatgttgaggaacaatttcatttcttcgctcttaatcaagaccttattacaaaacaaaaggaaaaatg

SEQ ID NO: 30753 - DNA, 3003 bp, Unknown
  misc_feature (1)..( 3003): 2750-1469P.txt file - cDNA_ID_3035128; gDNA_ID_2096300; Annot_ID_195665
acgtggagatcacaacagaatgagttcggtttggaaagaagatattcacgcaaagatctggagtgatccaagatcttgaagactaacctagaagaccaaagacctcgatgatataaatagaggtgctaaggtgcttgctagagttggccatgattgtgagtgaaaaagctagtgcaacgcttttcattgttagagactaaggtttagtctgattggaattctagagagatcaaagagtgtgttcttgtgatatactcttgtgtgtttagagaaatctcaggtgacaagatatagtagtttagatcttgtgtaaaaccaattaaggtagttgtaaacttcttaatcagatttctaataaagtgatactcagtggttcttagtttggggaatacgattcttggttcatccggaatttcacatctacctaggacgacgaaacccaatatcttggacaaccaagaaacggaaggggtggcaagatcatctatagaagtagagtatagggttgtcgcaaacacggcctctgaactaagttgggtatatatgtaatattttcacataacttggaattactttcaacacaccacttgttgtgtactgcgacaacgtcaaaaatatcttcctttgtgctaatccggtcttacactcaaagatgaagcatattgctatagattatcatttcatccgtggttaagttcaacaaggtgctctccgagtagttcatatcaacacaaaggaccaattagcagatgtgttgatgattggagtgtcacaagcctctccatcttgagggggcgtgttagtgatacgattacgattcacatttatctcataatatttgattactctgttttaggtaatgtcttaattgaaaaaaactagagtctcgtctcttattcttatataaatatgttgatgtacaaaaccctaaatatatgagaaatagtttcttaacatgttcaggtcatctataaggcaagtaaaacacatgcttaagtcataaaatagaatctaaagagacattattctgaaatgatcaacttggtctacttagcctaattttaagtcaatacatacaaatttgatctctctaactatatttgtttttctctttctagtgttctttttctttccaatatatatacatagcatattttgaattctttttgttttatggagtaacgtcaaatattataatagccgcatataaaattagaatttattaaatattaatttataacttttttattgtagacaattattttaggaaagcaaagtatatttagacgaaaatagtattaggatgaataattttttgaaagtcctaatgttgcatattttttgttttggtgaacaaatttcgtgttgtagttcttaaacatctatactattaattgggaatcattgaaaataaacaaccttacgaagggtaaaatattacaaaaatactattgattgttagtatttttaaataaattctgattaatttaaaataattataattatgctttacatttagaaatatataaacaataaattgtacatacttattttgaaatattttggttttcttttttctttttttcaacctgatttttttttaaataaatccataatatattattgaacaaacttttgaaataatgtaaactaatacatttttcattcaaaacaaattatccaacaaaaataatttggattatgagtactatataaaataatttgaaaccaaacttgacatcaaattaaatatctaactggtatgagtttgggttatgaacactatatagcatgtacgtattttgtgacacaaattctatttgtgatgtttacaggttggtagtattttttttccacatatacagacgggttatgagacgaaaaatttatgatacatacatcacaggttttccattccaagaaatataagtcaaatatacgtttttattttctaaactaatcaaaacattataactgttataacagtaatcaaaacattataacagtttgattactggtgtaaaataggatataaatttggttttagtttgggttatttatctgtgtgaattcggatcttaaaatataattatataccaacataattgaatttcgattattattcttaactttataatatttatactattacaaagtttaattataacaaaatattatatattttaaaaatctatttaaaaagttctattttatatgtatatgagatttcaaatatctaatatattgtattataatatatattacaaaataaaaaaaaataatttacattgaattaaaaatatgaatccgcacatacgtaaaagttaggatctagtaatttgtataaaaaagaaagaagaagatagttatccatttcataggtcggctgctaatttttggcggatttctaataattatatacaatccaattaaataaatgaaatatgtcgtggaaagtggaaactatataaaggatagagataagtacgacttcgacaaatggagatatattatcattattattattataatcattatctttcgctattcctgaccaatacccaaatgatctccgctactctttccacgtgtcaaaagcactgaattgaacggatgagatcttaagtcactaaccaaaacaacacttgaatttttttataacaaatcacagttccacccaatgaaatccattttgtttcaaaataaacccgtatctttataatgaaactgaaagattcaaggatgtttttgataaattaaaaactatgtagggcttcattcataagatttaagacaacagggtttatgaatttgtctctgcttcacgatctctctactatggtgtactgtatctttcaatctatagttcagttacaaagatcatcacagccaattttagaaaacttctgacggaaaataaaaagagaggatttatttttatctttctgtgttaccggagaataaagacggtaccttttcactgttgacttaacggagaagatg

SEQ ID NO: 30754 - DNA, 3003 bp, Unknown
  misc_feature (1)..( 3003): 2750-1469P.txt file - cDNA_ID_3035156; gDNA_ID_2213622; Annot_ID_195758
ccagaatttaaggagcatcgaggtaagagaagtagatgtaacacgggatacttatattagtatataccacatgttatgcatgctttgtttgctaagttctagcaatgatcaacagatctctgtagaaaaagttgctctcaagtcatctgaagtgagagatgaagaaatcagaagagcagttgagatggccgatgctttccttcgggctggcagggagactctaattatgagcagtcgtgaactcatcacgggaaaaagttgttctctatctcaaatctttatatatttgtgtcgttggtataaaatcatgactgaggaatatcatcattaacgggtctatattcattttgacagcatcttcggaaagtcttgatattaacagcaaagtgagctccgctctggttgaagtagtgagccagatatcgaccagacctcgttatattcttgctaaggtatttagcttctatatttatctttccatctcataaacttcctgacacactctgtcaatccccagttgaaatggtaactgttctatgatccaaagcctttcgatttttttttatgacactgtaacgtcattgtttagggtggaattacgtcatcagacacagcaacgaaagccctgaaagcacgacgtgcacttgtgattggtcaagcccttgctggtgttccagtatggaagttaggtccagaaagtagacatccaggggtcccctacattgttttccctggtaaatcttaatttgtattcaaaacatttaactgaataaaaataggtattcttaatcaactctttttccttatatgtaacaggtaatgttggtaacagcacagcgcttgcagaagttgtgaagtcttggtcagtggtagcaggacggtcgacaaaagagctgcttctggtgagtatccttctcgttctctagcttcatatatctcttctcatattgatgttgtctttctatgtaaaacagaatgcagaaaaaggtggatatgcagttggagcatttaacgtgtataacctggaaggaatagaagctgttgtagcggccgcagaggaagaaaatagtcctgctatattgcaggttagtgttctgaccaaaagtggatttctgatatacaatagcaaccaaagattaacattctgttctgagttgttcaaagatgtccgacacaaagagatttgataactgaactttttttggctaccttttttaggtccatccaggtgcctttaaacaaggaggcattcctttggtttcatgttgcatctctgcagctgaacaagccagggtaagtggctttgtaactgtacgttgattctgcattagatacataccaaaattttaggcaatcatgtacttttgaactcgctctctagctttcatctgtggtttttcggaatagacattgaaatcaaaacttaatagctgatcctaaatacccagtacatgggtctgactctgagccccctgattaatacgcacaatgtggcaggttccaatatccgtacactttgatcatggaactacaaagcatgagctattagaagctcttgagctagtaagtttgagatctctatcacttatgtgcaatctctgtgtcatcttttacttattcttatattgaaaattcataccaaatcgatttcttgcagggactagattcagtgatggtagatggttctcatctttccttcacagaaaatttatcctacacgaaatccataacagagttggcccgttccaaaaacattatggtggaagctgaactaggccgactctcaggaacagaggatggcttgactgttgaagactatgaagcaaagctcaccaacgttaaccaggtccttgttggttttaagccccgataaatccaatctctcacctaacaaatttatgttgctaaaccaaactacaatttattattatgagttttcaggctcaggaatttatggaaactggtatagatgctttggctgtgtgtataggaaatgtccatggaaagtaccccaagtccggtccaaacctcaagcttgatttacttaaggtgaattatattcttgtgctgactgaagtaagttctatgagtttgtgtcattcttattctaactgatcaccatgtatgtaggaactgcacgccttaagctcgaagaaaggcgtttttcttgttcttcacggagcttctggtttgtctgagaaccttatcaaggtatgagtcgatcatgtttgaaagtttcttgtttggtaatagaaaactaataaaatcggcgggaaattttttcttttgatggagatcttgatatgaatttaactgaattaacgtctttgtgggctatgaaaattgttgactgaatgagatcaggaatgcattgagaatggagtgaggaagttcaacgtgaacacagaagtaagaacggcttacatggaagctcttagctctgggaagaagaccgacattgttgatgtcatgtccgcaacaaaagcagccatgaaagctgtgatcgcagataagatccgtctctttggctctgccggaaaagcttgagttgttgataaaaaaatgtccgatcaattagttaagtacaattgtacatcacatccaaagaataaaaaaacaacaaatattacatcacatccaaagaagatgaatgcattgtatgcaatgcagatgcagtgttgttggaaataaagaaatcatttttagtactgtttaactgttttttttttctttttctcagtcaaatatataaatagaaactaaatgggcaaatatttaattgttgttatcggataaaactactaattattcatggctataaaatcctcgcaatcttcgccgtttatcttcccgttccccgatcaaaaatatcccaaactctcacacacattctcttcattgggactcatattcttctttcttttctttttctttcttttttcgtgtttttattttgctatctccaagtatttatctttatgacttgctttgttcctatccatg

SEQ ID NO: 30755 - DNA, 3003 bp, Unknown; identical to SEQ ID NO: 26565
  misc_feature (1)..( 3003): 2750-1469P.txt file - cDNA_ID_3035160; gDNA_ID_2213622; Annot_ID_195757

SEQ ID NO: 30756 - DNA, 3003 bp, Unknown
  misc_feature (1)..( 3003): 2750-1469P.txt file - cDNA_ID_3035172; gDNA_ID_2213622; Annot_ID_195751
tgaatcgtcagatgaatttcaatagagcatatttctgatcatacaaaaattctacaaaaaaataataattgcgatttgggtcacccggaaaatatccagacccgtaatatcacaagcagtcggatctaaagactttcacggagaaaagggtgaccgagaagctgcgacgccgtccacctctcactcgattctttacggagacaacagtcaacaaaactcctaaactcgtcggaacatccttccggcgcacgcggtggttctccaaagcacacgacgcacattaacgtcgcccagtcaggtctctgtccctgaggaagcaacggaaaatgtccgacgaagagctcaagtatcatcactccgaaactccagatatcgcctgcgtaaacatcggagttttctccggcggcagagtcaaatctctccgggctcatgtaagcgcaagtgccgacgtaggaattgcagtaatctaacgatcgggtaatgattttgctcactccaaaatcagcgattttaacttcgtttctcgagtttaagagtagattcgcaggtttgatgtctctgtgaacgatcttgagtgagtggagataacttaaacctttcaaaatctggcgggaaaatcccgctagttgtttctccgtaacggcgccgcggagagattctaggtttccaccgtccatatactccatgaggatcgaaacctctccgacgattggtttctcgaagatcccttgacacctgacgacataaggagaatccgtgcgacggaggatctccatctcgcgcgctaattgtcttgtgaaagcaggactcatgtcgccgttgactgatttcagagcgtatatctcccccgtggttttgtggtggactttgtatacgatcccgctgcttcctcttccgagaacgtggagtttctcgacatcggaagctgagattccgttgttgatgacgggggcggtggatgaggcaaaggagaaccaggggaggtgaacagagagcggtgggacagggagacggaggttgatttgacggcgtttacgaacaagagccatggaaatagaagagagagagagagagtgatgatggtgatcgaagagtgatggaagttgcagtttttatatggagacttgagtgggatttaagtgaggagcctgggaagctaataaatctttccattaaatgttaatcactcttttttgttctttatcttaattattatttgttgagttgtatctaaaaatggcaactagtgtgtctaccgtttatgtttatcttgcacgaggttaaatgcatgggactgctatctgtcctacttacccggaacctggctatagtggcttgtgtatattgagataaatctacgcaataatgattagatttatatacatttaaagagtttgttttagtgattttgaatggtaactcaattatcaaagtttgttacagcctgtatcgtgataattacaaattacaaaggcgttataaaagcgttacttttaacgttttgcattaatgattagatttatatgcatttaaagagtttgttttagtgattttgaatggtaactcaattatcaaagtttggtacagcatgtaccgtgatattacaaattacaaaagcgttataaaaacgttatttttaactttttgtactacttatttatatagttttgcattctaatttacagctaaaacaactttaaagctttgtgttacctatcagaatcgttatcttcacattcaaacacataatccattgttgttgaaaaataataatactttcaaaacatttattttagtgatattaatttgacttgatagtaagattattatttactcataaagacattggtggaatttagttatataattttcatatactaaactataggagattttaaagtttaatgtgaatttgtgaggttcaatgtacctcggaggctaaggacttctaatgaaaatgaccaaacaataagttatatttaggccatcatgcaaaagctttccaatggccatcgccattaatattgccaagttaattattaatatgattttagtaaaaactatgattagatcttcagattcttagtggacagtcacacatgaccctacggattacaagtatttagcatgtcgattgtcatgcgcgtatatatccaaagaatactgaataaaaataatatgaagtcaatcaaatgaataacaatcaaattatatgaagtcaatcaaacctttatgaatgtgatttgcttctttttccaaccaaaaaacttgtttgtttatttgttagttgttactcccaaaaaaatgtagtaagctttttatgccccatgtattatatatcaagacgatctccaaacatgactatagtttcataggatggattggatatcaggacatgtgtgaatttactaatttttagtattgaaacaaacaacatttcaaccaaaattttttaccattaaaattaatatatcgacgtccgatagtataaagcttgaataaactgaatttcgtatcagtagccagtttgaaaaataaatttgttccttgagattttggtgttcttttccaaaagaaagaacaaagaaaacaaaaggcccttgtaaaaggcggtttagttcataaagaaaactgggcctatctaaaaatttgaactaatgccatatttgggcttagtaagcccggcttacgatacgacgtttatagtcggatctgattcggatccaaacccgtttgatggatccggctcctaccaaatcacttcagatttctgtataagctaaaaatccttgaatttttcagtaagttactatagcatccgagaatttcattctttaactctggttcgtaatcggaaaactcaaagacctgttgtgaagatatattggagaagaaaaaaaaaacgatttcccggcactgaaatagcattatcagatctcgttcccaccgggaagatttcccggcacactgaaattctgacttggaatcgtctgtgaaactatg

SEQ ID NO: 30757 - DNA, 3003 bp, Unknown; identical to SEQ ID NO: 26569
  misc_feature (1)..( 3003): 2750-1469P.txt file - cDNA_ID_3035176; gDNA_ID_2213622; Annot_ID_195749

SEQ ID NO: 30758 - DNA, 3003 bp, Unknown; identical to SEQ ID NO: 26570
  misc_feature (1)..( 3003): 2750-1469P.txt file - cDNA_ID_3035180; gDNA_ID_2213622; Annot_ID_195748

SEQ ID NO: 30759 - DNA, 3000 bp, Unknown; identical to SEQ ID NO: 10059
  misc_feature (1)..( 3000): 2750-1469P.txt file - cDNA_ID_3035184; gDNA_ID_2213622; Annot_ID_195747

SEQ ID NO: 30760 - DNA, 3000 bp, Unknown; identical to SEQ ID NO: 10057
  misc_feature (1)..( 3000): 2750-1469P.txt file - cDNA_ID_3035192; gDNA_ID_2213622; Annot_ID_195743

SEQ ID NO: 30761 - DNA, 3000 bp, Unknown; identical to SEQ ID NO: 10071
  misc_feature (1)..( 3000): 2750-1469P.txt file - cDNA_ID_3035196; gDNA_ID_2213622; Annot_ID_195742

SEQ ID NO: 30762 - DNA, 3003 bp, Unknown
  misc_feature (1)..( 3003): 2750-1469P.txt file - cDNA_ID_3035200; gDNA_ID_2213622; Annot_ID_195741
cgccattaagtttgattcagtatggagttgaataagcagatcaaacatctagagaccttgaacaattatattgaataagaaataatgttccatattgctacaaacattatctatcgttttaatgataaaaactacaatttatgcgccaagaagatgtttatggttggtcatgctaagaatccgccaatgctagacttgcaaaaggcatcaatcatctaaacagagagtatcaacgaaaagtcttcaagctttgacttcaacttgcttaggaactggtaccagtaacccgagacccgttttactatcaggagctacatgagaatacagattctccttatacaatggattcgatgtcactatccgtacaccggagtccctgcggatctccaaaacctcaggcaatccatcagcacatcccttggacatgccaacatcaatcctaatggctttatcattacaaacaccgttgataccagcatcctggattgtatgtcccatgatcatcctcttaaccccgggaatagtggaaagagcatgctcaagagctgcacaatcacatttgtgagccatttcttccgagaacttcctcaaccaaactacagagttccctcctctacaataagcaggcgcatatcttcctcctttaaacccgttaatccaaccccgaacctcctcgttaatcctctccagtccatactctatatgctcagctaaaagaccaccgtgaacaaaaaccgaatcaccaacaacagcaactgtttgattcttagtcaagaatctctttgcaatcggaccatcaggtctcaatgcagcaatcctagctctaattccttcaaaacagtcggctctcatacgagggaagctcatcggaatcccttcgtaaggatccttaggtttatcaagaccactgcataaagtcttcatcttgttccctaaacaataccaatcagcccaaatctgaaattcctctaaacctttcttagtcacatatctaaagtcaccttctatattcatgatctcatggttcccattcatagtcagaatcttacctccagctctctcagcctctcgtttcaatttctctaagaaataaagtatcttcaactcctctccacctcgatctagtacgtcgcccacctgaacaaccatcgttgatccaccagtccatctgtccgacgaatcaatcagaccagcgatcttgaatgcttctctagacttctcgagatcgccatggagatcaccgattgcaacgagtcgctccggcttctcgaacctcgtttgcagaatctcattttgtgagctaggatcttggggcaggaagatgccggagacggagtaatcaacgaaagtgtcgacgaaggaagagatgagcttgggaatgcttttgcagattccgctagggttttctctgcttgacattttccgtgataaatggcggccaagaacaatgcgcctttataagtttccttattaagcagtttattaaattaattcattgactagccaataaacgaagccaattagtgagtgactctttttgtctgtgtatcttctagatattgttcaagttgggctttggatctcctacaaggccacgcccattgttttgttgctcatgaattaagtaggcccattaacccagatagttggaaatgagttgaaccagagtattggactctgagcagcagagcagcccagagttgagaccagacgagatcttccaagcttagttgtataaaccaacgatgagtgaccggtattgaagtccctttactacaatttgcgagctgtcttatgtctattttatatacaagagttacagtacacaaatagttttttactaaaagacaagaaataagaaaacaagattcattctccttatgacaacaaaaaaaagaaagaaaacaagattcattcatacaaaaaggaggaagttgtgtcagaattgcaaccaatttaaatacatttagaaccgtcaacgcctctattgtttgttgtgactcttccaagtatgaaggttattgtattaatttatcctcaagttttttataacattgatatgataatggttttaaacgctttatgcgttattgtaaaatttatttaccccacaatagaaaaagaaaaatgcaattgtttagttttcataagtcacaatcgtagaaatattttaatataaattgaggtgtttgttgtatgtttatttgttctctttggataagtcacgacttgccaagaagaaggagcgtgagagatcgtgttaatgtggggtctttcttcttcaattaattacgatctaaattgctgagtttttttttttaataatgatttgactttcttttcctactattatactaaaatgatattttatcccaaatgtagtaaatttaatagcgatatctaatataagtttcagctaaatttaattcaatactcttttttttttttttttgaaaaacagtaacactgttatttgaaaaaattcaaaagcatttaaatatagtggaaacaaaactttatcctttgaacttttttataaagaaaaagtttagattcttctactgtttaaaaagaaaagaaccattaagtacgttaatgcggttaccgaacatgacattaagctttcgtttccttaattatccgagtggtccaattctttaattacgaaattatgaaagcgaattaataattagttaacgaaagtgacattgagaacgcgtttgcgtttcagttatggcgtgcaaacaaagctaaacaaaaaattcagagagattaaaaaaaaacaaaaggaatccaaaggaaataaatgattttgtttgcttttgcttgcaaataaaaatcattaaaaaaaaacgaggcgtaacaggaaggagaagaagcaggggtccatcatcaaatacaacattgtagcaattgcgttttcgactttatagagatattttcatagagatggtctcgaagctaacaagttgacaaatttcttcgttataagagagatagatg

SEQ ID NO: 30763 - DNA, 3000 bp, Unknown
  misc_feature (1)..( 3000): 2750-1469P.txt file - cDNA_ID_3035212; gDNA_ID_2213622; Annot_ID_195738
gtgggcggtgaaattgaggttggacaaggaactagtccttaacaatgccttaatggacatgtactccaaatgcggttgcattactaatgcacaaatgatctttaagatgaacaataacaagaatgtggtttcttggaacacaatggtaggaggtttttcagcagagggtgatacacatgggacgtttgatgttctgagacagatgctggcaggaggcgaagatgtcaaagcggacgaggtaaccattctaaatgcagtgcctgtttgtttccatgaatcattcttaccgagtttaaaggaacttcattgttactccttaaaacaagagtttgtatacaatgagttagtagccaatgcctttgtggcttcttatgcaaagtgtggctcactgagttatgcccagcgtgtgtttcatggtataaggagtaaaacagtgaactcttggaatgctttgattggcggccatgctcagagcaatgatccgagattgtccttggatgctcatttgcagatgaaaatttctggattgctacctgatagttttactgtctgtagtcttctttcagcttgttctaaactaaaatccctgcggttgggaaaggaagtgcatgggtttataatccgaaattggttagaaagagatttgtttgtttatttatcagtactctcattatacattcattgtggggagctatgcactgtacaagcattatttgatgcaatggaagataaaagcttagtatcttggaatactgtaatcaccggttaccttcagaatggatttcctgatagagctttgggcgtctttagacaaatggttttgtatggaatccagctttgtgggatttctatgatgcctgtgtttggtgcgtgttcgctgctaccttctcttcgactggggagagaagcgcatgcttatgctttgaagcacctcctggaggacgatgcgtttattgcatgttctttaattgatatgtatgccaagaatggttctataacacaatcatctaaggttttcaatggcttgaaggagaaaagcacggcatcttggaatgccatgataatgggatatggaatacatggcctagcaaaagaggctataaaactctttgaagagatgcaaagaacaggtcataaccctgatgacctaactttcttaggtgttctaacggcttgcaaccatagtggtctgatccatgaagggctgagatatctggatcaaatgaagtcttcttttgggctaaagccaaatttaaagcattatgcttgtgtcattgacatgttaggccgagctgggcaactagacaaggctctaagggttgttgcagaagagatgtctgaggaagctgacgttggaatttggaagtctctgctcagctcatgcagaatccatcaaaatctggaaatgggagagaaagttgctgctaagttattcgaattagaaccagaaaagcctgagaattatgttctgctttccaacttatatgcaggattggggaaatgggaagacgtgagaaaagtgagacagagaatgaacgagatgagtttacgaaaggatgctggatgctcttggatcgaactaaacaggaaggtatttagctttgttgtcggtgaaagattcttagatggttttgaggaaatcaaaagtctttggagtatattggagatgaagatatcgaagatgggatacagaccagacacaatgtcagtacaacatgatctaagtgaagaggagaagattgaacagttaaggggacacagcgagaagcttgcccttacctacgggttgattaaaacttcagaaggaacaactattagagtttacaagaacctaaggatctgtgtggactgtcacaatgcagcaaagttgatctccaaggtcatggaaagggaaatagttgtgagggacaacaaaaggtttcatcatttcaagaatggggtttgttcttgtggagattactggtaagtaggactgtaataaaattggtgaaaacagatgcattagtaatagtagctcttagtaaattcagtattgtgtgtatttatgttcaggcgagacaaacatcaatgttaatatgttataataagctatttgttgtgtgtttgttgtaacgcaattacatagattataaaccaaactgatatataccaagtgaaactgaacttttttcaatgcgaaacaagttttaaatctctcattggtcagtgctcctcactatatataacgtctatccacattctctaacttctcaaaaaacaggaagagaagcaagacgcaatgaagagttcaatgagcatcattgtcttcttgtttgtgaccatcttcaccatctctgcttcttccttgaaccctgaggaaacttgcatacaaagaaacatcaaccggtcacaacctccaagctcttcactcgaacccaagacatcaaagttcgactttcttgtggacaagttgtgcagagacatggctcgtgccgtcatgttctctgtgaggataaccggaaaattcccatctcactatgtgaaggcgatgtgtaatgtgtttggaaatgacgagaagaaagtgaaagagtatgttgtgaagaaatggttgggaggttcgaagctcgtgtctagtttatcttgtgcttttcattgaaagagtataattgtctttagtgatattagtctattaacaattagctaaggttttcatccgaaagtcaaaaagattatgcaaattaaaacgacacaattagtaaagaaattatgctcaaaagtcaaaaacttacaaataacagtttttatgcaaaattaacttcagaaatttatgaatagcaattccataaaaatatatcataagaatgtgtaaaaaatcagagatttattctcctttttgctaccgaatccattactcatgttattgagacccaccccactaaactcataggttaatcactctcggataagaacattcgaacaattaccgacacacaaaaagtttgaagagaaaaacaaaaaatg

SEQ ID NO: 30764 - DNA, 3000 bp, Unknown; identical to SEQ ID NO: 10054
  misc_feature (1)..( 3000): 2750-1469P.txt file - cDNA_ID_3035216; gDNA_ID_2213622; Annot_ID_195737

SEQ ID NO: 30765 - DNA, 3000 bp, Unknown; identical to SEQ ID NO: 11047
  misc_feature (1)..( 3000): 2750-1469P.txt file - cDNA_ID_3035228; gDNA_ID_2214475; Annot_ID_133120

SEQ ID NO: 30766 - DNA, 3000 bp, Unknown; identical to SEQ ID NO: 10094
  misc_feature (1)..( 3000): 2750-1469P.txt file - cDNA_ID_3035243; gDNA_ID_2213625; Annot_ID_195836

SEQ ID NO: 30767 - DNA, 3000 bp, Unknown; identical to SEQ ID NO: 10096
  misc_feature (1)..( 3000): 2750-1469P.txt file - cDNA_ID_3035250; gDNA_ID_2213625; Annot_ID_195833

SEQ ID NO: 30768 - DNA, 3003 bp, Unknown
  misc_feature (1)..( 3003): 2750-1469P.txt file - cDNA_ID_3035298; gDNA_ID_2213626; Annot_ID_195882
tgtcagaacaagaaaacaagaacacgaagttagaaacaggaacaagacttactcgaacttggaatagatattcccgaggataaaccgccaatgaaacagacttgtcaaactgaaaagtgacagttgggaaccgatctaatctgtgaatttgacagaaaatttcagagggtcaaaacatcaaacattatatactaggtgtataaaatcagtcattccatcagattcagctaaatccaactccatttcaattccaaaagcaaaaactagtacatttccagcaaataacagtaccatttcaaacattctcactaaacaccaagaatgacaaagcgatgagttaaattcttacttgtctgtataatggaaacaagtaaacgactcttgaactgtatgcaaagtaagctctggatgtgaagccaatatctgatggaaactcaagggaaaaaaacataagtgttaagaactttgtaaaataagacagaaagaattcacaagtaacagaatatagtactgacctcattcagtaacgggttataaacagcatcaggaagatacaccagagttgtaccactatcaataataactcctttgtcatctcccgaatcaaaagcattcgaagaaagttctaaaactgaattaccaacttcaattgcattgaggttgacactatagtgagctctgtgaaagagttgcaaacagtgtaagaaattcaaaacttcttgacaaagaaccaaagaagaagagctttaagagaaaggcattcacttacgatttagagagcataggtgtagtctttactttcggcgacacgacttctccaatggcgaatataccacctccattgttgttatccaaacaatgcgcaaaagaccttttgacctttccttgtgaagctagctgcgatataaacgatgaatttgattgtccaaatcccattatcccatcaaccgcagcttgtgactctccgagctgaccagactgtttagacccacatctgtataagaaccacaaataacagtgattcagagatttgcaagccacaacaagctacaaaattcatagaagaataaagctgtttttccttaaactaacccgaagataatagttccgttggtggaaccggtttgacgatttccagtaactaaatccaaatgaacaacatctttcaccaagtatccattagttgaactcccatcgccatacataataacatactgacaagtagaacctgagtgacactcagatctttggttaacgtaagagcaaaagttgtcactgcacgaaacagattttgcagtggacgaagcatccacatcataaggtgtcagctctacctgaaagataatgaaactatgaaactgaaaacataatgtaacttagagttctgtttttttttttggagggatagaattgatggtatataccagatcacttttcctaggacatctgatgcaaccagcacaattcacccataagatatcacttcctgtatcaacttgaacatggaagtctcttgatggagttccgagtccgattttagcgaagtataaactgaaattaaaaacaacaaacataaagaacaagaatcaacattttaccgtagaagacacaagaagaagaccatttcataatgagtcaagaaccaatcaaagagttgagaatctcaatagattcaaaagctttgttttttcttcagattccacatttaaaaaagacaaaaaaaatccgactttttgttaaaaaattcccaaaattacaggttctggtaaatggcgattcgaacccaatagactcaggctggctatcgccgccgagaggaatatcgatggcggagaggagtcttgagtgacggtggacgtcgtgagctctgagagctccaagatcttttactctttttccggcgaacttgcttcgaacttcaaataccaaattctccgaagccgtcgccgccgtcgagaattgcgggtcaatcagcaacgccgccgacagcaaaatagccgacaagaaccactgtctccgcctgagatccatgaccggagatatccctaactaagttagttgagaaatccaaacgaaaaaaatgaagagaagaaaaaaagcaaaagaaagaaaagtatagtttggcggtggagtacgatttaggacaaagaagaagaagaagaaaaattggtactttccaaataaaaaagtattttaatcattaactaaacaacattttgaaattaatttaagactggctagaaaattatgtactatataataagattccatgactacaaaaaaaaaaactaattaaatttcaagattgtaataattatttaaaaagaaaactgaaataactgctagaatacacttttggcagctgtaaattattttcacttgtataattcattttttcacatgaatatgcattgtcacattattaggctcatttttaacatttttttaccgtctaatgtagattttaacaaacaaacaaaaatcgactctagatgataatgagtaatgataaaatcatcagttgtcataaattgtaggattcaaaactgtttttgatcacaaatatgagagttttccttagatacaaaactagtaatcactgaactatcatgcatgttgttggtattttgtattttagtctaaaatagttaaatttatggaaaataaaagaattcatgtttgtctcatcattttgagggaccgaaccgtaatttcgcagtaagaaacataaatatcaatcttaattcctcaagaattctacacctcccgttccatctatcacgaaaacaaataattacagtaagtacccccgaatatccttgttcatccgaagcaattcgaggataataccgtctttttctctttaaaatccaattaacataaaataaatatttgctcagtccgttgagacctcacacacactctctctctgatcattcaacttttcgaaattttgcttcatcgtcttcgtcatcgtctctctgttgaattcctcaaacaatg

SEQ ID NO: 30769 - DNA, 3003 bp, Unknown; identical to SEQ ID NO: 30768
  misc_feature (1)..( 3003): 2750-1469P.txt file - cDNA_ID_3035298; gDNA_ID_2213626; Annot_ID_132066

SEQ ID NO: 30770 - DNA, 3003 bp, Unknown
  misc_feature (1)..( 3003): 2750-1469P.txt file - cDNA_ID_3035301; gDNA_ID_2213626; Annot_ID_195878
atcaaatctgcaggtcatctgatggaaaatattgaagccaagaatttgctgcacagggcttttagtgtatttttattcaactcgaagtatgagttgcttctccaggtatgtacatatgcttgctttgaagtctagataagtcaagtgctgtatacaaatggatcacaggcgtgtgactgggcatggctatgtcatatctagaatcacatttttgaagagaaaattaatttcaaaaatatgggaggttagatcataggcttgattctagagattttcttgcacatgttgggtgttgctatgatgatgggatgctctcgtgatcgtagatggttggtgggttttaataatctggctcatatgtcatctgactggtttcttctcgtttgaacagcaaaggtcaaacacaaaggttacgttccctctagtgtggactaacacttgttgcagccatcctctttaccgtgaatcagagcttatccaggacaatgcactaggtgggtatctactggcaaaacaatttagtacttctttttactatctatgtagaaaactgtagcttttctcaactagtgacctcactgttactcatcaggtgtgaggaatgctgcacaaagaaagcttctcgatgagcttggtattgtagctgaagatgtaccagtcgatgagttcactcccttgggacgtatgctgtacaaggctccttctgatggcaaatggggagagcatgaacgtaaataccatttctcaagactcttggttcccattttcttgaacagaataataaaaccttaagcttcttctgtgttggccttccttttgcagttgattacttgctcttcatcgtgcgagacgtgaaggttcaaccaaacccagatgaagtagctgagatcaagtatgtgagccgggaagagctgaaggagctggtgaagaaagcagatgcaggtgaggaaggtttgaaactgtcaccatggttcagattggtggtggacaatttcttgatgaagtggtgggatcatgttgagaaaggaactttggttgaagctatagacatgaaaaccatccacaaactctgaacatctttttttaaagtttttaaatcaatcaactttctcttcatcatttttatcttttcgatgataataatttgggatatgtgagacacttacaaaacttccaagcacctcaggcaataataaagttttcgtttttatcttaattaatgaatgaatgtcacaaagtttgtgagatgtacaaaaagcgtcgaggaaaaggataacaaggaaacagagtcgaaaccagagaaaaggcaacgcaaagattccttttttcgaagcttaacgacaacccaccttccatctgatttaagtaaagttaaaagtcactaatttaatattattgaacgaccgaaacaagtatgttgatgactttgttctcctttaaattatcatcacttcatttctcagagatttacgcacacagagttctcttcttcgtcctagtttcttctattccaggtaaatgaaataagattcgatcaaaacccagatggattttgaaatagttttcttgtgaattgaatgaaaagtgtgtatctttccttctgggttttgattgattgactgagaatatatatgatcactttatctagactaatctcgatttgtcttttgctttctgtgtttgagtaatttctcgtaaatctcatataatcaaatccccagattacttgttttgatcataattcttgattcaggtgagaagaaaaaatggcgtttgtgaccactgcggaagtgtgtgacgcgaatcaagagatgattcgaagtggccagctccgagctctgcaacccgtttttcagatttatggtcgtcgtcaaatattttcaggtccagtagttactgttaaagtctttgaagacaatggcttaatccgtcacttcctcgaagagaaaggtattaatgattcttgcttataaaattcaaaagactgaaactttactcgtagagctatgaactttcagagtatctttgacatggtttattggtattgttacattttagattcaattcttgtgttacttacttgtcaaatagtttcaattgttctttgcttgaaactatgtttgaagaagtcttaagatcatctctctatgatttagaactactgctcagtgtttatatacttcttcagtcactttgctaatcaagttcttgaatactagagacgagataggtctttcaaaaacccgagtcaataaaccaatctgttctctgtagcattcacatcaaaagctcaataatgttttaaatgttaaaacaggcaatggtagagttcttgtggtggatggtggagggagtttacgctgtgcgatactaggaggaaacccggtcgtacaagcgcagaacaacggatgggcagggatcatagtgaatggatgcatcagagacgttgatgagatcaatggttgcgacattggagtgagagctttagcttctcatccaataaaggctagtaagaaaggacttggtgaacaaagagtctctttgaacattgcaggcactcggatatgcgatggcgaatggctttatgcagatactgatggtatccttgtttctcagattgaattatccgtttaaaaggacacaagtgatgttgttgatttgttaaaatctgtaagctactacttttgtgctttgtgtttctgtaatggctatcagagtaaaagttggcttctttgaatatgattattgaactattgaatccgtttcgagttgataaaaaaaaacatttcgtaaagtgaaaattgcaaaaagatccttgaagtatccatacaagcatttttcgtagatcaatttccaataactggatacttcgagggtcattttgcagtttaccaattttctaaatccgccttcttgcaatttcacagtgcttcgttttaggtcaaacacaacgaaagacagaaaaccctaatcactccggcttcagctctgtgtgtgataatg

SEQ ID NO: 30771 - DNA, 3003 bp, Unknown
  misc_feature (1)..( 3003): 2750-1469P.txt file - cDNA_ID_3035301; gDNA_ID_2213626; Annot_ID_132063
ttaattaatgaatgaatgtcacaaagtttgtgagatgtacaaaaagcgtcgaggaaaaggataacaaggaaacagagtcgaaaccagagaaaaggcaacgcaaagattccttttttcgaagcttaacgacaacccaccttccatctgatttaagtaaagttaaaagtcactaatttaatattattgaacgaccgaaacaagtatgttgatgactttgttctcctttaaattatcatcacttcatttctcagagatttacgcacacagagttctcttcttcgtcctagtttcttctattccaggtaaatgaaataagattcgatcaaaacccagatggattttgaaatagttttcttgtgaattgaatgaaaagtgtgtatctttccttctgggttttgattgattgactgagaatatatatgatcactttatctagactaatctcgatttgtcttttgctttctgtgtttgagtaatttctcgtaaatctcatataatcaaatccccagattacttgttttgatcataattcttgattcaggtgagaagaaaaaatggcgtttgtgaccactgcggaagtgtgtgacgcgaatcaagagatgattcgaagtggccagctccgagctctgcaacccgtttttcagatttatggtcgtcgtcaaatattttcaggtccagtagttactgttaaagtctttgaagacaatggcttaatccgtcacttcctcgaagagaaaggtattaatgattcttgcttataaaattcaaaagactgaaactttactcgtagagctatgaactttcagagtatctttgacatggtttattggtattgttacattttagattcaattcttgtgttacttacttgtcaaatagtttcaattgttctttgcttgaaactatgtttgaagaagtcttaagatcatctctctatgatttagaactactgctcagtgtttatatacttcttcagtcactttgctaatcaagttcttgaatactagagacgagataggtctttcaaaaacccgagtcaataaaccaatctgttctctgtagcattcacatcaaaagctcaataatgttttaaatgttaaaacaggcaatggtagagttcttgtggtggatggtggagggagtttacgctgtgcgatactaggaggaaacccggtcgtacaagcgcagaacaacggatgggcagggatcatagtgaatggatgcatcagagacgttgatgagatcaatggttgcgacattggagtgagagctttagcttctcatccaataaaggctagtaagaaaggacttggtgaacaaagagtctctttgaacattgcaggcactcggatatgcgatggcgaatggctttatgcagatactgatggtatccttgtttctcagattgaattatccgtttaaaaggacacaagtgatgttgttgatttgttaaaatctgtaagctactacttttgtgctttgtgtttctgtaatggctatcagagtaaaagttggcttctttgaatatgattattgaactattgaatccgtttcgagttgataaaaaaaaacatttcgtaaagtgaaaattgcaaaaagatccttgaagtatccatacaagcatttttcgtagatcaatttccaataactggatacttcgagggtcattttgcagtttaccaattttctaaatccgccttcttgcaatttcacagtgcttcgttttaggtcaaacacaacgaaagacagaaaaccctaatcactccggcttcagctctgtgtgtgataatggcggcggagagatcgtccatcactctcggagggaaaggttcttctttatcttcttcctccgtttacaatgttgcttccggcgtcgctaatgttcgaattgactcttctgcgatcgagagattctccactagaaacgttccatcgatcaaaaggagctcctttggtatccctcaagggttaacgaacgaagaaactcgagcttctctggctgttctcttaaacaagcttattttgtcgacttctggtcctccttcttcatccaccgctcgttctgttcttccgcttaagattgttgagattctgaatttgaaggctgagagtttggaattgggtgagattgatgtgacagaaggggaaaacattgtgttggagaagtcgtgtgcttcgttgattgggatttgttctattatagatcacaaatcgacgactctttcacagattgtggattctgttgctgcgttgagttgtgaggttacaaaggctgatatagcttcgtttagcttgttggattcaggagatgggaatggtgataaagatgtgattggtgttgctggtgatctcaaggttttgcttaacgggtataaaggtacagggaaattagaaatagaagagatttcgaaaatcccttggattcatgggaaattcaggtatgtggtgaaaagcgtgcacgcggatgctaggagagaattgaattccggtgttaaaggaggcaaaactgggtctggaaacactgggattggtgaggctttaggaacaacattgttacctttgttaacggcgattaaaaacttgggagtgtgttcgttccttcgtgctaagctttgttttgagaagattgtggatgagaatctgaagaaatgtttatctgaaaagatctgtgttgagaatgagaatctaaagaatagctataagttagcttatactgctcatttggaagaggattactgcaggtttgctcacaaactgaatgagtgtctgggaattgtatggagaattgttggtttggaggcagttgctgccttttttgctcttgctggtggagaattgtttgttcagaagagcggagatgcggacaaagaagagtcgaagaccgataagaaaaagaagaagaatgagaaaaaagcagttgtgggaaaggggacaagcctagttatccagtttatcaaagatagattggtgagtaatgacgcagcaagtgatggtgaccagatg

SEQ ID NO: 30772 - DNA, 3003 bp, Unknown
  misc_feature (1)..( 3003): 2750-1469P.txt file - cDNA_ID_3035305; gDNA_ID_2213626; Annot_ID_195874
aaaccagatggtatttatctcctaacgatgtaccatttcttagttttccttgttcatacgatcagtaaaatgaaagaaaacaaaaaatgatcattttttgtttgtttttaaagataggagacgtgcagaagaaacagaggaaatagagcaatcggaaggaacatcgttgaagatattcactttccgggaattagctacagccacaaagaatttccggcaagagtgtttgctaggagaaggtggatttggtagggtttacaaaggaaccctcaaatctactggccaggttcttccttaaatctccagaatttggaatttaggatacattcatgagaccatcaccaaagttaggtatttttcaatgagccatcatcagaatcagaagaatttgtcttgtaggtggtggctgtaaagcaactagacaagcatggattacatggaaacaaagagtttcaagctgaggttttgtctttaggccaacttgatcatccgaatcttgttaagcttattggttactgcgcggatggagatcaaaggcttttggtctatgattatatctctggaggttcacttcaagaccatcttcatggtactaaattgagagattctcattgaacacattttttttactttgaaagaaatgacaatttgaattttgcagaaccaaaagcagacagtgatccgatggattggacaactaggatgcagatagcgtatgctgcagcgcaagggcttgattacttgcacgataaagcgaatccacccgtgatatacagagatttgaaagcttcaaacattttgttagatgatgacttttctcctaagctttctgattttggtctacataagctaggacccgggacaggtgataagatgatggctttatcttcacgagtaatgggaacttatggttactctgcacctgagtatacacgaggcggaaatctcactttgaaatcagatgtctatagctttggtgttgtgttgcttgagcttatcacgggtcgaagagctcttgatactactaggcctaatgatgaacagaacttagtttcttgggtaataaataacaaaccctaatattattgcactttttcaaccaagttaaaacaagaagtttttatcttgctgaacaattcatgttatcgcaggcacaaccgatatttagagatccgaagaggtatcccgatatggcagatccagttttggagaataaattctcagagagaggattaaaccaagcagtggcaatagcttcaatgtgtgtgcaagaggaagcatcagctcgtcctcttataagcgatgtaatggttgcgcttagcttcctttcgatgcctacagaagatggtattcccacaacagttcctatcttatccttcaaagacaagagcatgtctatagccttaagccgacatgattcaaatcttgtatctcctcctcctgagctagctacggaagatgacaaatctagtacctcatcaggcgaagaatcatctttggagagcgaaaaggagagtgtgagtaagaatgagtataagaagaaacatgaagaggaagatagctcaatggaatctgatgatgagtctgattctaactctgaacatgaaaaggaccaaccaccaaagcctattgatgagaagaaccaggcgcaaagcttgaagataaagtatagatatagctgggaagatattgatgtcaatgatgagaggctaagcagtaaaagcagccaaaaatcaaacgacgaaagtacttcttcgcgttatgatagcgacagagatcaagacgagaaagggaaagaagaagaggaagaggaagaggcagaagaaaagcatactcatattgaacacattgatagctcaaaaactgatgatgatcaaagtgtttactttgataatgatgatgattcaggagatgacaatggaggctctttgcatcggataaaatcagatgttgcgatcgattctattaaagagtgacatttttcaagattttttatcaatccgttgaagctcacaagaagtatttgaaacttttttgggtttatttttgggaaaaattcttaattgggtattaaaataagatacatattgacggtttttcttaacaaattataaccatctctctttatacatgatgaagatgttttggattgatagattaataaagaaacaagttgtataatcagataatctgattgagaaaacttatctcagcttttgtaatcctttaaaaaaaaatgttacgtacttgtgtttttctttaaatagtagatgaaataataatagtttagcattttaaagaaaaacaagtatgagataatcaaaccctagataagaatcttaataatcaatcttagctgtgactcatatagcctatgagcaaatattacattattcataggaaatggaaagtattagattctcaatttggatatactaaagtagatacttaaactgatagataaaagacatatctacttcttatcctatttttgcaattaaggatagtctttgtgttttccatctttttgtcaacgacacttgtcaaaagtttcagtctgtggaatcaaaatttttaaatgagaccacttagttttacttttctttcatgattcgaccactatactttctaagaatatttattttaatcaaaattagataatgtttacaggattgacccaaattagattcgtaaagaatcgtcagctatgaggtcaaataaaagcagagaaaacgacacgtgtcaggatcttggagattcctgaagtgaggtccaccctaaaatccatttaaggttttctaagcaaatcaacaaaggaaggaaggatcctaccaaaagctcccaaaatctgagtacgcttttcaaagttgtctcctttatgaaccccacttgatcccttctcctcctataaaaacatcttcttctcagatcaatcccatcaaatctcgggtcttgctctgtttctctctttttgattcttttagaggtttactgaattcgatg

SEQ ID NO: 30773 - DNA, 3003 bp, Unknown
  misc_feature (1)..( 3003): 2750-1469P.txt file - cDNA_ID_3035305; gDNA_ID_2213626; Annot_ID_132059
atttatctcctaacgatgtaccatttcttagttttccttgttcatacgatcagtaaaatgaaagaaaacaaaaaatgatcattttttgtttgtttttaaagataggagacgtgcagaagaaacagaggaaatagagcaatcggaaggaacatcgttgaagatattcactttccgggaattagctacagccacaaagaatttccggcaagagtgtttgctaggagaaggtggatttggtagggtttacaaaggaaccctcaaatctactggccaggttcttccttaaatctccagaatttggaatttaggatacattcatgagaccatcaccaaagttaggtatttttcaatgagccatcatcagaatcagaagaatttgtcttgtaggtggtggctgtaaagcaactagacaagcatggattacatggaaacaaagagtttcaagctgaggttttgtctttaggccaacttgatcatccgaatcttgttaagcttattggttactgcgcggatggagatcaaaggcttttggtctatgattatatctctggaggttcacttcaagaccatcttcatggtactaaattgagagattctcattgaacacattttttttactttgaaagaaatgacaatttgaattttgcagaaccaaaagcagacagtgatccgatggattggacaactaggatgcagatagcgtatgctgcagcgcaagggcttgattacttgcacgataaagcgaatccacccgtgatatacagagatttgaaagcttcaaacattttgttagatgatgacttttctcctaagctttctgattttggtctacataagctaggacccgggacaggtgataagatgatggctttatcttcacgagtaatgggaacttatggttactctgcacctgagtatacacgaggcggaaatctcactttgaaatcagatgtctatagctttggtgttgtgttgcttgagcttatcacgggtcgaagagctcttgatactactaggcctaatgatgaacagaacttagtttcttgggtaataaataacaaaccctaatattattgcactttttcaaccaagttaaaacaagaagtttttatcttgctgaacaattcatgttatcgcaggcacaaccgatatttagagatccgaagaggtatcccgatatggcagatccagttttggagaataaattctcagagagaggattaaaccaagcagtggcaatagcttcaatgtgtgtgcaagaggaagcatcagctcgtcctcttataagcgatgtaatggttgcgcttagcttcctttcgatgcctacagaagatggtattcccacaacagttcctatcttatccttcaaagacaagagcatgtctatagccttaagccgacatgattcaaatcttgtatctcctcctcctgagctagctacggaagatgacaaatctagtacctcatcaggcgaagaatcatctttggagagcgaaaaggagagtgtgagtaagaatgagtataagaagaaacatgaagaggaagatagctcaatggaatctgatgatgagtctgattctaactctgaacatgaaaaggaccaaccaccaaagcctattgatgagaagaaccaggcgcaaagcttgaagataaagtatagatatagctgggaagatattgatgtcaatgatgagaggctaagcagtaaaagcagccaaaaatcaaacgacgaaagtacttcttcgcgttatgatagcgacagagatcaagacgagaaagggaaagaagaagaggaagaggaagaggcagaagaaaagcatactcatattgaacacattgatagctcaaaaactgatgatgatcaaagtgtttactttgataatgatgatgattcaggagatgacaatggaggctctttgcatcggataaaatcagatgttgcgatcgattctattaaagagtgacatttttcaagattttttatcaatccgttgaagctcacaagaagtatttgaaacttttttgggtttatttttgggaaaaattcttaattgggtattaaaataagatacatattgacggtttttcttaacaaattataaccatctctctttatacatgatgaagatgttttggattgatagattaataaagaaacaagttgtataatcagataatctgattgagaaaacttatctcagcttttgtaatcctttaaaaaaaaatgttacgtacttgtgtttttctttaaatagtagatgaaataataatagtttagcattttaaagaaaaacaagtatgagataatcaaaccctagataagaatcttaataatcaatcttagctgtgactcatatagcctatgagcaaatattacattattcataggaaatggaaagtattagattctcaatttggatatactaaagtagatacttaaactgatagataaaagacatatctacttcttatcctatttttgcaattaaggatagtctttgtgttttccatctttttgtcaacgacacttgtcaaaagtttcagtctgtggaatcaaaatttttaaatgagaccacttagttttacttttctttcatgattcgaccactatactttctaagaatatttattttaatcaaaattagataatgtttacaggattgacccaaattagattcgtaaagaatcgtcagctatgaggtcaaataaaagcagagaaaacgacacgtgtcaggatcttggagattcctgaagtgaggtccaccctaaaatccatttaaggttttctaagcaaatcaacaaaggaaggaaggatcctaccaaaagctcccaaaatctgagtacgcttttcaaagttgtctcctttatgaaccccacttgatcccttctcctcctataaaaacatcttcttctcagatcaatcccatcaaatctcgggtcttgctctgtttctctctttttgattcttttagaggtttactgaattcgatgtgtttgattatg

SEQ ID NO: 30774 - DNA, 3000 bp, Unknown; identical to SEQ ID NO: 10126
  misc_feature (1)..( 3000): 2750-1469P.txt file - cDNA_ID_3035309; gDNA_ID_2213626; Annot_ID_195871

SEQ ID NO: 30775 - DNA, 3003 bp, Unknown; identical to SEQ ID NO: 26593
  misc_feature (1)..( 3003): 2750-1469P.txt file - cDNA_ID_3035317; gDNA_ID_2213626; Annot_ID_195869

SEQ ID NO: 30776 - DNA, 3003 bp, Unknown; identical to SEQ ID NO: 26594
  misc_feature (1)..( 3003): 2750-1469P.txt file - cDNA_ID_3035325; gDNA_ID_2213626; Annot_ID_195867

SEQ ID NO: 30777 - DNA, 3000 bp, Unknown
  misc_feature (1)..( 3000): 2750-1469P.txt file - cDNA_ID_3035334; gDNA_ID_2213626; Annot_ID_195862
gagccaaaaacaaagtcaacgacaaaagtggtcatgaatatcgtctcacgattgactgacaaatacttcacgatttgattagatatgaagttttataatgtgaagttggtaaccactaactaataaccctacttcacaggagaaagaaaaaacattttagatatgaaaaaacaacattgacccagaaagatatatatttgcttagagattttgtatgaaagaattactagtgctgataaactatttagttcaagcttaaagggaaatcgattagataatttttcgaattatttgaagaaaacatattgtgatctggacttataatttttcatgtgatataccatttacaccgagtcatgggcagttgccacaactttatctcatgttccaactcgtaccagactgggtacatatgcacatggggttcaataaatttattagtgggatactctttgacataaaacactattaggaaaaaatggaattaaaacctattcataaattcatataattacgcacgtaaataatgtttttcacagtaatattagaatttgaccttagcaagttgatggtttttaaaccgtggaagcaaatagaacatgacttccacatacaaacatcatcaacactagagataaatcatagatatagaaaatcatatttatgactgaaatattaacaattacaacttaatgggctttatggctacatttttgtaggctcaaatcaattgataatgaagcccatttcataaatatgtaaccataataagttcggccatgacacattgggcgggcttacacgtataacaaacacaacagttaagagcaaaagacacaaaaaaagtgtagagacaaatcgccaacttgtagaaacagattaaaacagagtagtaagtgtttgataatccaaaactagatgaatattatcaaatatatctaaaaagaagttttaaggacattttggacggccttctttagtcttccagttgttgtaacatggacaagtttgtttgttgccgaaagtgccaggaggaacacaaagacattttttgcaacacttgaggcaaaagaacatgcatggcttcttgtgtgatgttgctgaacaacggaagctacactttgagttgcactctacaattgaagtttccatcaaaaaagcatatcacaacaaacaaacaaaaaacaaatcattgagatctttatgttcatgcttataattcacagcatacagtatactagaaaactgacatttcacaaaataaacaccattattgttactttaaagtttatttatcaacattatcaataattagtgattaataaattaatatgatcatatgaaacaacaaaagttttgagtccgtacgttggggtttgagtttgccaccaccacgagcagcctgtcatatatatataaaacttcaatatcagaaaactaatagccattaaatttttaaggaatgtatagcctttggtcatttttacctccacgagcagcctgtaatatataaaacttcaatatcagactttaataaactgaatctgttttgagtggtttacctgaacgaggttggagactgacaataaaaagagaagagtcaagaagaaaagagcatttcttctgatacaattcgccatttttttggttaaaaaatcttgattgccaatgaatgattcttaagaaacaataaaacggattaaagatatttatagagaaaatgattagtgtggatttccttcaatggtattcaagaaatttggtattgccaatgttcatgccgtgattctggggaagtaggtcattttaatttctaattacgtaccacacttgtcgtttttgtctcttagacaatgtcaaagactcaacagtgtaaattactaatcactaattacccacgtatagagaaccaaaagactaaaatcttgccttggaaaaaaaaaaaaaaaacatttctctcagtgaaaattggaaaattatattgtgtagttgactagtgtctaaacgctctgtttggaaaatgaaaatgtcactaatgataatatctgtatatagaaaggggaaaataagcgagtttaggaaattaattaagctaattgtgaagtgcgactaaaaagaaaaaaaagtgtaatagaaagcgaaaaatgcggcgaagttgagcatgtgatctttgtgggccatttcattgattttttgttttgtcatattatttgtgtttttagttttaatgtaaaaaaaatctgattaattttaaaaggactggacaattattaatggacatcaccataaaatctgtgaccataaatttttataaaaggcccattagcccaacggttttccaattacagaatttgggctgaaacggccgaaaataatcttaggatgacgaaatggccattttgaaattctcttcttcgtttggtctattattttattttttaacgttaacggcctaacaagttttcctaacttaaagataagtgggaacagataaaacaattaaaattaacttccaatgaaattaccaaattaacaattaagttaataatgtaattctaaattaggcttaagaagaaaacttaaatatttatgtttatataattatctgtcagaagtgcagaattcttatttttccagagtagagaggagtgctttcatggcggtaaaaggtaaaatactaatcactgtaaaaatctcttaactcttgcgttgtgtttaatactaatagactaaaattagtaattaatttataaataattgcgtgtgtatatgcacgtatgtccgtacgtatctacgtgtaggtcctagatatagagaatccttgaggtggctatttaatagcagctctcattatctgggctctgtgttttgaggaaaagcgatttatcgagaaacgaacttagggccacgccagagagagagagagagagagagagggaaatcgaatctggattttagaggaactagggtttgtatttgtactgcgaaaatcaattaatg

SEQ ID NO: 30778 - DNA, 3003 bp, Unknown
  misc_feature (1)..( 3003): 2750-1469P.txt file - cDNA_ID_3035342; gDNA_ID_2213626; Annot_ID_195856
tgacgtaaagaaaaaccatgaatcttcgtcaatgtatattgtggaccctgcaaccaagtgcactcgggtttttggatccggagcttttccaggtttcactggtagaattcgggttgacccgattactggtggagcctttaattcacacggaatcaaccacttgaaattcttgattccttctatttgggaccctaagaccaaatcttgctggactcctatgtaaaccgttattattacgacatgttacacagtttttacccttcatgaacttttaaggttgttttgttattggaaatattcaatatacttggaaatacttcatgaacttctagttccaagtcttcatgaactagactttgaacgatcctcgtgtaaattaaattctgtgagaaagaaaatccatgatttagcagataatactacagtatttgacaacaacaacaacaaaatgttgataagtaagaaaataaagctcgaagatttgtaactattcatgattttagaaaatcggaataatgaatagtgtacttatttggacactgaataagaagttacacaagtcccgattgaaatttaatttactaatgatcgttacaaaattatttgtctctttgtcatcaatcctgttagtgaatattagaattattattcattgtaaacaaataggatcatccagattgagaagtaaataattttatgtatgttacaaatgaaataattaattgatcgtaaaacctctctgaccttatatatatcgagtctcactattcaactttttcattgcacttgtcgtacaaaggagtaaacattgatatgggaaaggtatgtgcattcctgtctttggtaattccagtaatttgttaagtaaattatgtgaacttatattttgtgttttggatttggttctaaagaacaagcaaaatggagaatcagacaacaagtctgaaaagaagaaccagaaaaatggagattcatcagtcgataagtctgataagaaaaatcaatgtaaagaaattgttctgaaggtttacatgcactgtgaaggatgtgcatcacaagtttctcattgcttgaggggctatgatggtaatactctattaaaagaaacattattagattactttccctctttaatggaatcatatatatatggtctcgatcataagaatcaatgtcaaatatttaatcatttatcattgagtgaaattgtactataatttaacttaagcattatctagtctggtttcagttttatttttctttcctgtaatctagagaagttgtctattaattcccacaatgacataacgaatagtaatctctagttcttaaagcatcaattaaaaaataggattaccgtttttttcttcttactcatgactcataagtagctattatcttatttgtcttataggggttgagcatattaagacagagataggagacaataaagttgttgtgtctggaaaatttgatgatccgttgaagatattacgaagagtgcaaaagaaatttagtagaaatgctgagatgatttccccaaaacataaccctaaacaagatcagaaggagccacagcaaaagaaagaagtaagttatttccaattatttcgtgttagaacttagatatatactctcatttatatcataccttgtctaattaatctgagaataacaactaacatatctaatcatttctaaatattttttgcatgattttagagtgctcccgagatcaaaactgcaattttaagaatgaacatgcactgtgaaggatgtgttcatgaaatcaaaagaggcattgaaaaaataaaaggtaatctttgtatatacatatagaaataatacgatatcgaaagttaaaaaaaacaacttagaatatgtttgtttgttttgacaaattaaaaggcattcaatcggtggaaccagaccggtcaaagtcaacggtagtggtacgaggagtcatggatcctccaaaacttgtggagaaaatcaagaaaaaacttgggaaacatgcagagcttctaagtcaaattacagagaaaggcaaagacaataataagaagaacaataataagaaggaagaaagtgatggaaacaaaatctttagttaccctcctcagtattcatctcaacatgcttatccctctcagatttttagcgacgaaaatgtacattcttgttcaatcatgtgattttttgacccgtaaaattagagtctttttaagttatcttttatggttttgatttccttgctacacatttctatatctcaatagattttaatttaatttaatttttgagtgacactttatgaaagtaagatttggtgtcatgtgtatactcgattactagattatgtttgtagttgtgggccttttgtacaattatttgtaaaaaaaaattaacagggcattagagtataaaaaaaaagaatgtgggtatatattatattttaataacttagggtctattttgtaatataatataagttgagagtacttgttgcatttaacccaaaaagaaaaagacaagggaggacgaagatgaattgtctcaatttttagggttcatcaaaatttgaacaaaagggacctgttttgctcaatttttgatagcagaagacgaatctggatctggggtcacttcaagtaagtaaagagttaaccttttgcttttttttgtaccataaattgtgttcgaatggtacgattgagaaattgcttacgaatcaatgaaataacagttaagattttgatgatgaatgctcatgaaaatctatttaagtttgattgagaaattgaagaagagaataagaaatcgagagatttattgcgtaaatggtaatactttatgtttcagttctgctatttagatccaagcttgaatatgtatcccttagctttatttctgtaggttaagattgtttggttgttgaatgttctttgtttgtgcattgcctttgcaggattgaattaagaggtttttaagtaagttgagatg

SEQ ID NO: 30779 - DNA, 3003 bp, Unknown; identical to SEQ ID NO: 30778
  misc_feature (1)..( 3003): 2750-1469P.txt file - cDNA_ID_3035342; gDNA_ID_2213626; Annot_ID_132043

SEQ ID NO: 30780 - DNA, 3003 bp, Unknown; identical to SEQ ID NO: 26600
  misc_feature (1)..( 3003): 2750-1469P.txt file - cDNA_ID_3035344; gDNA_ID_2213626; Annot_ID_195854

SEQ ID NO: 30781 - DNA, 3003 bp, Unknown
  misc_feature (1)..( 3003): 2750-1469P.txt file - cDNA_ID_3035344; gDNA_ID_2213626; Annot_ID_132041
agagaagaagaaagaagctctctctctctctgtctacacttatattaaactctggagatagcttttacctctgctcttttatttatacactctgatttttttaattccagaaagcggtggagtttcgcagagtgatataacgtgtcgtaatctctaccgttgatctgattacctctgcaacgtccgattattaaattaaaaaattagttttgttgttaagataagaaataccacgtgggctggactaacgtgcttggcctttttaaaaaaacattaattaacgtacgtacctggtctttttctgattaacgtatctggtcctaagctctttttttcatacgtggcactggactcgcgttacttttctcaattttttccatttgcgtttcacgtttttttttggataattttctgctactcaaagttttgttgttacgaaaacgttgagtctctctctctctgcttgccgccgagacggccaataattttttttttaagacaatatttataaatctgaaataaacatcgatccagatttgtggattatagaaatcttatcaaattttataagattatttctttctatgatatctaacggctcatcatgtaagactaatctaaatttgtaacgaagaaaagtggaaaacacataacaagtgtattggcccgcctaatcgagttaatagggcaaggaaattctcctttactgcctaactcttctccagtttgatttttattttttgttgtggaggggaatattttaaggttctcttaccatagtacagacttataacgaataataataaaaagcagattatgaatcgaaagtacgaattttttcaaatccatttttttcagatagaaaaaacagtacgaatttttattgttaaaaatggttatattattgaaaatggaacaatttttcatttaagagaatcgaatattccattcataaatagtacattagtactctccttctaaaagaggcacgtgattggttgtcgcaaagcacacgagccaagatgcttcacttggaacgagaaaaagccccaagagacagaggagagggcaaagcaagcaagcacctttttctttcccatgctcgaaactcggttcttgattgattccttcgccgaagattaaccaatcaaatccaaacaaacccactcagatccagattcgttaaatctatccggatccatttacttcaacgggtcggatccagtgatctggcacttcacaatgggaagtggcttttctggttcttcggataccaaacaatgtcgcgatttcctcgaagattcatagatgattcatcaatggaagatgcaggaatctctctttgcccaagtattcactatagacctataaaccctaatgatctagatcgtttggagcaaatccatcgcgatatcttccccatcaagtatgcatccatctacttggattttcctatgttggtgtcttgtgaaaagatttctaaagtattgatttttgttttgtcaggtatgagtctgagtttttccagagtgttgtgaacggagttgatatcgtctcatgggctgctgttgatcggagccggcctgatgatcactctgatgaacttattggttttgttactgccaaatttgtgcttgccaaagatagcgaggttagttttcattctatgaattcgtctttttgtaattcgaacaataatgatctttcaggtcctgtaatcaccttgaatgttgaactagttcataatgcttatggtttttggttcgtctgtgatcatgtacactaaataaaagttatttcacttgtcaaaaatctttagaacagcggcttgtaataatgtctgaattatgattgaataatctgttttgggagctctggtaatgcaattgagtctagtgttgtttttatcttcttattatctatcttcatcagctggcagatggtttctgtgtcttgcacagatagatgatcttatacattacgattcctcgaaaggagaggagactttgatatacatcttgacactcggagttgtagaaacatacagaaaccgtggaatcggtacatgactcttataatactaataagtatctgaaacatgttctatatattgcttggttttataatttctgatgtttctgcaactttttttaactctcagcaatgtcacttattagtgaggtaattaaatatgcttccggtttatctgtgtgtcgcggagtttaccttcatgtgattgcacacaacaatgctgcgatctgtttgtacaaaagattgatgttcagatgcgtgcggagattacatggattttatctaatcaatcgacatcattttgatgcgttcttgtttgtctacttcatcaacggttctcgaactccttgctcacccttgtaaggagatttactcacagacaaaacaagtctttgattctcttgtactctataatggtttacaacaatttactgtaatttgcagagaggtggcgatgtttgttgtgaattatatgaagagtggtatcaagtcagtggcatctaagctggctaacaaggatgagaaaggtttgaaatggctgttttgcaaagacacggattgtgtctaaccctcgcaaaccaaaccgaagctagggtcatcatcagcgtacgaattcatttaacttaaaactatatttcccattcatttgatttctcattgtgaactctgtaatgaaaaggtaaatagtcaccgttaatgtactgttttttgggttttatacgctgatcattacgtgtttataaggtgtaaggaagttcttatgagtttttcaccacccttcttaaaatagttagcttggttgaaaatagctcttttgcttcattggcaattatccaaaaacaaaatcaccagcttaggatgtcaaaaaataggttaaacgataattttatttacttccctcaaaaaagcctgagaaaatccccatcaaaggccaaaagaacagaaaaaagtttttttcacgcggtggcaatg

SEQ ID NO: 30782 - DNA, 3000 bp, Unknown; identical to SEQ ID NO: 10180
  misc_feature (1)..( 3000): 2750-1469P.txt file - cDNA_ID_3035453; gDNA_ID_2213634; Annot_ID_180975

SEQ ID NO: 30783 - DNA, 3003 bp, Unknown
  misc_feature (1)..( 3003): 2750-1469P.txt file - cDNA_ID_3035469; gDNA_ID_2213634; Annot_ID_180963
ttctacaacaagcccggcaaaaacaaataaaaaagctacaagtttaagggattcaacgagaacttatagaaactgaaataacagtttaatcaattagtattggacggctttggtacaacgaaaataaaactactaaaataaatatagttatcaattagttgcaaagtgtagtatataaccatatggttagttaaagagagatattttagtgtggtatcaaatatttcagttcaaattaaaaggtgaaaatggaaagccaaaaaaagctaataactgagccatatagagaaatagaattgttatttttgttagtcaagtgtgggttaacccgaattcaagttccacttgaagaggaaacttcgtatcaaaagacaaaaaaccatgtttggtccggaaaaagttttcttataaaaaagagagaattttccggtaaacaaaaatactgtagaaagtacacaatatataaaagaaatcatctagtaggaggagtaatgttttgatataccaaaaacaaaaaggaagggtaataatgtttgcaaactagtcattatataaaattgaaagtggttgcctatgaatacaaacatgttcatgcaagtgtacttccatgtgcttctcctctcattctcaatccacccaattctgcttcacatgtgcatatgtacatatatgcatattgtggtccgtacgtaacgtttgtttttaaatattattattgttatacgatttacaaatacttatttttctagcactcttaaataaataaaaacaattgcgtaaaatatgagataattgaaaaaataaaatatatatataagctaaagatataaaagtgtcaaaatttaaaaaggttaggtcaccattctctgtagattttagggcgagaaatcaagtcttagggttaagtttaagagttagggtttatgatttattttttgaaatcttaatttgagtttaatttccagggtttatgaagaaatatatacagatactttacagtttataatttggagtttggattaggactaattttaacaccttttaactctcacaaaatctaaactattttcttaattttgatattaattttatattattttcataaaatttcaactattaatcctaggaatatcttatgtttaaaaataaaagtttaacatgatctccgtgtggatcttttaatcaatattcaagtaagtaagttatttttacattcacatagaagtcagaccattataaactaaatccattaaaaaaactacatatggtaaaagactaaaagatggtcttatttccaagtattatggaaaaatgaaaaatgtatttagcttagtaaatatcttgagaccagcaaaatgattgagcattgggaatcggaattctgacaaaaccaatcaaatgtgacagattattagagtataactagtaattaatgtaggcttaaggcttcatgacaccaaactgtaagtaataaatttgggtattagtacatgagtaattcattacaaaaccaatttcagtatcttgtctttagattttttgttgaagccaaatacgttctcgcaaatcttccatctaaaatgatactaacaaatgatcagaagcataacaaaccaacaaaataaaataaatttccagcccataaaattggaaaaaaaaaaaaatatatacggaatcttccgtaacgattcgtacatgttttcactgtcatataatgtcacaaatcacaagactgcatttgttctgatctaatttatattcaattactaccaaaaccataattatttatatggatcacacgtttattttttatacgtctgacattaacaaatacacatggtaaaaactgttggaaaacaacaagtttagttaatagtacagttttgctatatagatcgtaccatttgttttcgtgataataataacatatatgaatctatataattcttaaccgataattaattaacacggaacttacgcgttcataggcacatatgacatagaagaaaagcatcgaattttaaaatagttcaacttgtgactaatcattatgcatgttactgtgttttggtgaattggaaaaagcttgatctgaaagaataataataaaaggcagtttgtataatgataaaaatataacagtatataataaggtgggagcataagtaacgtgaaggcagtttgatctgtcgggaattttttttgtatactttatgctcctaattatggtaattagataagttaaagtatagttttaacttaactcgtgaactcatcattttttttaacaagaatcccgtttctgaactcaaacgcaatcacaaaaacaaatacgtattgggattcataaatgccttaataaacgaaattttgtttttttttcttcttttcttttgaattatagtattgggctcacaacataattcaaaagtctttaatttacttattagatccaacaaacagaagtgatccgacccaatactttgggccgtagttgggcctaaataatattctccgtcggattatttgcgatcacttccttcctcattctcgccgtcgatcagcttctaacggcgcctcatcggtcgtcaagccttaccttctcatcccagctttggtagattctcttctttggtttagctgtttcagtctttgattttacttagcttgatcctccgaatatgagaataatgtttctattatgtttatcttcattcttcaatgtgaactcatgaatctggaatttgggcaaacaaagagtttcttccgaatgtgaacttgattgcttacaaattttgaaacttttttgtttatttgtttgctttgttcattgttgaaattgaacaaagtctttgatctgctcagtgcccacctaatatgatttatggtgtcagatggcatggcttgtggtttctgtttctctgattgttatatggttggcttctttctgcaaaatattcttccgagcaacatctatctccggagctgctattcttgatgatg

SEQ ID NO: 30784 - DNA, 3000 bp, Unknown; identical to SEQ ID NO: 10209
  misc_feature (1)..( 3000): 2750-1469P.txt file - cDNA_ID_3035488; gDNA_ID_2213635; Annot_ID_181013

SEQ ID NO: 30785 - DNA, 3000 bp, Unknown; identical to SEQ ID NO: 10200
  misc_feature (1)..( 3000): 2750-1469P.txt file - cDNA_ID_3035492; gDNA_ID_2213635; Annot_ID_181011

SEQ ID NO: 30786 - DNA, 3000 bp, Unknown; identical to SEQ ID NO: 10191
  misc_feature (1)..( 3000): 2750-1469P.txt file - cDNA_ID_3035496; gDNA_ID_2213635; Annot_ID_181002

SEQ ID NO: 30787 - DNA, 3000 bp, Unknown; identical to SEQ ID NO: 10184
  misc_feature (1)..( 3000): 2750-1469P.txt file - cDNA_ID_3035499; gDNA_ID_2213635; Annot_ID_181001

SEQ ID NO: 30788 - DNA, 3000 bp, Unknown; identical to SEQ ID NO: 10203
  misc_feature (1)..( 3000): 2750-1469P.txt file - cDNA_ID_3035561; gDNA_ID_2213635; Annot_ID_181019

SEQ ID NO: 30789 - DNA, 3003 bp, Unknown; identical to SEQ ID NO: 26621
  misc_feature (1)..( 3003): 2750-1469P.txt file - cDNA_ID_3035564; gDNA_ID_2213635; Annot_ID_181018

SEQ ID NO: 30790 - DNA, 3003 bp, Unknown; identical to SEQ ID NO: 26633
  misc_feature (1)..( 3003): 2750-1469P.txt file - cDNA_ID_3035578; gDNA_ID_2213636; Annot_ID_181069

SEQ ID NO: 30791 - DNA, 3003 bp, Unknown; identical to SEQ ID NO: 24838
  misc_feature (1)..( 3003): 2750-1469P.txt file - cDNA_ID_3035586; gDNA_ID_2213636; Annot_ID_181064

SEQ ID NO: 30792 - DNA, 3000 bp, Unknown
  misc_feature (1)..( 3000): 2750-1469P.txt file - cDNA_ID_3035599; gDNA_ID_2213636; Annot_ID_181060
gaataagagattatattattacttttgtttaatactgctaggaagaaatcaaatattgggtcaacaaaagaagaagctttttcagtcttatggtcctttgatttcgacccttctttttgaattctaaattggcccacttcgtttttcgtttttagtttgtaacgaaacttgaaaaaaaaaaatggattaagatttgaggaattataacttttagtagtcactagctagttgaataattgaatcgataaacataagactttaatcaactgatcacctatgcaactctcagtgtcaactcttttacattacaaaggaaacaataaaaatcgtttagcgagaccaggtagagatcgagtttgatctcgacaaagaagagcaagagtttaagaactcaatgcagtcctcaatggcttctgcacggtgagactctgatccgtttagagactttgacttcatcaaataaagagacgaagaaacgttactggaagatgacggtgtcgttttggtgttcatcctgccgaatgatatataacgaaacgttttgccaactctgtctccaatactgcggagtaatctcttcgtcgttgccggcgagtcactgaagctgaaactgaatattccaacaacgaccctcctgcgaccatgccgtgatgagctgtgtgttgggaagatcagttcgtcgtttgcttctgggtccggactaaagcgtactcttttggatgctcttcgagacatattcttgtctgaaactttatcgagagagagacagagagaaaaagagaaacaaaatggagacgtgagggattttgaagatttatttatgggggcaagtcatgtataatgtttggggaggaattttattaaggaaggaaatttgaacaagttacttgtttatacatgtacaactacacgtaagttatttaaccaattgatatgaaatggtttccaatatctagatttgtttaattgattcttgatttttttccattatagcttgtagaatttctacgaagatgatgcgatttgtaaaaccaaaattatagtcaaaagaaaagacaaggaaaaaggtttgaagtaaaagagtaaattgagtacttggaataaatctaggtttgaagtcgaagattcaacaataacaatataagtaattaggtagataaattctcatatgtatgatgaaataaatcaataagacaaaaaaaaaaaaaaggttgattctcttcttgtcactgttgtgagagctttgtttttttaggtgaaatattaggggtcctacccccaatgttccccattcattataatactttatgtgtaaacataggcatatatatagagaagttttgagatatatatcaggcccggctcttgggaggtgctgagtgtgctagtgcaccgggtttcacttctttattcagttttttctttatattttagggtccaaattttcaaataattgcaaaataggatttagtttttaaatatttagagttttaggtaaagaaatttggagcatagcacaaggtccaataatttattgggccggctctgatatatactaagacactatatagaagtttgattatgtcaaacaagaaaatttgaatgagaagtttgaatatagagagacttatcaatatcactttagttcaacattagatgtaataacagttaaacaattttctaaccaatccaaataactcaggttaagttcatctcaattatttgtttggaagtttcatttgaagtacattaatctcaattgagacgaatgtcatagtccatatattttgtgtacctcgtcatctttgggccgaaggaacaaagaaaacttagcccgattaggatccattcatatatgggcccatataaggcatttagtgtaatagatttttgcatcatcatgtcttgagattttctattagaaaagtcgaaacaatcaaataaaccaagagaaatattgaaagcaatcatgttggcattgagtaaattatgtaagatttgaattctccgaggaacacactacgtttgtatgttgcgttctaactttagaaagattaaaaaccataaaatattggtaatcgagaaaatgaagttagatctttcacatgcaatgatatgcatatgggacagccaagcagtttatatgttgtgttgtgttgtataatataagacaagatgctttataattatgtgaagcgaatattcattggaatagatttccgattccacatttctttctctttttttggttgtatttataagcaatataaaaaaaattattatataaatatatataaagaatatatataaggttgtcttggcgtaattatttgagttttatgttatatcgatctacaagtaattagcgcggctaatgatatgatacgtaacgaaaagtattttgaccaaataattacaaagtcaatttttttttgtcaggagtacgttattgtgattgtgttttttttttttttgtagtaattgttttctcaagtgtttaaacccctaatgtatgcataaaccattataacaacaacgatttttctataacttctgtaatattaataaaagataaattttagcatatgctaaaacgagtattaggatgcttatctgtctctgcctcacaaagaggatatacctctctttcgtcttcttcagattctctctgacggttgttaaaaatccgattataacgacgacgacacccaaatcctcacaaatatataattattaatttaagcttctctgtcaaaataaaaaggagtcatgacgactctttcttctataaatctctctatacctcctcatttgcttcctagcacgactaacacttgttcttcttcctctgcaacctcttgttctcctcccaggtcttcttcttttgttcttcattcccctctttcgtttggtcaccggagattacccattagcaagaaaagcaagctccgcttctgtggagtgattacaaaggaagctgtttctgggtccaacgatatg

SEQ ID NO: 30793 - DNA, 3003 bp, Unknown
  misc_feature (1)..( 3003): 2750-1469P.txt file - cDNA_ID_3035648; gDNA_ID_2214467; Annot_ID_133049
ggtttcggtggatgaacaatgaacagaacgagagagatcctgataacatcaacaacaagaagaagaaaaaggaatctccattgttgatttactccgtctcgaaagcaaagaaacgaatcgtgtctaagttcagaaggagacccttatcgccgaatacgtctccttcttctgggttttggaaaagagtctgcttttgtggaattgaacctgaccctgaagatgacaactttaagcttagggttctgctacagaccaatgatttcttctccaaggattctaatccacatctctgtttgtaagttcagatatatatatatatatatatatatatagtgtagttttcatttagtataccaccaatatctgtatagatcttcttttaaacttcatcaatatcaaaagtgtgttcatcaatgttaccaaagatttttgcagaacagagtgattattgttaatgaatcttgtatatctgcctcttatgctcatcattaatatctgtgggtctttcttgtctctcttcatagttccgtatgatagtttctatatgtctctgacaatgtcactctttgtccataatatccaaactagtttgtaagatcagaaatttgagcccaagtttgaatctcagagtatcacactcaacgaatattaattgctaatgtctgatatctgtttccatgtgttgaatatctctactagtaaagcccaagtttattttggcaagtgttgtttacctttgacacatctagggtaaccattttcaatggttttatgaatagttgaattttactgagacactgatgtagttgtggttttgaaattgctatatggatttaatcatctctatgaagccgcggaacccttgtgctagttatgcttactaagtcttgattatgcaaatggttatctccaatcatcgtttgtttattgaatctgattctaagtgattatgaagaaggagcttggatagttaatggttgatgtttcagagttgtagcatgcctctgtgtccttttttgagacacgatttccctctaaactcagctgaaagttcagccattaaatctactggattgaaagcactaaagaggaccttaatattcttgcagtatggtatgtttcaagaactgtcgattgttcaaagatatatatatatatagactcttaaacatgtgaaaactggtctcatcgtaatcaatgggccaaatatagtcaaaagagtatctacaataataaagaaaagaatgaaaaaaagttacaagcttttgcttagaagtttacatttttatgttcatcattgtatatcattattagattagtgctctggtctgaaacttatttatttctttggtgggaattttcccttaatcttctgaatctctggtgctgcagccccgaacgccttggcaagcaggtcatcaggaatcggtgggttagaaccaaacagagatggtccaacaacttgagtcccgggaagctggctatcgaaagcagcgaggacggaagcaggagctttgttagggttctgctggaaatggaggagagctttggggaaaacgaaaacgtctcctttgttgacgtgtttggagatgagtttcccggtagtggttaagaaaccgacgaagagacggccttcaaggacgaagatggcttcagaggctcttgggtgaagatgtggtgggttaagtccgccaggtgcgtagtcgatccgagagatggagactcccagagtgttgaggccaggcactttctcaacgttggctcctgtaacagctgagcccattgaagagttggctgtggctgcagcagtggctaagcctatgaagtagaagtcttctggtgttacttttgctgggtctttgcaagggtatccgttgactttcaaacctaatcagaacatgataaaaagtcaacaacaaaatattggaattggtcttggttgtttcaaaacaccaaagctgcgtttgcagttaactatatctggtaaatgtaaatgcaagcagaacataaatggtatagagagagatgtgataccgttggagagatcagcaacacaaaagtcttgaagcatatttgtatcggcgagggccatgtgggcggccacgagcatgaaggtgacgaatatagggatcatggaagttgccattgttgattgttgttgtttgtaagatgttattgatgagtttgagaaaatactttaacattgtttctcaatttatatatctacgtaaagaagatttaaccaatggaaaaccaatggagaagagataattatggagaggggccatagatgtgttaattttaaaattttgccataattaggtttaggtgttctgatcgttggttaaaatttggtgtttaaaaagagttttgttttgttggacacattaattagcctatagtttataggatgacactcaccataacaaaaacaccttcaaactctaataatcaccaaactcgaaatgattgatgattttggttgtttactggtgaaagaactcaagaggtttgtttggttcagctaaatccaaaccgggatagaaataaaaccaaaaccttaaaccggcttggaatttctctatccatgcatttgcatgatcataacatatacaatattaaaataaataaataaacatttggggtcaagaacgtacaaaattagatagaatatgggactcaataatatattcataaattttcaagattaaacaaattccatccacaataatgtcccaagtaagtccataagatggtggctgaataccaactaagcaaattcccaaaacctcttattcaattatacaaaaacatgcatctaagcacgtagatggtgtaatctcttgattatttaattaacaatactgaccaaacacaacctcaactgcttcaacattattccaatctgtcatctctgtttgtcttcacatgtttttaataacttcttctcttccttcttcattcctttaatccatttttctcgatcttggctaatccatcatg

SEQ ID NO: 30794 - DNA, 3000 bp, Unknown
  misc_feature (1)..( 3000): 2750-1469P.txt file - cDNA_ID_3035648; gDNA_ID_2213639; Annot_ID_132234
ttcggtggatgaacaatgaacagaacgagagagatcctgataacatcaacaacaagaagaagaaaaaggaatctccattgttgatttactccgtctcgaaagcaaagaaacgaatcgtgtctaagttcagaaggagacccttatcgccgaatacgtctccttcttctgggttttggaaaagagtctgcttttgtggaattgaacctgaccctgaagatgacaactttaagcttagggttctgctacagaccaatgatttcttctccaaggattctaatccacatctctgtttgtaagttcagatatatatatatatatatatatatatagtgtagttttcatttagtataccaccaatatctgtatagatcttcttttaaacttcatcaatatcaaaagtgtgttcatcaatgttaccaaagatttttgcagaacagagtgattattgttaatgaatcttgtatatctgcctcttatgctcatcattaatatctgtgggtctttcttgtctctcttcatagttccgtatgatagtttctatatgtctctgacaatgtcactctttgtccataatatccaaactagtttgtaagatcagaaatttgagcccaagtttgaatctcagagtatcacactcaacgaatattaattgctaatgtctgatatctgtttccatgtgttgaatatctctactagtaaagcccaagtttattttggcaagtgttgtttacctttgacacatctagggtaaccattttcaatggttttatgaatagttgaattttactgagacactgatgtagttgtggttttgaaattgctatatggatttaatcatctctatgaagccgcggaacccttgtgctagttatgcttactaagtcttgattatgcaaatggttatctccaatcatcgtttgtttattgaatctgattctaagtgattatgaagaaggagcttggatagttaatggttgatgtttcagagttgtagcatgcctctgtgtccttttttgagacacgatttccctctaaactcagctgaaagttcagccattaaatctactggattgaaagcactaaagaggaccttaatattcttgcagtatggtatgtttcaagaactgtcgattgttcaaagatatatatatatatagactcttaaacatgtgaaaactggtctcatcgtaatcaatgggccaaatatagtcaaaagagtatctacaataataaagaaaagaatgaaaaaaagttacaagcttttgcttagaagtttacatttttatgttcatcattgtatatcattattagattagtgctctggtctgaaacttatttatttctttggtgggaattttcccttaatcttctgaatctctggtgctgcagccccgaacgccttggcaagcaggtcatcaggaatcggtgggttagaaccaaacagagatggtccaacaacttgagtcccgggaagctggctatcgaaagcagcgaggacggaagcaggagctttgttagggttctgctggaaatggaggagagctttggggaaaacgaaaacgtctcctttgttgacgtgtttggagatgagtttcccggtagtggttaagaaaccgacgaagagacggccttcaaggacgaagatggcttcagaggctcttgggtgaagatgtggtgggttaagtccgccaggtgcgtagtcgatccgagagatggagactcccagagtgttgaggccaggcactttctcaacgttggctcctgtaacagctgagcccattgaagagttggctgtggctgcagcagtggctaagcctatgaagtagaagtcttctggtgttacttttgctgggtctttgcaagggtatccgttgactttcaaacctaatcagaacatgataaaaagtcaacaacaaaatattggaattggtcttggttgtttcaaaacaccaaagctgcgtttgcagttaactatatctggtaaatgtaaatgcaagcagaacataaatggtatagagagagatgtgataccgttggagagatcagcaacacaaaagtcttgaagcatatttgtatcggcgagggccatgtgggcggccacgagcatgaaggtgacgaatatagggatcatggaagttgccattgttgattgttgttgtttgtaagatgttattgatgagtttgagaaaatactttaacattgtttctcaatttatatatctacgtaaagaagatttaaccaatggaaaaccaatggagaagagataattatggagaggggccatagatgtgttaattttaaaattttgccataattaggtttaggtgttctgatcgttggttaaaatttggtgtttaaaaagagttttgttttgttggacacattaattagcctatagtttataggatgacactcaccataacaaaaacaccttcaaactctaataatcaccaaactcgaaatgattgatgattttggttgtttactggtgaaagaactcaagaggtttgtttggttcagctaaatccaaaccgggatagaaataaaaccaaaaccttaaaccggcttggaatttctctatccatgcatttgcatgatcataacatatacaatattaaaataaataaataaacatttggggtcaagaacgtacaaaattagatagaatatgggactcaataatatattcataaattttcaagattaaacaaattccatccacaataatgtcccaagtaagtccataagatggtggctgaataccaactaagcaaattcccaaaacctcttattcaattatacaaaaacatgcatctaagcacgtagatggtgtaatctcttgattatttaattaacaatactgaccaaacacaacctcaactgcttcaacattattccaatctgtcatctctgtttgtcttcacatgtttttaataacttcttctcttccttcttcattcctttaatccatttttctcgatcttggctaatccatcatg

SEQ ID NO: 30795 - DNA, 3003 bp, Unknown; identical to SEQ ID NO: 30793
  misc_feature (1)..( 3003): 2750-1469P.txt file - cDNA_ID_3035648; gDNA_ID_2214467; Annot_ID_182887

SEQ ID NO: 30796 - DNA, 3000 bp, Unknown; identical to SEQ ID NO: 30794
  misc_feature (1)..( 3000): 2750-1469P.txt file - cDNA_ID_3035648; gDNA_ID_2213639; Annot_ID_181164

SEQ ID NO: 30797 - DNA, 3000 bp, Unknown; identical to SEQ ID NO: 26653
  misc_feature (1)..( 3000): 2750-1469P.txt file - cDNA_ID_3035680; gDNA_ID_2213639; Annot_ID_181163

SEQ ID NO: 30798 - DNA, 3003 bp, Unknown; identical to SEQ ID NO: 26659
  misc_feature (1)..( 3003): 2750-1469P.txt file - cDNA_ID_3035707; gDNA_ID_2213639; Annot_ID_181146

SEQ ID NO: 30799 - DNA, 3000 bp, Unknown; identical to SEQ ID NO: 10281
  misc_feature (1)..( 3000): 2750-1469P.txt file - cDNA_ID_3035749; gDNA_ID_2213640; Annot_ID_132262

SEQ ID NO: 30800 - DNA, 3000 bp, Unknown; identical to SEQ ID NO: 10267
  misc_feature (1)..( 3000): 2750-1469P.txt file - cDNA_ID_3035749; gDNA_ID_2213640; Annot_ID_181210

SEQ ID NO: 30801 - DNA, 3003 bp, Unknown
  misc_feature (1)..( 3003): 2750-1469P.txt file - cDNA_ID_3035753; gDNA_ID_2213640; Annot_ID_132259
tgaacccgggacaaaagaactggactcggtaccaatcatgggtacccaccaagactcagtaagaagatgatattttggttttacgctctgcgagactttctctcgagtgatttgttgttttgtttctgtgtcattttaataaaagctgtcttggatctaaagctggacaattgggtttcggatctggaattgtaattgttactgtgtaataatttgctgattattaagtttcttgtttcttcacctctggctaggaaagtagaaaagttctaataagtagaagtatttaaaaatatattaatcaaataacttcatcgagaaaaatatctttcaagattttttttttcttcgaaaatcttcaaagaaaattgaatacagagtttatgatctaaaaacaaaaaacaaaaaaaaaatcttccaacaaaatcttaatactattaatacatctaaatgagagatttttcccaaaacggattatgataaccagataaatcgaacgcagtgccagcaacaaaacgtttttaatggtaattaaaaatttaaacgagatcagcaccacgttttttaattatccttcttctgtcgtttttatggtcaactttgttataaaaaaaaattataatctttctaaacaaaaaaaaacgaaactggaattttgattaacagaaacatccaatatcaacatttaattggttttacaatttaaaaacaaaaagggtttcacagtttgactctctctatttatgctaacacactattaagactaatttcctatttttttaattgaaaatcagaatcttaatttgaaattaagctccgactatttaaagcttgtccactgttccgttaacatctataatcaccctggcatacatacttgtcgtctcccttcctcacgtttctctcctctgcaaattcgaagctccgttgagctcgaatcagagaagtagctatttcgtacaaccccagaacgatatatttttttctgggtttccttgaacataccacactcacggtcacgggatccataccaagcttccgtagccatggggtttgatcccgagaaccaatcgatctcttccgttggacaggtttcgcttttctcattatcgtcttcttttccccattcttctttcggtttaggtttccgatagcaaattgtactgatttttgttggttcttctcccggtcggctttgaagacttttgattgcaatgtatatcttagggtttggcttgattttagatatcctttttatgaagtgattgtggattttgatgtctctgtaatgtgtggagcttgtgaaaattgggatttcaattttaagaccttagcttctgggttttggaataacgattctatcctaaatctctctaatttggtatcaagtcactttctgatgcaaaattcctgaaactatatattatgtaggttgttggtgattcttcttcaggtgggattactgctgaaaaggaacctttgttaaaggaaaaccacagcccagagaactactctgttcttgcagccattcctccgtgagtctctctcgttctctcttgtttattagtcatcaatttgtggtcccagattgttttgtttatttgctatttattgtttgttactactatttctgctgaaagcaagtgggaatcttttggatatgcacatgatactgatttttctaaaagcatgctaagaacgtaagaacgtaacaagtcatttattgcaggtttctctttccagctcttggagcattgctttttggttatgaaattggtgcaacatcttgtgctatcatgtctcttaaggtaatggtttaaccttgtctaaaactgtgcttctatactcaagtttgatttttttagctttctcatatctttagcagttaaatgacgctacttcatagttcatgcctgcatttgcactgccattacgtttccttggatttctcctgcatagttgttatgcatgtacatctgttcgattgtctaagcctattaaattctgaatgactaatctgcttttgcctcagtcgcctactctaagtggaatttcatggtacgacttgtcttcagtggatgttggtataattgtgagtctacctttcttggatcttctacatgttggttattgcactattttttgttcttattttctccctaaattgggaagctgtgatctttcttgtggaaggacaaagaaatttgcttacgacaattttcatacttttgtgcagaccagtggctcactgtatggtgccttaattggctccattgttgcatttagtgttgccgacattataggttggtttttctcaactgtcttcatctgagtatgtagcagcagtctccttcatctgaaagaaattgaattgttggactaaattttcaaggaaggagaaaggagctgattttggctgcattcttgtatcttgttggagccattgtgactgtagtagcacctgtcttttccatactgataattggacgagttacgtatggcatggggattggactggtaagataaatcacacatctttattgtttgcctgctaaaatgtgcatcatgcatttgactaagtagttaatcatagtcaacctttccacgaatagctacttggtagaaatatgcttcacgctattactgaacatgtgttatccaatgcatccatatactaccagtctatcactcatagaccaacctggcagtgtttgcattcttctgtattcatatattggcttactccttcgatttattgattggtggaattcgggacagagtttacccctatatcgagacagtctgagatatataattcatcctattcttattctcctgtctcactctattttacgaagttgagagccattgtttataaatattgtttactgttcaaatcaagatgtttgttctactgtgagtgaatccatgcagctagggagtacaattttaagcattctttttaactggaaagttgatatgtttccttgcatttagaccatg

SEQ ID NO: 30802 - DNA, 3003 bp, Unknown
  misc_feature (1)..( 3003): 2750-1469P.txt file - cDNA_ID_3035753; gDNA_ID_2213640; Annot_ID_181207
gatggctttgacggtggcgaagagtgcgttggaggcgattagagagaaaggtctcggcggtttcatgaggatgatccgagaagaaggcttcatgttagttctctgtctctcttttccaatctctcttcctctgcttaatttcttcaggattataccctcgatttcattagttagatcccaaataatctagaaatttacaagaattttcggtgtttgttgaagtttgtttgcaatgaatggttatcattcttcggtttttttcactcaaatgttaaattttcttgatgtgaaatgaaaatcaaacactttgtttttggtgaacatcaattttgaacggtgatggtgatgcttgaaattggcataatgtttctggttgcttataagtctaagatcttattgtttgtattccgaggtaatcactagtttatggaatttctctaattgcttctttcaattttttttcttcattgcaggagatgcctaccagatgggaacctcttgtaagtaatttatctttgataattagtgcttagtgtttcacttctttgtggattacgaatatgattcaagtggttgttcaagagttctttacagaccaagttcattttcatattcttatatgtgtatgttgttgtgtgagcgaacataattttgtcagattcattatactgtgaacagagctcgccaattcttgaacagcttactattctttgacttggactgctgatagatgttatgttagttgattttggagttcagtaaagaaacagtgacagtaaatgatggttggtattccagagatagtgtagttacatgtttgaaggaattgacaatattatgccataaggctattcaagttgatgaggaataagagctcaaagattggtgaggcctgttaatggtgatgaaattggcctacaaagtagtcttgaaacttgaaagatcttaagagtcaaaatttatgtgcctctttcaccaagtctataagctggatttgtcgttctcataggctctagatagttggtgcatttggctgaatatagagaaccttttcctcagatcatttctttatgcgtaatatacatataacatatacttagtgttgcttctatgttgtgtattgagatgttggaagcatgtatatatgggtcacatagtatatacacagtatgcttgaatattgtgtcttattaatagtttccccattctttatattgtagcttgctgttgagtcgtattttctgatcaatactgttttatttctatatttgatgaaggcaaactaaaatacataacataggagcgacacttgttggtgttgacaagttcggtaacaaatactaccagaagctaggcgatactcaatacggtatgtagttcctttaacttcatgttttacctatataaaatcatgctttaacctaaaaaaattgatgccactgtaggattcatgatatttgttactaaatattcagggaataacccttttaatattgacttcaaatgtttgtttattctgagtggtacagtcatggaaattgtagccactcactcagcatttgttatttgttagctcactgcatgtatcttaatagaatgtttagtcaagaggcttttacattgaaacaagcaatcactttgtgaacaggtaggcacagatgggtagagtatgcttcaaaggatcgttacaacgcatctcaagtaccagctgaatggcacgggtggcttcatttcatcactgatcacactggcgatgaggtaaaaccaagagccatttcaaattcgctgtctcgttcaatcaatagataatatattgccttgtaacttgataataaataccaatgtctctgtttcaagctcttgagtttgaaaccaaaaaggtatgggcttgagcataaagagaacttctctggagaaggtgatgcatacatctaccattcgaagggacataccttgaacccgggacaaaagaactggactcggtaccaatcatgggtacccaccaagactcagtaagaagatgatattttggttttacgctctgcgagactttctctcgagtgatttgttgttttgtttctgtgtcattttaataaaagctgtcttggatctaaagctggacaattgggtttcggatctggaattgtaattgttactgtgtaataatttgctgattattaagtttcttgtttcttcacctctggctaggaaagtagaaaagttctaataagtagaagtatttaaaaatatattaatcaaataacttcatcgagaaaaatatctttcaagattttttttttcttcgaaaatcttcaaagaaaattgaatacagagtttatgatctaaaaacaaaaaacaaaaaaaaaatcttccaacaaaatcttaatactattaatacatctaaatgagagatttttcccaaaacggattatgataaccagataaatcgaacgcagtgccagcaacaaaacgtttttaatggtaattaaaaatttaaacgagatcagcaccacgttttttaattatccttcttctgtcgtttttatggtcaactttgttataaaaaaaaattataatctttctaaacaaaaaaaaacgaaactggaattttgattaacagaaacatccaatatcaacatttaattggttttacaatttaaaaacaaaaagggtttcacagtttgactctctctatttatgctaacacactattaagactaatttcctatttttttaattgaaaatcagaatcttaatttgaaattaagctccgactatttaaagcttgtccactgttccgttaacatctataatcaccctggcatacatacttgtcgtctcccttcctcacgtttctctcctctgcaaattcgaagctccgttgagctcgaatcagagaagtagctatttcgtacaaccccagaacgatatatttttttctgggtttccttgaacataccacactcacggtcacgggatccataccaagcttccgtagccatg

SEQ ID NO: 30803 - DNA, 3000 bp, Unknown; identical to SEQ ID NO: 10277
  misc_feature (1)..( 3000): 2750-1469P.txt file - cDNA_ID_3035757; gDNA_ID_2213640; Annot_ID_181205

SEQ ID NO: 30804 - DNA, 3003 bp, Unknown
  misc_feature (1)..( 3003): 2750-1469P.txt file - cDNA_ID_3035769; gDNA_ID_2213640; Annot_ID_181199
gatctcagaaattaattatacccctaaactataagattgtttaagaatacaccctaatgattggggtttgttctgacaattactaaagccaggggttaaaagcggaactttctgattctcattaccttgaagaagaagaagaactgcgacggtccgaatcatcaggggagtttggaaaagaagagggagagttaacaccttcatctgcgtccgcgtctacgtctctggtgtagtttccgcgtctgcgttcttcacccaacataagagactccatctgttcttgatagtgcattttttcttctaagcggcttctaattgattaagagttgagagaacagtggcatttatacgactataattattttaatgaatgtgtttatatagtcggcccgttattaaagtttatttacaatgtttacgcaatggatattcgaatttaaaacattatctaatgagctctgtttgtcaaataacatgtcacgcccatgaacatgggttctggttttgcggtctttatataataagtagggtatttttttatgtcagagataagatattttgggaatgatggaacaagatgacgacacgtggaaagagtgaagaaatggacggagtttaaatacttgtttacgtggtgggtggaaacagatggcacgaacaacgaggccatcgagaatctctgtgtaacgaatctaacgatacgtgtcgaactacgttgaacagattcaaagacttttgggccatgattgataaatgaactttattttatgtatttatggaccgtttctaaggccccttagcacatgatcgctttgaaaaaacatatcaagatgtgtaactaattggggagaaaaatggaaatacggaggaatctatacgttttcttcaccaaagagcaagtagaatgttttcctctactttgcttcttctctttccttattcctgcgtaaattaaatgaactaattttctactgcttcaactggtaagacacagagttagaataacctgttctttactctaataatattcctctaatcagggccacccaatcatataccctaagggtagattgcaaagccagatttgtgggctaggaatattcctatttcgttaacttaatacatagatgctaacatattgttcatgttccaaaaacaaccagatattataatttgtaaatcaaaatcacctttgatcactgctcagctaagtatggctatgtatctcctcccactaagatactggacatcaatctcaatctctacttcaagtccatacatttcgaaagtaagagtggccgaagttcaaacattttaaaagccaactacgagaactcagaatatgtgaaagccaaagaaaagaaaagaaaagaagtgtttcacaacaaggttcatggagaagcaaatacatgatcatcagtattctttccctaatctatctaaagcaacttaggatgtaccccacgcttaaactcaattatctagaacctcaaggacgattgattactctattctacgctaatcgatcatttagtaaacaaatgccgattgcttggtatgggtcaatctatggttcatgatcggttcttgtgtctaacaaagcatatcaaaagcacatactactagttcagatttcagatgcatcagtatatttgtataaaaagggaaatgcacctatgagacaatttggatttcacccggaaatcaataaccagacattgaacacaactaaacaaaagggttccctgattaccaaatctgtatccacaagctctaattcatagaatgcataagagaaatcacagtgggtgtggcacagaatcaattcaataaaaccatcaatcatgtgtgtgtcattaatgcataatgcctatcctgaagagaagattatagagtcaatcaaaattcaacaagaaacaatcacaatctggttacaaataagaatccaaacatagaaaagtaggataaaatccttcaatctccacaagataaaagacacatatcagaaacgttgaaaaagagaaaacctagccaaatgggaaagataaccaaaaaaggcattacactaattgaacctgagacgagacgatcaatccttgttcctgagcctctcgatcctctggttaagatgctcgatcttgacaaccaaattggtgactgagtaaaggatccagtagaacacaagtgcagccgcaatgagaagcgcgtttcgctgggatttcatcatggacttctggtgacgaagatgctctgacggtgtgcaggaatcgccatcgcacgaaggcatagtttcgtatttccagtagatgtccattaagaggaagagacagaaaggaactatggagagaaacggtttgaggagattacgcgtgacggcgactaatcccttgcggagtccgtcgagtcctggcatcgtcaatagcaccaccataatcgcttcagccgccgccgcgtaacctaaaaccacccactcgagcgccattatcaccggatcaagctagatctgaagtctcttctcttcctcgcaatcgcagcttgaattttctattttgcagactcattttttgctggggaagaaaagagaagatgtaaggaacgtgatacacgtggcggtcaacgcgtgtcgcacgtcgattaagagggaaaatgggcttaaatgggctgaatttgctaaaactcggcccaaaagaaaagtatagatatattaagtagtccgtttctttaaagtcggctttagattcacacagtgtcgatttgtcaagtaacggcgtcaaaagcgaaacggcaacgtttggtaggtgagacacgtggatcagatagtgttttgtctcctaatccaatctctttcaaagcatacataataaatgcatatatataagcacacattaaacggagttaaactcatcatacattactgactaaaagaagcaaaatcttgagtagaaacaaattttcctgtatctctctctcttgtaatctccgacgaagaaacacagttttatg

SEQ ID NO: 30805 - DNA, 3000 bp, Unknown; identical to SEQ ID NO: 10265
  misc_feature (1)..( 3000): 2750-1469P.txt file - cDNA_ID_3035771; gDNA_ID_2213640; Annot_ID_181196

SEQ ID NO: 30806 - DNA, 3003 bp, Unknown; identical to SEQ ID NO: 26670
  misc_feature (1)..( 3003): 2750-1469P.txt file - cDNA_ID_3035775; gDNA_ID_2213640; Annot_ID_181192

SEQ ID NO: 30807 - DNA, 3003 bp, Unknown; identical to SEQ ID NO: 26671
  misc_feature (1)..( 3003): 2750-1469P.txt file - cDNA_ID_3035779; gDNA_ID_2213640; Annot_ID_181190

SEQ ID NO: 30808 - DNA, 3003 bp, Unknown; identical to SEQ ID NO: 26672
  misc_feature (1)..( 3003): 2750-1469P.txt file - cDNA_ID_3035783; gDNA_ID_2213640; Annot_ID_181189

SEQ ID NO: 30809 - DNA, 3003 bp, Unknown
  misc_feature (1)..( 3003): 2750-1469P.txt file - cDNA_ID_3035787; gDNA_ID_2213640; Annot_ID_181188
ggggttttttgttgttgttgtaggatcttgctgggtagtgtgagcaatcatgtggtgacaaatgcaacatgtcctgtcacagttgttaaggctaattaaagtgtctcttgttctttaattggacccagttaataacattagtagttacgtgtgtcactcatgcattgttttgacatttatacgtttgttgccttctacaaatttgtgtgaaactgattggtactgtttcattaataaatttcagttaaatgatatttactctctttttgtttgtgatttgtgaacgttacgtaaaaatcacaaaaaaaaataattagtttttctaattcattcatgaaaaatcttcgtggactaaacaaaaaagatgtgaaaaaacaatccccatgtttgatccagattaattcgatccgttaatcaaaagatggtcttaatgagcataattcggggataaagtcgaatatagaaatagttgttgaaaagagaaatgtttggattgaatcttgtcagcttgatgtgtggttgatcacatgaccaatctatgtatggaatatggatgtcgtgtgtgctgattcattcagatatgacaagtggtggatgggataattcacgatatgggccagattatgagtttgttttaacttgaatggcaggccgaatcataatggattcatgatcattatgtttgatcatagcctagttggacttgtatccctagatcatgatcaaagtgggcttataaacatggccgagatgggtagttctaaatcaatttgttggatcagaagaaatcaagaaagagacagtcgttggagcttttctgatctgcttttggatgatcacccattagattgaaaattaaatttttcattctccgctcgatggctgatttgtaaacttgttccttcatgatagaaatttatgggctaaatacagaaagtgaacgttagaatttggttttgggtagaagaacaactatcatatgattaaagattaatcagatgatctaaagatagttttggtgagtacagttcggaaatatagccgttgatgcatgatgtgtgactttcaaaaatagaaatagccgttggatttaaatttaaggtcaatgaacaactgtcagatatgcttaaaattaatctaatgatccaagaatggttttggtcaatacttcgagtatatatagttgctggtacgtgatatgtgaccttgcttcaaatataaaacgagccgttgaattttaaatttgggtggatgaacaacgtactgtcaggtatgatgattaagattaattcaatgatccaaaatccaaatattgtttcggtagacggtggtacttaattagtgagactttcaaatattaaaaagagatgttgaatttaaattttagtttgctcaaaagaaaaagtttctagtaaaaacaaaacaaattatgtttaattaaggtatgtaatatggttatgcataagactagtgttgatgagatgattcacgatgtcgtatggattggattatgagtattcttaaactcgaatgggttgccaaatcataatggcctcattaatttattgtactaaactgaattataatatatgttcttgagcgaaaaaaatccataatttataatttcctatctagctatattggattgatccggctgttgacaatctggtcctgatttgaatcggtttctcgaatcatgcaccgtaatcgtagtctagccatttaggattgtatcactaacagtagtgtcactttaaaatgttggagatttagactatgaatagtaatataaaccgcacccaaaaccgcactgcaacaggtaacagtatcaaaatctctctctatatatatgtattttcgttactatttgaaccgcaccgcacttctcccacaccgcaaaacgcagtcatcattcggacccttaagacaaaaataataataacaatttatatagaattttaccaaaattgatgtcaaaaagagaattttttattattattttaaaacctaaaaactaatacaatatagagacgtaagaaaaatgccatcttttttctttcctcatgctacacacctttagatcaatgtttcctatagattttacaatttttctttccacattactaatttgagtatttgcaatctgttgaataagttgtcattgttcttaaaaaggtacttttcaataaattgtcatttctatctatataatcagtgatatctttccattctcttattttataaataagttagcataagaaaatatataggactaaaaccatttaattaatatttaaaacactaattatgaatttgtttaattttttactaaaaatttatctgattagcacaagctttttgtaataaagtttacaaacctttttgtttgtacaatagacatttagctagatatcaaaatttaacatataaacaatagaaaacatttatgacaaaaaacaatttagaaaacatatcaaaaagcctaattgacacttgacattgttgaaactattgatttaacacattgtattttcatattatatataaatttatattcacctttcaaaaatacatttaataattataaactaaataaaaaatgtttgtttgacttgttttatttcagccttaaaaataaatcgaccaataatatttagaaagaaaatcttatctcaataatttaagttttgcttagatttaatttatttgttcacctcaatgcattttatacaaaacaaatattttatatttaatacatatgtgaattaaatattaccttttaacaaataatgtaattaatatcttttaacaaataattttacccactcaaatagtaatatctatatttccccccttcttccctttttatgaattaatgtatattttaaaaaaatatccttaagaccaccctttttcccctataaatactgattaacttgtgccttaacaaaaacaaaaaattattcgcaaacacaaaaaaaattgttagtgaagaacaaaatg

SEQ ID NO: 30810 - DNA, 3003 bp, Unknown
  misc_feature (1)..( 3003): 2750-1469P.txt file - cDNA_ID_3035794; gDNA_ID_2213640; Annot_ID_181183
gctttgattgctcgagctcaaaaattgaaactttagctttgggaaccactgtggttatatatttgctatatcagatacttataaactctcatctgtagttgatggttttgtttgtttgaagatttgctggttgattgttttttcttaatgtggttaatcagatgggaaaagcaaagacatgttaacaatgaagttaaatgaagatgagtggttagaatacgagagtgtgatgcaagatgttgtgaagagaagtgggcttaataagagcatattttatgatcttaggggtaaccatgacaactttggtgttccgtctgttggttcatctgttgatttcttctcaaagtatagcatcaatggacagatgggaaggaaaggaaatgttaacaccataactgttgaggttggttatgctctcccagcctggtctatagtttgttctcttgattattttggttgtgatgaaaagttatatgttacagtgtgctaacggttctgtgttttgttatacagactagcgaacgtaaacatctgtttgtcggtattgacaccacaatgcatattggattacgcggcccaacaaatctctttgggcatccaactgatgaacttttgagctcactcgactcacacctctcgcaatgggataaccaatcagcaaaacctgttgcaaaaatatcatttgggcatttcccattgtcattcacagcgctgtcacattctcaaaagagccttaaagatgtttttctgaagcactctatctcagcttatttgtgtggccatctacactcaaggttcggcaagaatcttaaaagacatcatcactctggtggtatcagtttatcagataatgacttgtttcagctgaatatgaggcagagtggtgctgaaagtacttcgaactgctcttttggagccttaccagctgcagagttctgggaatgggagatgggtgactggagaaaaaacagggcaatgcggatcatggccattgataggggtcatgtttcatatgttgatcttgacttcaagtcaaaaccccagaagactatcatattaccgacctttccattagattcacgttttatgtcaacatcctttgcacgtcacaaatacgagtgccaacatatgatctcatcatcgtatgacgcaataagagccattgttttttctcattctctggttgtggaagttgtagctagagtttatgactcaagccctggatttgataatctggtcatggaagctccaatgagaaaacatggaggcgattcttcttcttccggggcaacattcttttcacttccatggaattatagggcctttgaagatcccttacctgatagattttggctgcaaatagaagtcactgatatcaaaggcagattaaccttatcagaaatgcgaccattttccatcaatggtctaagctctaaagtttcatggacatggaatgagttccgtgtcatgggctgccagtgggcggcattatattacccgattctttggcctgctctatatagtttgtttctcgtttttcttatccccaaatgcatcatcatcgttttcaagaagcagtacactctcaagaagttcattgccaagaaaggacctatcacacttgtactgtggattctccaagacctctgcagaatgcctgtggtttggttcggttacatggcatacttgttctatctcatattctttccttggttctccggtgaagtgtttgctgattctggagacagagcatacatgactattatgggatgggtggtgacgagctcaggcgcagataggaaacatgaatacattggacaacctgatgtaatggttgtggtgatcccacatgtggtctttgttgttatccccagtgtcttggttgtgtgttgtctggttgctgagagagaaatctacaaagatcacattcgaactgtctctggtaagaaagaggatgaccatgaccggggaaggaagaagagatcacaacgccgctcactgttattctcgaacagaagactgtttcggaaatcggtcttgctggcttcattagctctatattggaagcatttcaaggtaccacttgtatattaactaatgattcgtttatttccatcttgcattggcaaaaacctgcgatcatgttcatccgttgtctgttttcattctgcattcacttctgaagtatattttgtttttattgacagaattgctgggcattaggtagagcttatgagatgaatgtggttcattttccaggttacagccttgtagttccattgttgctactatatgttatctgcaaaacccataaagttccatgagatttgaatctatggaagttttggtgtttttatgattttgattatgaagaaacacatttatagggggttttcttatgtgttgtttgatagagttgatatactatatagatcaagaaagttagaccaaattattctgtatccttttgcttttatttttttttacagctagaccaaaaaagtacaagtggttttgctcaatttggaaaaaaaaaacattaaaaatattaaaaaacaaaaatgaataatgacgtaagcgaaagcttctgtcatagtctcacagtcacaacaaaacagtcaatcccccaaagaattatggtagcagtcaataatcccataaataatcttcttcaacagtttttttctcttaaatttttgtttcgaaaaccgctcactacttcttaatcgaaatgactgactgagagctttagcttttgatcgttcgtcttcgtgattcctttcttcttcttctctccgctactgtctgtacctgaaactactgtcctcgatcgctgctttgtctttcgaggttctctaatttgttttttcttattattatctctggggtttgcttttgcgttaatcctctttctgctcgacttacggcgatttttgatatttgcagattaaaaagttaggtttttttttcgtaaatctactgtatatgttttagatgaccatg

SEQ ID NO: 30811 - DNA, 3000 bp, Unknown
  misc_feature (1)..( 3000): 2750-1469P.txt file - cDNA_ID_3035832; gDNA_ID_2936581; Annot_ID_194897
gaaaacttgtgtaatggcatatttagtttgcattttagacatcttgcggaataaattaatgaacaaatctgcaaataaacgtgactaacaaaagcccgttatttcgtgataccacaggtttaccaattagaccttttatcaactatcatatttttttgtttgttaaaacacatcttatggcttgtttgtgcagttccagtggtagagcgggtagctcggtggcatctgttccgaggacaccaccatttccaggaagcaacgctcggacccgagacagaatgcaggctcttcaagcctattaccaacagtcttctgcacagtcacaccagccggattcgcctatagtctctcgagggcctgtattcccatctggccggaggcccgctagaggaatagcttcagggatgggatcaacgtcatcttcttcagatcaggcaggtgggagtggttttatccggtttaacatatgggagagagatccttatatgcaatcacaacaagcctactcggttaatcagatggacagagaaccaaacatttggacatcttcatttaatgaaggatcaggaagcttccatcagaggcacggtggcggaggaggatcatcttaagaactgagtcagtacccgttcgagattctcaccggtcgggcaattctcatgatggacaaaaaaccaaaaaaagaaaaaaaaaacattgggaatttgatatttgagaaaacctgaaaaactgcatgctcaagttatgtgatgaattgataatctaaaaacacaaaatggtatgtaatggtttggagagagactgcctcccccagtcggtggtgtgacccccgtgcggttcgaggtctgggtatgaatcgggggagcgaaagaggtctttgggtatttgttttttaatgtggcgacattgggtatccaagttattaccctaatgaaactttctttcttctatctggttatgttaaattttaactgtcgagtttttcttcatattactatcccaaattttgatggtctttcttttgttttgttttttccctacaacataaaaattgacgtcaaatgaccaagactatagtctatacgtgacatcaaaatcgaacagtccaaaccaaagtcaaatgaccaagacctgtctatagtctataatgttacaacaaggccgccttttttcttctaattcagcgtcgtaattgcaaaataataaaatagtttaatagtaaaattgagggatacaaaaacaaaaggtagaactttcctcctccgattttatctcagcctatataaattaccggcgaaaggctttatttttcttccaagttttgatttttccaaacaatggtggaatcaaagaccaaatttgaagaaatcagaaaatgggtctccgatcacaaacttcgtaccgtcggtaattatccttgtttcttcttcttcttctcaacattccttttctcttgggtcgtttattgtgatcttagatttcatcgccttaatgtcatatagtagaattgattattaacttgttacggtttctgttaccgtcttggatttcctcttgattccactgagacatttttggtcctcaattcttaatgttctttgacatgcaaagatattagagaatgcattcccatctactttatttttggtgttttgatatttctttctgctaattctgaacctgtattgttttaatttgaccgttgttgaatcaggttgtttatggctaagtggtattaccggttctatcgcctataactggtcccaacctgccatgaaaaccagtgtcaagatcatccacgccaggtgaatcttctaatcaaaaggattgattgattataaatggttgaatgatttttttgtaaagtttttgagtctcatttgcattttgaaacattttctgtagccatgaacatttatagttgagcaacatcatcatctccatgtcccaaaagcatgtacatttctctgttcttgcctgtaagctatagttgttatcgacataaattttatgttcttagccaaatcatttgttcgagacatccagtcacatggtactgtacgaagcacttttctcaccgagcttcttctcaggttgcacgctcaggcgctgactttagctgctttggctggagcagccgtggtggagtactatgaccacaaaactgaagctaccaaccgctatccgaagtttctgccaccggaaaatttatctcacaaagactaaaaactctaaactcctaagctgcaatggttggttgcagcgttttctgtttggtacaaggtctcgtagctagagagaatttttgtagacctttcagggaaattttcatgtaattgacaaaaacaaatttttgcttattacagtatatcattcttttgatacattcagatggattgtcatgtgttgtagattgcacacaatatacagacttctaagagataatgtactgaaaacaaatccatgattaaattgaacaactagcatttgttggtggaacacaaaagaataaatatcctcacttgtctaacgagttgtgggagttattacaatttaaaaacaattgggattatttttggatttaacaaaagtttggggatcttgtggttatttatagaaatataaattagggcaacaagaccactttaaatgggcaaaaaccctagccatctgtttcattctccccaaagcaaaaaagacgccgctcgtctcttcagagaatttcaccttctagggtttgttcaaggtacacgctgctactatctccctttaatggaacgggcttcagtttctgatatagtagattcgatagacttgtctctcgagatgtgaagatggaatgagaagaaacgagtttttagcttcatttcctcttggattagcttcatttttcatctacttagagtgtaattgactatgttagattgaaagtcgaatctgcgatacagatctcacttcccattttccaggttttgagttagtcatagtagctagaaaatg

SEQ ID NO: 30812 - DNA, 3000 bp, Unknown
  misc_feature (1)..( 3000): 2750-1469P.txt file - cDNA_ID_3035832; gDNA_ID_2213641; Annot_ID_132281
accaattagaccttttatcaactatcatatttttttgtttgttaaaacacatcttatggcttgtttgtgcagttccagtggtagagcgggtagctcggtggcatctgttccgaggacaccaccatttccaggaagcaacgctcggacccgagacagaatgcaggctcttcaagcctattaccaacagtcttctgcacagtcacaccagccggattcgcctatagtctctcgagggcctgtattcccatctggccggaggcccgctagaggaatagcttcagggatgggatcaacgtcatcttcttcagatcaggcaggtgggagtggttttatccggtttaacatatgggagagagatccttatatgcaatcacaacaagcctactcggttaatcagatggacagagaaccaaacatttggacatcttcatttaatgaaggatcaggaagcttccatcagaggcacggtggcggaggaggatcatcttaagaactgagtcagtacccgttcgagattctcaccggtcgggcaattctcatgatggacaaaaaaccaaaaaaagaaaaaaaaaacattgggaatttgatatttgagaaaacctgaaaaactgcatgctcaagttatgtgatgaattgataatctaaaaacacaaaatggtatgtaatggtttggagagagactgcctcccccagtcggtggtgtgacccccgtgcggttcgaggtctgggtatgaatcgggggagcgaaagaggtctttgggtatttgttttttaatgtggcgacattgggtatccaagttattaccctaatgaaactttctttcttctatctggttatgttaaattttaactgtcgagtttttcttcatattactatcccaaattttgatggtctttcttttgttttgttttttccctacaacataaaaattgacgtcaaatgaccaagactatagtctatacgtgacatcaaaatcgaacagtccaaaccaaagtcaaatgaccaagacctgtctatagtctataatgttacaacaaggccgccttttttcttctaattcagcgtcgtaattgcaaaataataaaatagtttaatagtaaaattgagggatacaaaaacaaaaggtagaactttcctcctccgattttatctcagcctatataaattaccggcgaaaggctttatttttcttccaagttttgatttttccaaacaatggtggaatcaaagaccaaatttgaagaaatcagaaaatgggtctccgatcacaaacttcgtaccgtcggtaattatccttgtttcttcttcttcttctcaacattccttttctcttgggtcgtttattgtgatcttagatttcatcgccttaatgtcatatagtagaattgattattaacttgttacggtttctgttaccgtcttggatttcctcttgattccactgagacatttttggtcctcaattcttaatgttctttgacatgcaaagatattagagaatgcattcccatctactttatttttggtgttttgatatttctttctgctaattctgaacctgtattgttttaatttgaccgttgttgaatcaggttgtttatggctaagtggtattaccggttctatcgcctataactggtcccaacctgccatgaaaaccagtgtcaagatcatccacgccaggtgaatcttctaatcaaaaggattgattgattataaatggttgaatgatttttttgtaaagtttttgagtctcatttgcattttgaaacattttctgtagccatgaacatttatagttgagcaacatcatcatctccatgtcccaaaagcatgtacatttctctgttcttgcctgtaagctatagttgttatcgacataaattttatgttcttagccaaatcatttgttcgagacatccagtcacatggtactgtacgaagcacttttctcaccgagcttcttctcaggttgcacgctcaggcgctgactttagctgctttggctggagcagccgtggtggagtactatgaccacaaaactgaagctaccaaccgctatccgaagtttctgccaccggaaaatttatctcacaaagactaaaaactctaaactcctaagctgcaatggttggttgcagcgttttctgtttggtacaaggtctcgtagctagagagaatttttgtagacctttcagggaaattttcatgtaattgacaaaaacaaatttttgcttattacagtatatcattcttttgatacattcagatggattgtcatgtgttgtagattgcacacaatatacagacttctaagagataatgtactgaaaacaaatccatgattaaattgaacaactagcatttgttggtggaacacaaaagaataaatatcctcacttgtctaacgagttgtgggagttattacaatttaaaaacaattgggattatttttggatttaacaaaagtttggggatcttgtggttatttatagaaatataaattagggcaacaagaccactttaaatgggcaaaaaccctagccatctgtttcattctccccaaagcaaaaaagacgccgctcgtctcttcagagaatttcaccttctagggtttgttcaaggtacacgctgctactatctccctttaatggaacgggcttcagtttctgatatagtagattcgatagacttgtctctcgagatgtgaagatggaatgagaagaaacgagtttttagcttcatttcctcttggattagcttcatttttcatctacttagagtgtaattgactatgttagattgaaagtcgaatctgcgatacagatctcacttcccattttccaggttttgagttagtcatagtagctagaaaatggcttataaagtatatagagaatataggcttctttatttgtatcagtatgatttgtcaatgatctatagacacagtcttatggattgttttttggattttacagagaagtcttgggaaaatg

SEQ ID NO: 30813 - DNA, 3000 bp, Unknown; identical to SEQ ID NO: 30811
  misc_feature (1)..( 3000): 2750-1469P.txt file - cDNA_ID_3035832; gDNA_ID_2213641; Annot_ID_181254

SEQ ID NO: 30814 - DNA, 3003 bp, Unknown; identical to SEQ ID NO: 26681
  misc_feature (1)..( 3003): 2750-1469P.txt file - cDNA_ID_3035836; gDNA_ID_2213641; Annot_ID_181250

SEQ ID NO: 30815 - DNA, 3000 bp, Unknown; identical to SEQ ID NO: 10295
  misc_feature (1)..( 3000): 2750-1469P.txt file - cDNA_ID_3035840; gDNA_ID_2213641; Annot_ID_181247

SEQ ID NO: 30816 - DNA, 3000 bp, Unknown; identical to SEQ ID NO: 10287
  misc_feature (1)..( 3000): 2750-1469P.txt file - cDNA_ID_3035846; gDNA_ID_2213641; Annot_ID_181245

SEQ ID NO: 30817 - DNA, 3003 bp, Unknown
  misc_feature (1)..( 3003): 2750-1469P.txt file - cDNA_ID_3035856; gDNA_ID_2213641; Annot_ID_181239
ttcaaattctggattgtaaaaatgttatttgttctgtaggtaattgtgaatctaagaatgcgtttgtgatctgatttggaataattttcactatgtatgtattaggtgatgtaaagagtccaagacttgtgccaaagcctcatggagctactttctcaatgcaatcaccttgcttggaacttggattttctcagccaccggtaaaaacttttccgcattgaaaaacatataatgaataagcctatcatgagtttcctttaatttgtttctgagtatttagtgtttgttggctgtttactttggtcatttagatctatacaaagtatccctatggagaacaacaatactatggagttgtttcagcctatggatctcagagcagggtaatgcttcctctaaacatggaaacggaagatagtaccatctatgtgaactcaaagcaataccatggaatcataaggagacgccaatcccgcgcaaaggctgctgctgttcttgatcagaagaaattgagtagtagatgccgcaaggtaacatatagaaactagtttgatacttttgtgcaaatgagattttattactgaattagtgtgtttgcttttgttatgtatgttgcagccatatatgcatcattcgcgccatctccatgcattgcggcgtcctagaggatccggtgggagattcttgaacactaaaagtcagaacttggaaaatagcggaaccaatgcaaagaaaggtgatggaagtatgcagattcagtctcagcctaagcctcagcaaagtaactctcagaattctgaagttgttcatccggaaaacgggaccatgaacttatcgaacggattaaatgtgtcgggatcagaagttactagcatgaactacttcctaagttctcccgttcattctcttggtggcatggtaatgcctagcaagtggatagcagcagcagcagcaatggataatggctgctgcaatttcaaaacctgatcctttaccgtttcacagtcaaacggagagagataaagaactcttgccttggtataaaggattttcctttttgccaatccgctttggctgtgaacaggcaaatcatctttggctcattctctattaaggtaacttcgccgtgaggtgaaaaaagctttgatatatttatcttcagtgtaaaagtagttaaaactggtgaagaacaatgatgtgtttggtcactaaacccacttgttccaactagtagtgtgtgttttaagaaaactctgttatctgattttgtagctctctctggctttgtgtgtttctcaaacaactgtaacaacttttaagttatgtggtttatgtaacatatttaagacctgtgtttttgtatatttggtcgaatttatgttattatttgcttattatccaggacttatacagcaaagacagagtaaaaaaaattctgttccaaatctaatggttgatcaatctagctatcgatccgagatcgaaaaaaaatcgagcaacgttcaaccactcaactaagacattccatttgtcaacatgtgaaacgatatattatatatatcctaaacaaccatggttagcttttaaccgcagttaatgttacatgtattaaacgtctaaattataaatagatggcggttttttcccaagtaaatctgtagtgaaaaataaatgcggaaatggctacaaaaaacgtaaaatatttagagtaaaaaaaaataaaaacgtaaaatatttagcactctataatataataagattatacttgaaactgcatttacttttgtttaagaataaatattaaataaatttaacattggattaggtatataatctattgtagtggccaaaatctataatatctttaagttttagatagctatatgtgatatccatgatatgattaataatatattagcaaatatgaaagaaaatattcatattctattactatgtttttactgtaaaatgatcatgatttttttttgatatttatagcttggataaataatataatattataaaataattcgcttagagtattagtaatactgttttatatatttttcgtagggtgaaaacaatttttctgtaatatatatttgtgaagttttgtattattgtagatgaagaagatattgacactctatatacaggattatatgtttttgaatttgtttttatattatagatgtagtattatggttatgattgcgtttttaatttttgtgttatatgtttgtataatactaatgacaaaatctgtatatagtctagtaaaatttgggcaattatttaaatgggtaaaaagtcactatgataacgacacatcagcatgacaattttgttaataacacttgaggataaagtttattttatagaatgattatcaatttatataggggatatcaatcgattctgataattcatcttggttggactttggtcaattttggttttgtgttggtagtattgtctgaaaatattatgaaattccagctgggttgaattatcaaatgaaaacaaaaatctaaaaccgagtgctagacttattgttttgtaaatagttgattggtgaatttcgtataaataccagtactaaactcattggtccttgttcgactagttcttgttgaactggttgttgaccttgactagcagcccgattcttagcccgttttgattcattggccagatttggtagcttgggtttttggtgtcttccacctatcggtcttcgtggttcatcgtcatcattcattgtaaaattcctgaaatatagaacataaaaactaataaatcaaattaaaacaatccatatgaccttaattaattagtaatcaatattgtgattcccgtaactaatgtttagtaatcaagttaagagaatctagacctgtaccatgacttgatatactcctgtaactagaatatatggtgagagagacagaaaatacataaataagcatgttagatatatatattgattgtactatcattatg

SEQ ID NO: 30818 - DNA, 3000 bp, Unknown; identical to SEQ ID NO: 10301
  misc_feature (1)..( 3000): 2750-1469P.txt file - cDNA_ID_3035864; gDNA_ID_2213641; Annot_ID_181234

SEQ ID NO: 30819 - DNA, 3000 bp, Unknown; identical to SEQ ID NO: 10315
  misc_feature (1)..( 3000): 2750-1469P.txt file - cDNA_ID_3035915; gDNA_ID_2213642; Annot_ID_132310

SEQ ID NO: 30820 - DNA, 3000 bp, Unknown; identical to SEQ ID NO: 10319
  misc_feature (1)..( 3000): 2750-1469P.txt file - cDNA_ID_3035915; gDNA_ID_2213642; Annot_ID_181314

SEQ ID NO: 30821 - DNA, 3003 bp, Unknown; identical to SEQ ID NO: 26692
  misc_feature (1)..( 3003): 2750-1469P.txt file - cDNA_ID_3035923; gDNA_ID_2213642; Annot_ID_181312

SEQ ID NO: 30822 - DNA, 3000 bp, Unknown
  misc_feature (1)..( 3000): 2750-1469P.txt file - cDNA_ID_3035927; gDNA_ID_2213642; Annot_ID_132307
tgcgatcgcctctggttggaggcaatgtctgcaaaactttagtaaatacaatgctttatccaacatggaagcttttacttgtttctggctatatatatccttcattacaaggcctttcgatattctttaagactattaaagctgtatcttccatttttctgttttgccatcatcttcgttttctaccggatactgtctttttcacagccccaacagagactaagaactgatcaagtgaagagagagttctcatatcgtctggaggaaaatagctcgcagcttttcccattagtgaagtgaagagaagagagagcgaaggacgagttacatatctttcccctagaagatcctctaggaacccaaacgcagctagaaaatctgatcttcctgcgtttattggagcttcgaaatgagctgggataatccttttaaatctccagtcacgggctatctcatcgatccaatccctcacctgaatcatcagtgatgatcaaatcaaaacaaacattttggaaccaaaacaaagatttaaacagagataaggaaccttctcagggactttgctaaagaccaaagtctttacaatgggagaaacgatcagcttctgtgacattcgtgcgaagcttgcgtttggttccaagagattcgagggaccaagaaataggatttgcagaaccattctttcccatcctgcaagtggtaaaacaaacagaggccactgagatctaagatcaagaaataggaaattgacttttaagaactgctaacctttttggcgggtgttaggattatcaaccacaggatcattaggaatgtcttttcctttgctaagtatcttcacagctagtccattcttagccgaggccaacaaggattcgttgctgatactcgagggaggtttccgcgggacgaagatcacagcatcagtgactaaaagggttcttgaccgcttatggtagaacgctacttcgacatatggtccaattcctggatacacaatgagaaagtatgatttctaaatcttccaaccaaaccagattgaaatactgaaaggaacataccaacttctggggagcttaggactttctgttcgatctcctcagcccatggcgtagataagtccctgtctttgatgattttagcacgaaagataccgaaaaactcaagtggtaagttcaatggccagctccattgtcttggtgcaacccatacttgagccttggggaactttctagaaaaaggaccgacaaaaatcttgtgctcataagcaaacgttggcaggacaatgtactcaaccggagctcccaactccttaataagctgccacacaaaaaagagaagcgaaacaaccaatagagttcaatcattctctatttatcaaccactaagtgttacatgtcaatgtaagtagagaaatgacaacaaaaagtatgatactttgtcattcaacaattctttggagctactatattagtaaacacaaagaacaaaatagaacttatgttttgactgtcaaaaaaaaaaaaaaaagagaacaaaatagaacctggacacactctttggtgggagcaataggagcatgaacccataaacctccagattttagtttgatgacagtcattcgtatattagtggacacgctgctaaaccctaaagcttgttcttgttcaaacatccatatgcaacctttaaccgcctgcaaacaaacaaggttcaaaattttgtaaaaattaagagggattcgggcataattgacttgtgattctgaaattggagatgactgattaaagaaccctaacggaattgagagatggagcaaaagctaacctcggttctgatggtgcgccggttaaggaaaggaccaagaggaaaaggaaagccagtgaagttaatataaaagcgtttactttgatcgccgtctacgtcatcggtaaggacggtcttgctcgtcgaagaagcggagaccatcaccggactgttaaattcccggtttacggacatgggtcgacctaaattaaatgacccaccgagaaagttggtttttttatccaatggaagtttgggtttcggaagaaacgaagaatgtttcgggagatgaacggccatggccgctgccgccattttcttcttcgcttctcagttcgtttttttttttttttttagttcaggtaaggtttttttattattattgtacaatggaactagaagctgatgtctggacacgtggaccggtttaaatggatatttcatcctacgtggatattacaagaaatattgtgtggacataaaatgttactccgtttatatcattttgaaacgtcaaaagaaaggaaacaaattaagaatatattcttggtcaaactgaaaggaacattagagaactttctcaatttcttttttttaatttacacattttaacaaaattactaattcattcatgtgaattatactaaattaccaagtttaatggcggtggtcaagcttgcgcgtggaagctatgatggaaaataatagaacacgaaaagctacttgtcatatgtgacatggcattcaaaatgtgaaattccccaacggctatcaacagtatactgtatatagttacaacttttaaaagtatcatcgattaaacacatttttataagattcgttttatttcaatactatgttatttaagtaaataaatcctgactttatgattaagcaattgagaccaactggatgactaaaaaaaggaaattaatatccggaaaaaaggtaagaaatatgaccaaaatgaaaaggaaaatattacttttggttaattacataacgcttatcttgtacttttcgtcaacctcgaggtttaattaaaatttcgaaggttagtcgaaggaattacggatctagagagatcttttccctgaaaaagagacatatttatctctcagattgaacttcgataaacccatccccccccacaaacgacgactcatccttttttttttagagtactgatcgatg

SEQ ID NO: 30823 - DNA, 3000 bp, Unknown; identical to SEQ ID NO: 30822
  misc_feature (1)..( 3000): 2750-1469P.txt file - cDNA_ID_3035927; gDNA_ID_2213642; Annot_ID_181311

SEQ ID NO: 30824 - DNA, 3000 bp, Unknown; identical to SEQ ID NO: 10313
  misc_feature (1)..( 3000): 2750-1469P.txt file - cDNA_ID_3035929; gDNA_ID_2213642; Annot_ID_181310

SEQ ID NO: 30825 - DNA, 3000 bp, Unknown; identical to SEQ ID NO: 9287
  misc_feature (1)..( 3000): 2750-1469P.txt file - cDNA_ID_3035956; gDNA_ID_2213642; Annot_ID_181288

SEQ ID NO: 30826 - DNA, 3000 bp, Unknown; identical to SEQ ID NO: 9287
  misc_feature (1)..( 3000): 2750-1469P.txt file - cDNA_ID_3035956; gDNA_ID_1972053; Annot_ID_178373

SEQ ID NO: 30827 - DNA, 3003 bp, Unknown
  misc_feature (1)..( 3003): 2750-1469P.txt file - cDNA_ID_3035959; gDNA_ID_2213642; Annot_ID_132286
tgttaaactggtgggttattgtatcgaagatgatcaaaggctgcttgtatatgagtttatgcctcgaggaagtttggagaatcaccttttcagaagtaagtaaaacaactacaaccttcatattctaattacactgtagagttattttctttccttttctttgttttcgatttgggtaacaagtgtctacaatttagagatgtgtctactccatattgttaaagtgattagaatctatacagctaaaattggaacctttctgctctatatggtaaagttggtaccttttagtgctgtcttagatggtttatattgcttgactgtattgacccacgaagcaataagtaaatccctcgcattcattgtttcaagatttttcggcgtaaaaaatgtgtttaaaaagacacagtgcttttgtatgatttatcttctcagttatcattgatgcaaatctttttatttgtgaattaacttgtgcttcgtgttgaagggtccttgcctcttccatggtcaattcggatgaagattgcattaggtgctgcaaagggtctcagtttccttcacgaagaagctttaaagccggtcatttatcgagatttcaaaacctcaaatattttactggatggggtatgttttcctcttctttatatcaagggatcaacatcttatatacacgtctgtttctttgcttctaaagtcttaccatgtcccaatttcaggagtacaatgctaaattatcagattttgggcttgccaaagatgctcctgatgaaggcaaaactcatgtgtctactcgagtcatgggcacttatggttacgctgcccccgagtatgtaatgaccggtaagttttgttttttgtctttgcatttcattcactcctctacttatatcttctctgtatggttgaatatagaaaattagaaacctacacatatggttgatgcaaagtattactatgatgaaacatacatctaatttctttggtttgagattatatataactactgtcctcttattactccttaggtcacttgacatcaaaaagcgacgtttacagtttcggtgtggttcttctcgaaatgctgactggtagaagatcaatggacaaaaatcgaccaaacggtgaacacaacctcgttgaatgggcgagaccgcatctcctggacaaaagaagattctaccggttacttgatccgaggctggagggtcatttctcagttaaaggagcacaaaaagtgactcagcttgcagcacaatgccttagccgtgactccaaaataagacccaaaatgagtgaagtggtggaagtacttaagcctctcccacacctcaaggacatggctagcgcttcttactacttccagacaatgcaagctgaacgtttgaaagctggttctggttctggttctggtcgtggattcgggtcaagaaacgggcaaccagtgtttcggacattgtctagtcctcatggtcaagctggttcgtcgccttatcgtcatcagattccgtctcctaagcctaaaggtgcaactacttagattggctcgcaagtgtggacgcaagcaaacgtcttttttaaccgatgtaaaaccgacattgttaaccgatttaaagaaggaaaattaaggttgttccgaagaagatccgaatttgtgtatttactacctttgtgacctcatgtttcttcgtctgttgtaactcttgaacaaattgtctgttagggtaatattgtcattatgtattagtcgtttcgtatcgcttcaccagcatgcaaccaccacttcttcaatgtaaagatagatagatatcaagaatggtaatggaagatgtgggtgggggtgagagacattttgctttgaaattttgaaaattttcttctctttgatttttggacttatctacttgtagcttgtcgataatcgagttattaaaatataaatacgaaagaagaaaactgacaacttttcttacgtgaaacttttatactcacatacaagttatccactttcttggttaaacatgcgagccgcaaggaccaacgacttttatatacaaataatttccttataaaaaggattacagtaagatactttgcacactagcaagcttgatgattgtatatcaacatcataatttttcttattaagttatgataaaaaacattcaactataatttaaaatataatggaccgttccgaatttccataaattcggttaccacctccaccattttacatcaaacagaaaccaaaaaattagatttagatatatatatatatactagtagaagtagaaccatcttgttctcgtatattattacgaaaccctacagttaacagctgcagaataatataaataaagcgacactccacttttttctcctacattttgttgaatttgaacctttaaatcaatagtatataagaacatacaatgtaatagataacgcgtttactcaatcaaaaggaacaagtatatactactagataactcttgtttattggcgtctgacaaggctctgtagtatattcaacgatacgattatcctcttttcttcgataaaagtatattcgattctcttactacagaaacatagtttacattaatgttagtgaaaaataccatgcacggaaaatcaaagatttaattctgtggtttgtataatttgaagtgtataatgaaactattttttagcctaacccaaaaagaattaaaaagaaaaagtaattgttataaaaacgaaaagcatatttatcaaatattattattgaatattctccaagatataaacaatttgacttttcaatgaaaatgccactattgaataataaataggaaatttccgaggagtagtacaactagatgacaacttgacatgatcttcttcttacttttgtctatataacactcctgcgactttcttctcttcaacaaacttacagagagacaaatacctataataagccattcataatcttcttgcttcttgttcagaataatg

SEQ ID NO: 30828 - DNA, 3003 bp, Unknown; identical to SEQ ID NO: 30827
  misc_feature (1)..( 3003): 2750-1469P.txt file - cDNA_ID_3035959; gDNA_ID_2213642; Annot_ID_181287

SEQ ID NO: 30829 - DNA, 3003 bp, Unknown; identical to SEQ ID NO: 30827
  misc_feature (1)..( 3003): 2750-1469P.txt file - cDNA_ID_3035959; gDNA_ID_1972053; Annot_ID_178372

SEQ ID NO: 30830 - DNA, 3000 bp, Unknown; identical to SEQ ID NO: 10346
  misc_feature (1)..( 3000): 2750-1469P.txt file - cDNA_ID_3035977; gDNA_ID_2213643; Annot_ID_181364

SEQ ID NO: 30831 - DNA, 3000 bp, Unknown; identical to SEQ ID NO: 10339
  misc_feature (1)..( 3000): 2750-1469P.txt file - cDNA_ID_3036000; gDNA_ID_2213643; Annot_ID_181357

SEQ ID NO: 30832 - DNA, 3000 bp, Unknown; identical to SEQ ID NO: 10333
  misc_feature (1)..( 3000): 2750-1469P.txt file - cDNA_ID_3036011; gDNA_ID_2213643; Annot_ID_132325

SEQ ID NO: 30833 - DNA, 3000 bp, Unknown; identical to SEQ ID NO: 10341
  misc_feature (1)..( 3000): 2750-1469P.txt file - cDNA_ID_3036011; gDNA_ID_2213643; Annot_ID_181352

SEQ ID NO: 30834 - DNA, 3000 bp, Unknown; identical to SEQ ID NO: 10343
  misc_feature (1)..( 3000): 2750-1469P.txt file - cDNA_ID_3036023; gDNA_ID_2213643; Annot_ID_181347

SEQ ID NO: 30835 - DNA, 3003 bp, Unknown; identical to SEQ ID NO: 26710
  misc_feature (1)..( 3003): 2750-1469P.txt file - cDNA_ID_3036029; gDNA_ID_2213643; Annot_ID_181340

SEQ ID NO: 30836 - DNA, 3003 bp, Unknown
  misc_feature (1)..( 3003): 2750-1469P.txt file - cDNA_ID_3036031; gDNA_ID_2213643; Annot_ID_181338
tctccgaattgtacccatcggagcttcgttttctccggatcagccatacagagagagaaacagctccgattacaaccgaaactccagaaatcagagaaacggttactgaaccggtgatctgctgcttcttctcctttgcgtcgtcattgctgattacactagggtttggtttctggagttcttgagtaccttccggctttgcagcgacgaaatttggggttttgattttttcacacggcgtttgcaatgggaagccacagagatgagagtttccagcgaatgcgtttggtccttgattcaacagagatcccacctgaggtacttttccggtgagattgttgtgactaaaatctaagctgacgtgaactcgaaatcgaccgtacgacggtggaatctcgccggtgaattggttgaaagagaaattcaaggttccgacgaggcttccgagttcagtgagtgactcagggagtgaaccgttgagatgattggaggagaaatcaaggtggttgagtgacttcatggacttgatttgggccggtattgggccggagagtgagttgtgagagagatcgatgtaccggagcttggttgcttcgaagagacgaaccggtatggttttagagaaattgttgtgagctagatcaagccggtttagcgagttgagtaaaccgagttctgatggaatgtaaccggagagactttttccgaagagtacaagagttgtgactcggccgtttgtgcagacgattccggaccaatggcaaggagtcgggtcggattcagaccagtgggtcattactcgggtcgggtcgttatcgacggcggatttgagagctaggagagataaaccgtcggaattgagagaggagcaaaagctcatgcagagaaagatggaagaaacaacaagtgaaagaatcgatggtaacttcattttttgcttaggatataggaatcttgaaactttttggttgttaaagaagctacaaattacagatgattcatatagtgtgaggcaacgagaagttgcagaggaaaaacggtaaacagtgaagacgaaggagaagaataatgggagatttgaccgaggtatgattcttttatggtttcatgttagcaacgtggtgtaatgtagtcatgatcaattttttgaattcttgtccatatactatggtttgaaattttaataatatatacactacagttctaattaaaaatgtgatatattgggatttgcgttttgggtttttgacattttgtggttatttttgaaactttttgaagtttagttattgattgatgcaggtgggttgttgttacatttttaatttgtgtgtatccgttggtgatatctagggtcactggatttttatagcattaaaactatatataggtatcaaaaaaaaaagttacaacaaatttgggatacaaaaaataaacaaagtgttatcttaaatgctatagtctatagaatcttaactcgtataggacctcttcactcttgagccatgaaaaaactgtacagtcccactgggtcgataattgttttacttttacaagattcagcagtaactaaaaaaaggattaaaatatgtttaagaataattgaaaataatcgaactcgacctattgcatatgaatttgaattggatagaggatgtcatatttattcaaattaaaggagggaagagacggtagagagtggattgtgtcagagaaaaatcattaaccaaccgacaaagtaaccacacaaagatgcatttgaaaatatgccacttttggctcctctactcctagtcttaatgggcaattccgaaatatacacgaagagtcacaagtcccattgttgttgggttagcactttgtcacggcccaaattcaacttattcacaacatcaaataaatatatgcatcatatcatcacatccgacttttgttaacaattacttttttcagttaaagaactttcaagaggaaatagtagtaccttaaaatcctacaaaaccttgtcgtgcaagaactgggagggctacaaattgcggtcaatgtacgcaaacatcttaccgtttttggtacaaacactagaactccaatgcagtgagtgagatgggccaattttggcaatctcaatcaacggtccatgtggcccaataaatcactaaaaacggccgaatttttagatccatgtaacttaaataattggtggggacggaaagtcttgtcgttttcatttattcgagtgtggcactctgattcatctcaagcttattttttataaaaagagtaattttagaggctgaacaataacgaccttgaacaaaataaaataaaataagagggtgaacaacgaccagtcaaaatttgaaaatttactcaccagagtctataaaaattaaaaaggaaaggaaaaaaaaagaatgaatcatagtgaaatgaccttatttatggctccaactatagtgattagtaaccactaaaccagaaaaaaacaagtgacccattacacagggattaaaaatactaccgaataaagcccaataggcccaattcaaaagcgtctctctatcatcgtctctccaaaccccataaattggatatttcctttctctaaaaatttggctttattaacagacgcactccaaagctaacgttgctttcttcccactccaaatggctcttgtgctctcagaacacacacagatataataaactcttaacgaagaagaagactttttcttttcttgagcaagctctgagaaactcacagagagggacagagagagaaatatttcattcgctactctctttaataccgccattgatgcaacctccttcgcgttaactgtcaaaatactccccaactgacaaaaattaaattcctttttttctctctcgattttaaaagctctaaaaggaacgagttgatcaagtcggtcggttctggttatcactgaatttcattcaactcggtttattccggtttaagtgtgattttcccggctaatg

SEQ ID NO: 30837 - DNA, 2285 bp, Unknown; identical to SEQ ID NO: 10370
  misc_feature (1)..( 2285): 2750-1469P.txt file - cDNA_ID_3036051; gDNA_ID_2213644; Annot_ID_132360

SEQ ID NO: 30838 - DNA, 3003 bp, Unknown
  misc_feature (1)..( 3003): 2750-1469P.txt file - cDNA_ID_3036059; gDNA_ID_2213644; Annot_ID_181391
tcaaaacaattccatcatatttaagcaaaaaataactaattatagtatatgttttaaatgatttatactgtaatatttattattgtcatttttgtttgttacatacgtcttcgaattatcacattaaaagagaaaattattctaacgattatatattttcccaagactgcacccaatgttaaatctgatatggaaaataattttcttacaactttcagatttattttaaatataaaagttaagcaaaaactataatatatatatatttgagatttctatatgagataaagttctaaaataaattaaagtttacaaaggcagagaaatgaagattcataattaggtcaggtgctaagcacaatcctcctctaagaaaattttggtcgatacatttttagctgcagtattttatttcaccataagaattagtaacatgttggaaacaaaacgtacctgagatcaaaagaagagctagacagagaaatgttagaccatttttttcttcgatcaacaatgtctctctatatataccacattttatactattccctaatatgtaaaacgatattgccatttgtcatgtgattattattagggtgggattatctttgattatctttttgttataaagtcaatgcgacagtaatatgaaagacacaaggacgcggatacaaattataatctataagaaaagaaaaaaaattatttttaaaagggctaaaagaaaacaaggttattcaaataatattgacaaattacacttctcgacaaatttttctgtgttttttggtttctctattcgctcagattttgtgaaacgtctcttctgattttttattttttcctatcgatcggccaaaggtttttgaatagtcactttaagattcatttccaatcgaggccaaaggtttatcaagagtcgatagaatctgcggcattgacattcccccggaaacaacaatctctgcagatgaagaatgagtatacagtgttcagtatctttccacaaaataatttgaatgctatataacaaacgataaatgtatctagtatagacaattagattctgaaatctcaccaattccttcccggacagagaggtttggcctgataacgtcattactgttgacaagtagtatatctccaatgtaaaggtggttcgtgggaacgtatacacagcaaagttcctcctcggttgggtagttctgcaagaacgaatagcattattacattgggtaaaaagattacgaaattatggtaaaccatataactcgaaattgtttgtatcctcaaggagacgttctggaaagaataacaaaatccttgagcaaagtattttcactcacctggagaacaacagttgatgtaatgaagccaaatgcatattcacctacacggggatgcctgatgattgcaacttccttgaaagcttgtgtattttgatctgtgatgagaaatggataagaacaagatgagataggagatcaacttaatgttgagaagcaaaacaagatttttataagcaagctagaccaggcgatatggcagtgctgatttgcttggaggcgttgtagatgtgacgaacaaatggcatccgcttgataaaccactctcccaagttcagaaccgatgcccccaaccacgaagacatgaacaccccaaccaagaagatgaatgcaatggaagtcaaaaaaccgaaacctacaaaacaataatcaaactcattgtgggaaaccgatatcaagttgttaataggataaagaggggccattcaaattcttaccaaatatgttgattccaagtagtgcatatattggagagaagaatccatcgacaaagtgaataaaccaccatgttgtatagaaagtaactgcaataggaagtaggataacactgcaaaaagcaatggagacttaaaactaatctgtggaagttttcatcaaatgccaaaatttcaactcttccttaccagcctgtcatgaacttctttgacgcccaacccctaatgaacaagcttaaagtctgcagaaaagagctaaagcatcaggccacaatgctctataagttatacatgcttgaaaacatgaatgagcataatacaaagactcaagaatctgaatgattccaaccacaacaacttggaatgcaaattcatactctactcaatcacaactaccaaacttatctaagcaagtgttcttgtgatatactgaatctagggcaaaacaagttccaagattttgaactaaggggagacagaatcgaccaaatctatgaataactatcatccaattctactgttagtttcgcatgaatcttgaaatgagaaaacgaagaacacgtttttagatcaggtgacaaaaactagacctcgtggccggattgatgcgaagaagaagcagaggaagaagaagaaggcttcgaagaagaaccatcgtctttgtcgccgaaatcagcgacgggaatcagaagctctcgatctctttctcgattggccataacaattgtcgtgtaaagagagataaaaccctaaacctagaaactcaccgagagttcgaagattgtaaatcacaatctagaagctagttgcgaaacagaagaaccacctcgaagatcctgagatttgatgatgatgattgtgatgatgatgaatgacagatagagaagacgatgaaattgatttttgattcgatttccccaaatggcaaaagaaaagttccttacctgtaccgattgaccgtaccaactaccaaaccaacgaattgacttttacaaaacttaaaccgaaattaaagataattaaaccgagttattgaactaaaccagataatagcttaggttgaatcagttttaaaaaaatttgcgatacctaaggcccactaagtttttcacatcgtaaaaaggcctaaaataataagcccactttaatcatctcctcccgttatcagattaaaagatttgtttctccgagagcaagaaacctcagagagacgaagcacaatg

SEQ ID NO: 30839 - DNA, 3000 bp, Unknown; identical to SEQ ID NO: 21264
  misc_feature (1)..( 3000): 2750-1469P.txt file - cDNA_ID_3036063; gDNA_ID_2213644; Annot_ID_181390

SEQ ID NO: 30840 - DNA, 3003 bp, Unknown
  misc_feature (1)..( 3003): 2750-1469P.txt file - cDNA_ID_3036067; gDNA_ID_2213644; Annot_ID_181387
attctactccaagaattatttatattattatttttaattcatttttgcaaacgaaaaaaaaatccaccgtttcgccttctagtcgggattgaatgcgtcaccatgaaatcatgctttaatcatattctgcgtgagtgggaaaacaactatttataagtacatagtactactttttggattaaatatttccctccactttaaaccagaggtgcatactgcataatataggtaaccttcaaaaattgttagtattttttcttactctaacatgctcaaattacaagaaaaaattgcatatatgtatggtgatttaaagccgatcctttaaatgtttccacggttttcgttcatgagcctcattgtatatatataatatataattttagcacgttggaatgagaaagaaaattgataatggataagttttattaacataccaaaataataaacttgtttatgttacatgaagttcaaagaggtagcctctaaaatgaagaatacttaacagaataagcaaatatacatttttgttttccttatatttgattaatcccacaaagatacaaattactactattaattaagcaacttatcttagagggataagtgaaccatttgctttgaaatggaaaaactttgctttagttgatgtctatatatctatgaatttgtttccctaacatgttttttacgtcaatatttttaatctatatctgacacaatcaagtagacagttattatacctaacacattatcaggtagtctatagactctataccattttaaatgtttaacgcatgtaagttaatcacatactctatgatctggtggtttatttgttaaaagtgaatttttattctccaatgaattaatgatatcaagacagagcaacaactaattttaattagtttttttttggtataagaagagtcatataaacttttgagtcatttaaacgtaattagctttgttaaatgaaattcctttttaagtgggtacgtataaaaccctacgcaacgcatgttgatccatttaagtcaccatcaacaaaaagaattatataaatcattggttggatgaagaaattattatatgaacaaaaacaggacaaatatcttaacaaaattaaattctctgaacttatcgtataataaattagtaatttaaatcacatcaaactgaactaaatatatggaattaaaagggtttaaaatacatttgataatttgatgtaagaaatatgcatagatgcaaaatacttgttatatatgtgggaaatatcaaaaatttatattcgaatatgttatacaccgtacaaaaaagtcttcgaatatataacccgggtcaccttttctcttatggcaaaaaatataaccccttttctgtttctaattttaaaattttgcattcttgattctgagctcatagttcgatgaaatataatctagagaaaaaaaaaaaacataattcgattaaataacaaaagcacctttccctccctactttatgcataaagctaaagcatggacaaaaatgaagtatagaaaaatgaattactgattataacagtctttcttaattaatctagtaaatatttatacatagtactgtattacataaacttacacacttaggtttatctgtatcatggttagattatcgtaaagactaaagactataatattgtgttcatgaattagaaaacttattcctccgttcatccaaaattagttaatcgttatatcgaatatggtccatatgggcatccatattttcagaagaaaagaaaaaaagaaagtaaaagcatgttaggggaaaaaataaaaaataaaaacagagaaaaaaaatcgagagagggagagagaatggtgttaaatacataaaaaacccatcattgacatgtatcgattgctcaatttgtttgtctctctcttcttctttccttttctccaaaaactagagcctaaactaaagcatcgagaaacaacaaatcttaaaatcttttcatattctcggttagtagaaactaggaaaagagatgaatagaggagtgttggagagttcgccggttcaacatctcacggcggctggaaaccctaattggtggaataatgtcagccgcggcttgaggccaccaacgccgttgatgagtcacgagccgccgtctaccaccgcttttattccaagtctcttgccaaacttcttctcttctccgacttcctcttcatcttcttcaccttctttccctcctcctaatagtaaccctaacttctcttcttggcttgaaatgagtgatctgcctcttgatcagccatggagccttagtcaactcctcttgtaactccctttctctctctctctctctctctctctctctctctctctctctctctctctctctctatctatcgttcggatgttttctatgtataaacggttttgagttcttggatttgttttgtaatctaattcgatcttataaagtttctttctcttttttttttctttctcatgtatacataatctacttatattatttcatataaacaaacatgatctaatatggattgtctttgaatgaaggggtggattgatgatgggagaggaagagaaaatggagatgatgaaccatcatcatcatcaaaatcaacaccaaagttaccaagcgaagaggatacaaaattgggaagaacaagttttgaggcaccaagcttccatgaaacaagagagtagtaataataatagttatggaataatgtcctcaccaaactcacctccaaacaaatcttgtgctacaattatcaacaccaatgaagacaacaacaataacattcacagtggtcttaacttgtccgaggtgggtcaaaatagtgaattattcagatcaagatataatctttaccaaatattaattaacatctccatattttttctttatcaatgaatatatctgaattttgtttctgtctatgtgtgttcatgaagtgtaatagctcagagatg

SEQ ID NO: 30841 - DNA, 3003 bp, Unknown
  misc_feature (1)..( 3003): 2750-1469P.txt file - cDNA_ID_3036077; gDNA_ID_2213644; Annot_ID_181383
agaaaagatgtggcgaagagaagtgaaaagggcagccacgttaaggcatttaatttgaataataataagactaaaacaaaaaaaaacgtaaagccttttgaggttatgaatgcgaaaatggtccctcacgagtcacgacctaatctcattgaaatttatttagcattatattgcgtcgtgtctcattacccttttttgcttctcattattacttaattattattattctctatatatatttctccactaacctgtattagttaataacctttcattgcttttgtacggtagatcataatatgctaagatgtttcaatgattgaaaactcaacaaagaagacatagaaaaccaatataactaactagataaacatataatacaagtagttatttctaatatttgagtgactgcaaccgatatacagaagcgttctaaattttattaagacaatcatgtttgaaatgatgtcaataagaatcatgattcaaactttacaacgtaacaatattgcatgcaaaaaacaatttagttacgaatgaaccatatagtctcgaatattagtttatgttattataaattatttagaccaatattggttatatttattacataaattcactagaagtctgaaactgattatttatttttatagtgtgtttttatctaatttttatttttagtgttggttatatacaatataatttatatagagaaaaattggtaccggtggaaagtccaccatcgataaaaactgtctgatgtccatccaaaaactaagccgacatagagttgtatttggtcggtatattagacgtacatgtatatttatctttccataaggtttcttttgaatataaagttgtgtatccaaatgcagattcttttatgctttatcttaagtcatcttcgcattttattttggtcaaaagaaagttagaagataagagaaagtttttgggtcacacatacgaaagaaacgtaaatggcttctcatgcctaatagcgctttctacgcttgtggggtatttgattggatatacgtcacaactcataatacgtagttgtttactagcttatctgtacatggactccacttctatatgatatatatagaaatgccactaatatacgtacgtatccacaataagagaattataatgaatgtgagattggtaagtagtatcacataatttaagggtgtgaaggttaattaacggtaggttgttctatattatatatggttactcacgtaaagtttttaacaaaatatacaaattttaaaatgtattacttaaccaatctctgttctcatgagagtagtttcgcttattcaaactgctaccaaatattatctagtagccttttctaattggtatacaaatacaaattacacgatgtgatagacactttattgtttgtgcatactacctttagagtaggcactagccaatcatgataaaaatggcaaatctaaaaaatattaagcaacatggtaaatataaaagatttaggtgacaaaactgaaaacagaagaaaaaacttacgttttaacaagtgttattaaatgctggttttggactaaaagaggatatgggtttaatgaaaaaacttaatttttaggaaaaaaaaaaaggtggaatttgagtagaatacaacaaaaagtcttagagtttgattggtaacacaaaactttagctgttacggaataatgtaaaactgtacaaaagagctgtaaaaaaaaattgtatcaaaaagctgagagtaaagcttttcgtaacgcttttgataaagtttttgtaaatggtaattgtcaaagctgtacaaactgtactgttttgataatgggttaccattcaaagctttaaattttaaatcgcatgataacctgtaaataattattttgaatatatgttagactttattattattggttaactatgttctcttgattgaaaaaaaaatagatttgtaactcattgctgttttttttttttaagaaacaaatagagaactatataaaaatataagaaaacgttggttttgtccaagaaaaaaattgttgggttttggtgggtggcaatagaagatgccatgtacatagtgggaacaagtagccttacgcccataacatgtcggaacatcaccaataaatttctatgttcaaaaatatcattgtaacaaaaagtttttcgaatttcttctcccaacccaccataaaaacccaatcaaatgcatgtgaatgttcttgttcatttgatgaggtcaagatcaagaagccatgtaatctagaatacaacagtacacatgtgacttgttacagttttgaactctcgttcacagttttgcaagttcttaccaaagctatagatgcctctcatcccatgagccttcatcacctgatgggcttattaggtttacaggcttgactaaactctagagcctatacgtatagaagaggcctgactaaacgaagataatgaaataagcccacaaggcccaaataattaatatcttttattctttttggcaaaatgaaaaatctgacttatgggctttttaacatttacacatttaacttcatgacccaatgaagacccgacccgtctggtaatgacccgatccaacacatgagtaaaccttcactgaaacctcgaaactcctccagaagcctaaaaccttcaccaccaaatcggtgcctccttgaatagtcgccgccgtcgtctatcatcgccgcttgtgactccggtgagtattcttctgctctattgagtttattttggttgaagctctatgagatgtacgtgggtctggttttcatttctgtttcttaatcgctcgaattagcatttgatagctactgagattttgagttttctgatctgccgaataatcttcgccattgtagtgtagatgttgtgtgccttttgattagattacactgagaaattggattgttttcgtgtttgtagatgagaagctaggttattgaatcagagattatg

SEQ ID NO: 30842 - DNA, 3000 bp, Unknown; identical to SEQ ID NO: 10355
  misc_feature (1)..( 3000): 2750-1469P.txt file - cDNA_ID_3036081; gDNA_ID_2213644; Annot_ID_132345

SEQ ID NO: 30843 - DNA, 3000 bp, Unknown; identical to SEQ ID NO: 10361
  misc_feature (1)..( 3000): 2750-1469P.txt file - cDNA_ID_3036081; gDNA_ID_2213644; Annot_ID_181382

SEQ ID NO: 30844 - DNA, 3003 bp, Unknown; identical to SEQ ID NO: 25306
  misc_feature (1)..( 3003): 2750-1469P.txt file - cDNA_ID_3036085; gDNA_ID_2213644; Annot_ID_181380

SEQ ID NO: 30845 - DNA, 3000 bp, Unknown; identical to SEQ ID NO: 10352
  misc_feature (1)..( 3000): 2750-1469P.txt file - cDNA_ID_3036089; gDNA_ID_2213644; Annot_ID_132341

SEQ ID NO: 30846 - DNA, 1737 bp, Unknown; identical to SEQ ID NO: 484
  misc_feature (1)..( 1737): 2750-1469P.txt file - cDNA_ID_3036089; gDNA_ID_1591388; Annot_ID_150910

SEQ ID NO: 30847 - DNA, 3000 bp, Unknown; identical to SEQ ID NO: 10364
  misc_feature (1)..( 3000): 2750-1469P.txt file - cDNA_ID_3036089; gDNA_ID_2213644; Annot_ID_181378

SEQ ID NO: 30848 - DNA, 3000 bp, Unknown; identical to SEQ ID NO: 10350
  misc_feature (1)..( 3000): 2750-1469P.txt file - cDNA_ID_3036093; gDNA_ID_2213644; Annot_ID_181373

SEQ ID NO: 30849 - DNA, 3000 bp, Unknown
  misc_feature (1)..( 3000): 2750-1469P.txt file - cDNA_ID_3036118; gDNA_ID_2213645; Annot_ID_181418
ttttgggattttttaaaaaaacattattttattattaaatcattgccaacaacttcttttttcagtattgttttttattatttgaccatacttaccatgttttcatacacctggagtcgaggctaaaattttaaattttagaagtaattactctaaataattgaaaattattttaatgctcttgtcctaaataggcaattatcatttgccatgcattacaatgtcaattagtatcttattaccagctcgagtcgtggccgtcttctgattatagagtgccccatttattattttgtcggtccactacccttgtattatttttgctgccagaggctgcaggccttgcatttttaattctctcttgagaaagagacttatcgattggcaaaatgtcgtcactttaaattgtatgcaaagtaacctatcttgttagtaaaaaatgcaacaaatttttgtttatacatatgatagacgataatgttttggatttcacaaaatgaaagagaaaagaaatggaggcacacgacccccttagggtttctagattttgaagggattttttggagatgaatcgaagaaccggtgtttaaaattaaaatgaatgataaactcatgaacactagattttttttggtttctctttgttgaagtaaaaagtttgaagtttttagggaactttctttttatttttaacatgttacctagtggccaattagagtcacattgatcgagcttaaatttggtgggatgtcaacaaaggtaaaagcaccagtgcaccactagcctacttgttaaagcaccattagcctccttgtttcttccaagatttttagggaattcatttttcttcaatttgtttcatagagtcaaagtttgtgatagtcgacgaaaaaaatctttgtaaaaagatccaaaaaacgaatttggcgtatatttttgaagatgatatacaatcaaagactcaaagtaaggaaggtaaaaattgtagaaaaccaagatgataataatatcttagatgtgtagaggatcaaaatgatatcacgaagatgtaaatatttgttttgtatttatgtagtttaaaatgatataactatggattttatgaatttgggcttttaaagttttgaacccaacgattaaaatgaaaatccataaaatctaaaacacatacaaaaacaatatccgcaatgatgagaacacgtgtcaacgcactgacgaaacatagtcgctgagtccacgtcagcatcttcgccgtctcttccaaccccaacgacggtttaaaaaaaaaaaaaacatttcctctcaatttttttttcaatcaaacaaaaaaaaatcatcgctcccaattttacattcttcttctcgccaaaccctaattgtttcgatttctgctacattcttccggaaacttgttctatctctgacggatctcgaatcggtattctcagctgctgaaatctccggtgagcttttccatactgtggtcaacttctagggtttcgattatcgccatttaatgatcgttttatttcatttcgatccctttcttttgattgatttttaggctaaaaatgtcaaattgatttgggttttgtgtgttatgtggtcaagtttatagctttttttttcccggtatcgtttccaagaaaatagaggaatttgagctaaattactctgcaactttgtttcagttttcatgtgtgtttcgatattggttcgatattggttaagtagagatagtaaaggtgttgtctttagggaatgtttcggatctaatttgctagaaactagaaagtgttgttagattgtctaagaacttggaaaaatcttgatgattgctagcggaatgcagagaacgttgttgtgtttttgtatcagaaggttaagtagagatagtaaaggtgttgtctttgggaaatgtttccgatctaatttgcaacaaactagaaagtgttgttagattgtctaagaacttgggaatcttgatgattgctagcggaatgcagagaacgttgttgtgtttttgtatcagaaggttaagtagagatagtaaaggtgttgtctttggagaatgttttggatctaatttgcaacaaactagaaagtgttgttagattgtctaagaacttgggaatcttgatgattgctagcggaatgcagagaacgttgttgtgtttttgtatcagaaggttaagtagagatagtaaaggtgttgtctttggagaatgttttggatctaatttgcaacaaactagaaagtgttgttagattgtctaagaacttgggaatcttgatgattgctagcggaatgcagagaacgttgttgtgtttttgtatcagaaggttaagtagagatagtaaaggtgttgtctttggagaatgttttggatctaatttgcaacaaactcgaaactgttgttagattgtctaagaacttgggaatcttgatgattgctagcggaatgcagagaacgttgttgtgtttttgtattgtgttgtcaatttgattggtcaatcttgtagttttttccgatatgggttcgaagaaaagaagggaatttgagctaaattactgcaactctgtttaagttttcgatattgattcacaacggtcaagtagagagatagtaaaggtggtgtctttggggaatgtttcggatgtaatttgctaagaaaatcagaaggtgttgtttgattgtttaaaaacttgggattcttgatggttgccagcggaatgcagagaatgttgtcgtgttgttttttgttgtgtggtcaatttgattggtttttgtgttgtttggtcatgtttatagcttcctcctatatcgggaaaagaggagaatttgagctaaactactgcaacttgtgtcagttttcatgtgtgtttcgatattggttctgtatggttaagtagagattgtaaaggtggttgtttttggggaatttttcggatctaaattccaagaaaacttgggaatcttgatgattggtaggggaatg

SEQ ID NO: 30850 - DNA, 3003 bp, Unknown; identical to SEQ ID NO: 25310
  misc_feature (1)..( 3003): 2750-1469P.txt file - cDNA_ID_3036122; gDNA_ID_2213645; Annot_ID_181417

SEQ ID NO: 30851 - DNA, 3000 bp, Unknown; identical to SEQ ID NO: 10385
  misc_feature (1)..( 3000): 2750-1469P.txt file - cDNA_ID_3036175; gDNA_ID_2213646; Annot_ID_132388

SEQ ID NO: 30852 - DNA, 3003 bp, Unknown; identical to SEQ ID NO: 25314
  misc_feature (1)..( 3003): 2750-1469P.txt file - cDNA_ID_3036185; gDNA_ID_2213646; Annot_ID_181449

SEQ ID NO: 30853 - DNA, 3003 bp, Unknown
  misc_feature (1)..( 3003): 2750-1469P.txt file - cDNA_ID_3036189; gDNA_ID_2213646; Annot_ID_181448
tcggtttaagaagtgtttacgtggttatcaacattaacttttgaattgaattatacgaaacggcaaaaagattatcaaaagtgttgacttgtgagctaccgtttttgccccttaaaagtctcaaattccaaggcgataaatggtcaagcaccctccacgctcctcctgtcttttattgccacgtgtctaccaccgttcccgtctgaatttgtcagcatctgtatgccacgcggcggccagtttccccgacgttaatttctccggtaattatcacacgtgtcgtgtagtcaatggatattaacttcgagcttattttatggagtttttaattgttttcaattagcgtttttttctcattggtgggtccacagattaatggaactaacgaaatataattggtgaatgaaaatgtctgtttcattgaattcatgcgtttctattaaagaagtcacagtttttaaaatgggttcacgtggtcgagtacttagctcgtgagccggcttcagtgtccatagtgtattactcagctttgtaacaacattattagagagaataattcactttcattgtataaatgacaaaaacaattaataccaacttgttttgataattacaaagtaacaaaatagaagcattcagagttttgaagttatatattcatttgaaatgtcttgaaaaaagttatatgtctttctttgacaaaacaaaattcagtaaatttcaatcaattatatatttttaaaagtactatacgcacacaattctttatacaacgacaaaaagaaattttacatctaaaaatttcgtatatagataaattaacacgtttgtaaaatattgaataaatattattttgtcactatatacacagtaatcacatgtaataaattaaaatcaatcgatatgtttcgttagatctctcaatagataattattgatataaactagtacgaaaataacataacatacacagttacacatacataaacatataatatttgtaccaaaattattaagaaaaagaaatttaaagctctcaatcaagagattttgtatgatatgaaatattcttctgatttttgaaccattttgcattagagaaaagtaaataaaactaaagtggtcctggaaacataaaaaaataaaataaaaatagagaaagaaagagatgctattcctggagactgagagtacagtggaggtccatgacatctcgtaacacccaacaacactcaacaacttgccaaattagctttcactagctgttgttatacattcatttcttaatttaaattggaatatcataaataacaccttataacattataaccaaagcataaactacatgcatatattcttagaagacattaactttttaattaatttccgattatagtgtgattacgctccttgcaaatactctacaagctatgaaagtaaaaaggtattggctactttcaccgccgctactatatctcgtgagtcgtgagtgaagccaagccaggctattattaagttgtgtactactcattccgtaaaaaccaaactgaaacagaactattccttttatagttaaacaccgaatttaattctaaactcaatcgtattaaatgagaaacgtaccattactttaaaactcaaactgaaactaaactaaaaatccggtaaaagttcttttactcatatcattggaaatagtttttgaagcaaagtaaaaaacactagaatagtgtaactagaaggaactactaatataaattttggttgctggtgagattctttttcctccttccccagcggacgtctccgtctcttcttctgcttctaacttgctccaaattttcatttcaatttttttgataggacttaaaaattccaagctcgcttatgagagtaatggcgtagcaaaatctttatctaactcttggctcttgtctttttttgtttgtttctcaacctacgccggatcttgcttcttcgaacttctccgacgcatcttcttcagattccgcagaagtttgcgtcgttttcttgaatccactcaaaattttattggaagtttgtgttgtttttactagctctgaatctttagagggctcaaaaattcgtcgagaaaaccagtctttggaagtgtagcattttggattcgcttgtgacttgaatcttgaatattaggtgaaaccgccttggatcttctcgttgatctttgtcgtggacatttttttttgtaaagcttagtagattctctaatatttaattagagagtatctgttcgtgttattctttattgttagataatgattaatcactgcacacaatcttattgaattttcctgttgcttttctcggcttgaattctgaagaagtagttagagagatggctttgctatatactcttgctagatctgtttgatttcttagattcctgatttaacgatttccttctaatttgattatccaaaatctagaaatggtaaaagtttcttgagttaaggttcatttattttacatttgactgtagtttttttgtgtgatttagatgcagacaggaccatgttgtgttttggattacttgagagatttactatctcaatagttcatttcatcgtacataatttttttttgtgaacttgtttaataggaatgatgatgaactattcttgttttgtgtgtatagtttgaagatggtaactttatgaattaattatttattacttattagattctgcagttgcgtcttcttgattcctaataaacaatgttaaagaacacacttttcatgcttcctatcattagaagtgtcaaagatgctgctcttttttaatcatttttcttcttacctgctgtattaacaatttacgtatatccaggtttctatttggtcaacaacatcagaaacatgtgtgctcagatgttgagctctttagattcaattgttgtgaacattgtcaaggagaatagtgattattgaaggatgcaagatttttatattcagctctaatg

SEQ ID NO: 30854 - DNA, 3000 bp, Unknown; identical to SEQ ID NO: 10385
  misc_feature (1)..( 3000): 2750-1469P.txt file - cDNA_ID_3036193; gDNA_ID_2213646; Annot_ID_181446

SEQ ID NO: 30855 - DNA, 3000 bp, Unknown; identical to SEQ ID NO: 10382
  misc_feature (1)..( 3000): 2750-1469P.txt file - cDNA_ID_3036204; gDNA_ID_2213646; Annot_ID_181440

SEQ ID NO: 30856 - DNA, 3003 bp, Unknown
  misc_feature (1)..( 3003): 2750-1469P.txt file - cDNA_ID_3036229; gDNA_ID_2213647; Annot_ID_132399
tcactactttaggcccaataatccagaaccgtttatttattaggcccagtacagttgatgcgagaggacaaacaagaagaaacgtcgtttaatcagaggtcccctttgcatctttttttccggcgagttttcaattttgtaaagttctaagctttggtatgtttgtatcgatatcactattataattcgatgattgtagaatttatgatcggaatcttttattctgtggaattccggtgagtggtattggaacaggtttcctaggatcttaatgggcttgtttcaaaaggtgtgatattgaaacttggagatggttcttcgtatttctaggtttcttttcttctgctcagattcgaaattggagtcttaggttttcttaaaaaagttgaagttatctgatattatattcttaagcttcatttattcatatagatagatagagagagagagtgtgtgtgtgatcaagcgtagagctcaatgccccaaaacttggctgtttggtgcgtgcggtaattcctctccatgcttttgatcacttccatgtcctctttcgatagttggaagtcgaaaacctgaaaattctcttccaatctttcaggcttcgatgtctttggtatcaccaccgtgttcctctgaattccccacctcaggacaatctgtgccactgtctgtttgtacttctcggccacatcctatgaattcagacagacaaaaggtttaattatttaactgtttcagtccaaacttttaaggtttagaggatggggcttactttgagaactgggtcatccagacatgacacggtgccaaaccattcggcattggctgtggcacctcccagaggagtatgagcagtgacacagataccatgtttctggcagaatttgactagagaatcgcgttggaagtaaggatgtgtctcgatctgattcacagcaggtttgatcttggagtaagccaagcaatctctcgttagaaagacatcatagttactgcaaaaaacctaatggtcaaataattcatatattggcgactaaacaagagaacttgtaatgatagtgagagaagttgaacctgattccaatgctgcggactaaacccatagaaacaagcttttccatgtcgtgccatgtagtttccagagagattgttgtatctatgtccaataccccatcatcccccaaagcactatcggttgttcctattcctgcacaaggcttacatgttacagcttattactctgtgtgccaattgctagagacttgagaaaacttaattttccagccagtaacaaggctgaaatgcaatggtctctactcgaaactgataatattcatgaacaaggctgaagcctaacccgtgtgttttgtagctatgggtatatgaacgaggaaaaggtcgaggtaatcaagttgaagtttcttgagactgtctttgcatgcctcaataacatggccatggtctgaactccatagctgcaaaaccaagacagagagcattcgatctgaaatgaactgatatcaaaggtatgtagtagtttaacttaaagccgtttggaccttagtcgtaatgaagagatcctccctcttgacaagacctgtcgtgaatgcttctgtaagagcctcaccaacttcagcttcgttcttataattagctgaaccaagtaaccccaaaagatactcataaatcaggatacagaacaaagcaactcactcacatgcaaagaaacaaaaacaattgtctgtgatacagcaaagacttaagatcattctacgattccaaatttccaaatacttaaaaacccaaatcttaagacataatttccaagtaagattccaactttcaacaaattaaaacaaaacctaatattttattcacatatcctgacaaacccgaagcaacaaagatcagaaagaaaaggttttaagcagtgttaagttataccagcacagtcgagatgacgataaccgatcttgatggcatcgatgataaggtctcgaagctcttctttctccattctccaaactcctaagccgatgatcggcattttgaagccactgttcagtgtaatctccatttcttcttcttgcttctctcctcaatccgtgattgggtagatatctgctcagaattgagagtttcccagtatggtaagttggtaacgcacacgtcaatataaagtggtcatgattcctcactattcgaggcccaatgggctagtaccgttttttgtgaagcccaaactgttttacaaagacatgaatcaatacgcaccgtatgggtatatatatatacaagcaacgttatcacaggtcctcaaagtttgcatctttacttgggttgtgtctggaatcaattacttcctaaaggtaattttattggtcgggcagctcaatcggtggtttctgagttcttattcttctctgataatctcaagacgagcttttaattttgtaaagtttttagctttggtattgtttgtatcgatcccactctcaacttttgatcggaatcttctgttctggggatttccggtgaattgtttaggaataggtttccaaggatcttacttgggtttgtttcaaaaggtgggattttgcaagttgtagatggttcttcgattttgtaggtttctattcttctgctgagattcgaaattgaggtcttaggtttttgataatagcttgtttagttatctgttaaagtcactaactttgatgttccttccggtcggaattgttggccacaattgattattgaaacccttaaattaaagagtgccctctttttctcttttatgatttggatctcttgtaattgacttgtgtgaggtttctttttctgtaggttgccatttgttaacttactctgttagtctactaccaccaataactatggtaagtgtattcaaagctttcctttttaaccgttagtcttcactctagcttttatatctcgcacccttggtttgtttgtctaaacctttggaatttaaactcgatg

SEQ ID NO: 30857 - DNA, 3003 bp, Unknown; identical to SEQ ID NO: 26717
  misc_feature (1)..( 3003): 2750-1469P.txt file - cDNA_ID_3036249; gDNA_ID_2213647; Annot_ID_181501

SEQ ID NO: 30858 - DNA, 3003 bp, Unknown
  misc_feature (1)..( 3003): 2750-1469P.txt file - cDNA_ID_3036252; gDNA_ID_2213647; Annot_ID_181500
aaacgtactgatgatcgtgcagaaatgtaaatgggggcaacaatatctctcgattctacttcaggtttgttgttttatacgacgcgcaagagtttacggttttggtttttgataccagcatcacaacgaagtagatttgatagagatagtcgaaacgtgtgaccgtgtccgtgacgtacacatctctctatataattaatacacacgtgtccgagaatgttacgactcaaccgtgttcgagggaagaaaaaaaatatatatatctttttagggagcgagtccatggagtatcgaaccctgctcttcagagccaaaagaatagtgtctgaaccactaggctgtgagtaactttttgcaatttaaaaatcaactctttgcttagatctgatctcttcgaccatcggaagttgaaaccctagtttctttgcgagggtaaacccagaatacatctaagagccaaggaaggtaatgtattcatttttcaacttatcttgtttgtatttggaagaaaagtgagagttctagtcttctagatgttttatattgttcttcatttactcaattttttcacgcagtgcaaacattattctcaagatgacacagagaacttcgagtcagatgagtacagagaaaaccaagaaagtagcagagttaaaccagactcaccggttaactatcaaacctacttgcagtattgtttgtttgaaaagctgcatgcgatcattcatcttaattgttcggtttcttactcctctgcaaatcatacttattaccataacgtgatctagaagtttcaacaagaggctgatgcatagaaagctgatgaagaagctgaaactgcgggtaatgtaagaagtcactgctttgctcattttatcatatgctttagtgatgaacctcctttttgtaaaatcatatttgtttgtccggttctgtttgtgcatgtatattcagcaactacgatttgtcgatttaacctgaaaatttgattttttggcctggttttgtttcaaccaactggattagtttactcaaaattcatttcagaaaatgatcatttaaatgttgtggttcttgcaggcgaaatgcgaggaaacgcaggtgcgaggtgtgttgctcaagtagaaaccgagaacggtccaagatcagaccgtacagagttccaacggtggattatttagcaagacaaattctgggcttctttttgattatttagcaagacaaattctgattttcaagacttgatctagaatgtaattactattttttgtccaactggatgcattttgtgggttacattattgtattgaaataaaatatagtgtggttatgttgaaaaatgattagagcaatgattgattaaaaattctactaccagaacgaacgtactaaccaatcataacacaactgatcattacgaagtctaaaccgaaagtcaatatttcgtgctgttcagattcaattaatgaaacttgtctaattttcttttgtcaaaattcactatctgttgatttctgtaatataaaaatggatatatattgtgaaagtaaaacaaattaagtaataaatatattcgaactagaaatgggaaggcctaacgaccgttgaccctccctttaattgctccgtatttaattgatttttcttctaatcttgttatcatcctccgctatccgccacgtgttgtatgggtcccacggtacgggcaatgagagaaactacactttgctccctattttaattaataattcacattttgctacacaacatcttctaattgtcaaaactcaaaactaacaatcatggtcatttaaaacaagctatatacatttttcaaatctgtatttcaaaaaatcaaataaaaatcatcttaagtcactaacctatgtgattaatcaaagtggagtaaaattttccgaaataacatttgcaaaaaattgttgaaatctaaattgacaatagttataataaaatatccaaaattaagtggggtcatattgtaaagaatatttcattttccacctcctgttttgacgtttctcttcttttttttccaacaaaaaaaacaaaagcaattaaatagtgtttgtcgtttagttggcggaattctctcagttgaattttgttataaaaatcttacaggtatacaggtctactgtccatagatccgttaaaagttttacctacggccattaatgaccgtccgatcttcctttgttgatgatgacgaggaccaactatctctgcactttctcggtttctccttatttaactacttttaatattactccaaattcacaccccataattatgcttctttttgcatatttgatcaaaaactagttctagtgacagaattaacctcaatttccgtaaaccaagttttaatatatatcaaatgcaatactcgatatcacacattattcactaaatgtgggagactttcatattttttgttttgtcacacactataatatgaagaatgaaagtaacatgatatttttgttctaggtgtaatttaatttccaaaacattaaaaattcctgacacaaaatactgtaccaccgtcaatttggggggtagattgaaagaaaataaagtgtggggctcacagataaaaacgaatgtaacagttggggtctcattaaatagcggtgcaaatacaaacttctctataacaaaaatctactactattaaaaaataattaaattcgagaggcagtttaggtgagaagaaactgagaaagttcggtccgaattctaatcccacttttgtctctcaatttgtttcccctttctctctctctctctccttcaaatttttttagcgatttttctgggtttcatgtaaatgtgagaagtagatagattctcaacaagaaaaaaaggttttttttttttttttttttggattcgtggatcagccatcttctcgaaagatttgggaaagatccaaagaatcacaatattttttcgatatttagtcgaaaggaatttaacatg

SEQ ID NO: 30859 - DNA, 3000 bp, Unknown; identical to SEQ ID NO: 10426
  misc_feature (1)..( 3000): 2750-1469P.txt file - cDNA_ID_3036259; gDNA_ID_2213647; Annot_ID_132421

SEQ ID NO: 30860 - DNA, 3000 bp, Unknown; identical to SEQ ID NO: 10401
  misc_feature (1)..( 3000): 2750-1469P.txt file - cDNA_ID_3036259; gDNA_ID_2213647; Annot_ID_181497

SEQ ID NO: 30861 - DNA, 3000 bp, Unknown
  misc_feature (1)..( 3000): 2750-1469P.txt file - cDNA_ID_3036263; gDNA_ID_2213647; Annot_ID_132420
gtttctattttgggtaatctcgacttggtttgcaagtcccttggccataatatcggatctgtttaatgttagttatgtagatattgcccgattcaatttctatttttagtgcctttgagaagatttttcattttggattttcttagtgaagaatagtcatcacagttcactcacctacatgttagtcagcaatggattactggatttgattctctctttattttcattctactttgaacttcatttatcttggccatggccagtttaagttattgtgtagattaatggtaagctcttttttttagtgttattgttgaggttatagtcataattgattctgattgagttcttaaaattgtgtttttttttgttggaaggttttgaggtggttttatgcgccaaaacatctaaccggagtgtcgttgtacggtgcttagtagttttcaataacacgcttcagttatggggaatgcttgttgtgttgctactcgagacaaaatggttgtgcctaatacatcagcagtcgagaattttcaaagaaacaatgtgaggtattctcctaactggagcttccgatgggataatagaggaggacgcgtggcaggggaagagacctctgttagtttgttatctgatcggattagtcgtaacgatgtctctgatgtcaaatctgaaactgctcttgtatcatcacaaggttctcctttggacaattttcagacgcagtcatggcagaaatctcctgcttctggtaaattcctttattgctgcttacaggcaatacctctttgatttgtcaaaaaatgtagacttgatgggaaaatgtaggcaccttctttttgaccaacccgcttagaatttaggattacttttctacagagactgttaatgagtgaaaatgacattgatatgtttgttgacataaactgttctcttgtttgtttcttgacttgcttttattgttaaactatgacttttccatgttgtgatatcacgttattgttgtggcagatcaatcattttcaagaattgcctctattgactctgtctctgaacaggtaaatacttaaaagctttgtttcactgctagctatatatttgttatgtatctctgttaatatgactcctatgttactgttttagatcacccaaaaaacaaatgattcaaccgaccctacttattatccatctcctgcaaaactgtctctttcattggcttctcaaccatcatccttctcagtgtcaccactgtcaagtcagtcccacttgccaatgccacctgcaagttcatcccaattaaagctgacaccgccccctcgtctatcaaagcaagtctcatatggtcaaatctttggattcacctcaccgagcagaagctcagcaactgaagagaggctggggaatgaatctcagtctgatggttggtccatgcaagctttttctgaaatgatggcgtattctcgcagagagtcttgctcttacgataacgagtgctttgggcttcgtcgtgacaagatagacaatcttggaagtagaaagtccaatgatcagcaaaactgtggtgcttgctcgagatccttgtctgagaaatctttgttgagtagccaaaaaatctttgccactaacgagctctccgtagctgcgattctagcatgtgggcacgtctatcattcagagtgtttagagcagatgacacctgaaatcgacaaattcgatccttcttgtcccatctgcacactgggtgagaagaaaacattcaaactgtcggaaaaagcattaaaggcagatttggaaatgaaagctagacacaacaagagactaagaaaccgcgttgtggacagcgatgaatttgtcaagtttaataacaaccacgaagcggcagtaggatacaaaggtaaaaccccaaagctgatatcaagttcaagcttgagaagctattccccaaagcctttccttgctagacacttctctttcgggtccagaagtaatagtgttaaatccccaaaagagattcattccccgagctctcttagaaagaaaggcttcttttggaccaaatctagcaaaatttgaaactgtaagctcctctctctctcatgaatctgaactcaaaataacgagtcactctataattgttgaatcatgtttcagaatctggatgctgtgtctcttcttagttcgtaagctagggccgaagtcaacgtaacgttttacttatcaaaggtacacacttgtttgtgtatgtattacagaaaagtttctcactagtctcccattatttttttgtttgtgcattcccaattacacttgtaaatatataattataacaatataaggtaaaaatgatctggctgtgcaccagtaggtgtgaattgggttaatcagatcgagggatttatatttatatgttttggtttatttggtgtgggatcgtattatacgatttttatatacttctacaaaccatttctaaacaaatgtttcagttcaaaaccaatctaaacagatttgtattatgatccaacgttaacttccatggttcgtttgtttagtgctttatgaaattagttaccaacacaaacttgcacttaccaatcagaatacgtcaagaatttaaaactcggaacaccgaccttctttagcggttctaagccctgatcaaatccacatgtgtccatggaacatagaaagcaccgtacttaaaagataacgttatctaccgaatctatcaaaaaaggcaaaacgttattactatgtcggattcgtgacgtacacatttcaaagtacacacatgacacatggaactctaattctatccgtgcgtggcaaacatttcacattaaatacgccacgtatcatatccatgcagattaacatgtctaatatatatgcatgcctacttgaatcaatcccaaaccaagttttcttcaaagctgtatttgaaagggtatatatctcacacacaaaacagatcagaagctaaaaggtaataatataatg

SEQ ID NO: 30862 - DNA, 3000 bp, Unknown; identical to SEQ ID NO: 30861
  misc_feature (1)..( 3000): 2750-1469P.txt file - cDNA_ID_3036263; gDNA_ID_2213647; Annot_ID_181496

SEQ ID NO: 30863 - DNA, 3003 bp, Unknown; identical to SEQ ID NO: 26719
  misc_feature (1)..( 3003): 2750-1469P.txt file - cDNA_ID_3036266; gDNA_ID_2213647; Annot_ID_181494

SEQ ID NO: 30864 - DNA, 3000 bp, Unknown; identical to SEQ ID NO: 10403
  misc_feature (1)..( 3000): 2750-1469P.txt file - cDNA_ID_3036280; gDNA_ID_2213647; Annot_ID_181490

SEQ ID NO: 30865 - DNA, 3000 bp, Unknown; identical to SEQ ID NO: 10423
  misc_feature (1)..( 3000): 2750-1469P.txt file - cDNA_ID_3036284; gDNA_ID_2213647; Annot_ID_181489

SEQ ID NO: 30866 - DNA, 3003 bp, Unknown; identical to SEQ ID NO: 26722
  misc_feature (1)..( 3003): 2750-1469P.txt file - cDNA_ID_3036288; gDNA_ID_2213647; Annot_ID_181486

SEQ ID NO: 30867 - DNA, 3003 bp, Unknown; identical to SEQ ID NO: 26723
  misc_feature (1)..( 3003): 2750-1469P.txt file - cDNA_ID_3036303; gDNA_ID_2213647; Annot_ID_181482

SEQ ID NO: 30868 - DNA, 3003 bp, Unknown
  misc_feature (1)..( 3003): 2750-1469P.txt file - cDNA_ID_3036307; gDNA_ID_2213647; Annot_ID_181481
ttttgttgttttcagaaagttatgagattgatgacacaatgcaatgagaagagctttgagctggaggtaaaatgtctctctagaatgaaatgtcttcttctatagcgaatatggaagatttctcaagtcaatatatatatttaaatgtgttctacctatggatcagattatatcagcagataatcgtattctccaagaacaactacagacaaaggtcacttctaagtcacggactccttttattcttttattcttttttatttttcatatacagcattttcttgtggctattatctcagtcatccttacttatatacacatgctctaacaactgcagtgtaccgagaacaatgaattgcacgaaaaggtgcatcttctagagcaacgattatcgagtcagaaggccacactgtcttgttgtgatgttgtgactgaagagtatgtagatgagctgaaaaagaaagtacagtctcaggtaatttctcaaaatctcaaccaattttgtcaaatttgcgaccatgcattctcacaagtatgcctgaatcctgataaatatcttcactggttgcgaggagattgtgaaaacacatataatgatatatatgtttaatggacctctcattgtatttacatgagcgtttgatgttttcatacttcaggagattgagaacgaaaagttgaagctagagcatgtgcagagtgtggaggagaagagtggattacgagtgcaaaatcaaaaattagctgaagaagcttcatatgcaaaagaattggcctctgcagctgctattgagctgaagaatctagctgatgaagttacaaagctctcgcttcaaaacgcaaagctagaaaaagaattagtagctgcaagagacttggcagcggcagctcagaagcgtaacaacaactccatgaacagcgcagcgaaccgtaatggaacaaggccagggagaaaggcaaggatctcagactcatggaacctcaaccaagaaaatctcacaatggaattgcaggcaaggaaacagcgagaagcagtacttgaggctgcactagctgagaaagaatacatagaagaagagtttaggaaaaaagctgaagaagcaaagagaagagaagaggcccttgaaaacgatttagccaacatgtgggtgcttgttgccaagttgaagaaagccaatagtggcgccttgtcaatacaaaagagtgacgaagcagagcctgcaaaggaagatgaagtgacagagttagataataagaatgaacaaaatgcaatcttgaaagagaggcaactcgtgaatggacatgaagaagtaatagttgccaaggctgaagagacaccaaaggaggaacctcttgttgctcgtcttaaggtaaaccttttacaaatttgctttctattttctttcagcattcttagttttctataagcctactccacagtctagcggtaggcaaatctagatatccattacctgttcgctccatatcctttatgccatgaccttcggatcaggcaacatatattaaaaccttcaaaacacccagaatatatggttcaaaatatgtaaatagctttacctgatccaatatattctaatatcatgtcctcctatctataatacaagtgactgttacggataattaagtcaagctacttgtgggtattgaatatttatctggtttttcggggacatggaacttgtgtacccatgtgtgagcttctatcttgtacgggtaatgaaaatcatgaatcatcatctcacacgttcaaacaatatgagctttaataaataaaaaaactacttgttttcttgttctgcatttgatgctttatatacataacaggcaagaatgcaagagatgaaagagaaagagatgaaatctcaggcggctgcagcagctaatgctgatgcaaactcacatatatgtaaagtctgttttgagtcgccgaccgccacaattctcctcccttgccgtcatttctgccgtaagtctcactctcacattacctgaggatccttcattaagtactaagtaatcctaaaacgatcacaatctctccttttatgcagtctgtaaatcttgttcacttgcctgctctgagtgcccaatctgccgaaccaagatctctgatcgcctgttcgccttcccgtcttgacctgcggcaagtatagtcactctcctacacacagtataaggtaattccaatatttcccaccttcacaaaatctttaaaatccaaattctttagttcaaaaacattaggcaatctttttattgaaagacaattgtatgtgattttgcaggtataaagaactatatggaagtctgtttgtttgctaacattttccagaacggcaggctcgaattcttttattacaagttgttttttgttttcttgtatgtaatgtctttgttatatctttctgttcaaaatgtggtaaagaaagaggaaacataacatgctaacagaaaaataggaaacatatcatagccgtttcatagtaagttcaaaatttgaagtaagtaattaaaaattattttgctaattcatgaaatttgtgtacagttttttagaaaaaacatacagttgtacaatggagaatagtgtacgaatgcaacagtgatacacaagaacaccaaactacaccaattatcatcgatgaattactgcaaaccacacaaacctttgatctcttctaacttatattgtaatttttaattttaataataatttttacttagttatatctatgctaaattcttatttttttttaagaaatttaatacataccgaatttaatacaccaataacacatgtaaatatttttggatcagagtggttgttacggcccaatggatctagtgagcctaaatgatacgaccatatattgtttttttttcggttttcgccaacgaggatttggttaccgagagtttgtttgaacggtcctcagaaattcggagcttgtagcttctcggtgcggtgccttcactttaatg

SEQ ID NO: 30869 - DNA, 3003 bp, Unknown
  misc_feature (1)..( 3003): 2750-1469P.txt file - cDNA_ID_3036311; gDNA_ID_2213647; Annot_ID_181480
gccttgtaaagctttctttcagattgcctattgatgttccaggagcttgcaccttaggtaataactgagaataaggctgacctagcaaccatgatggatatgattcactctcaggatcatagcccacctgcactcaaatccaaaataggaaagcactttgatgagtcacatttccttgtttagcagcctattaatctacactttctgcctaaatgcagtaaatacttcatggtgtgttaccttcaaggcattgttgtaatctgacactccgagtctaccgtgaagtaaccacaacaaccagtctgcctgatgcagcaataccgctgattctctgtttggcacctcagtgttccaccatgagacaagtttgcacaaggtagaagtaccagagcagactgtatggtttgctggcgctatagacttgacctctggcagagcatcagggcagctctggttgtagagataaggttgacacagaacttctccactctcactgcaacacataattgaataagcaaaggagatttaaacaacacattactgaaacatcaaatcctctaatgtaaatggaatacagaaacagaaaagagaagtgatccggtgaattacatgcctgtttaagatgagagtagttgcagaagttccatcaagcgaaatggatgagacgagggagcgaactgtgacgggaatgtcctctagcaacgaaaaaagagttgctttccatgagcttgcccaacccatgctttcttctttctatctagatttcaaaacaaatgtctcagtccatagctttctcttgattttgttcataaagcagctcagaaattgtatatgatatatatacaaggatacttaatgcaaaagttttaccatgaaaggaggatattctcttttgccttgtgctttaatctctccttgctcatcaataactgtaaatcgacctccagaagtaccaaaatccatacccagataaagtttttcatagttcgttcctttattgccactcataactctgaaatcggagtaaaatctagttctgggtagaggaacactccttgaactagagtaaaaccctgagattaacattatcataaatgattcagctcctaaaacccctaataaacgccattatatcgaaaaatcttcatgtttacctgtttgttttggagattggaagagctcaaatgaagatatctgaaattgacgaagaatcagcatctctcttttccttctgaggctgctttcttctaaactccatagataagggagctagcaagttcgtgaccgttggatttctcgattttttcctcttgatttgaatttaccattttagccttccatattatttttatttattttactccactcaacaccaagcagttgggctgcacgttctctggtcatctaacggctcagattatgggtgcggatcttcatatttggacccttgtaggcccacgaccaataatgatgacaacaatccctctctcctggcaccatattttgttccacacaagttttctttaaaaaatttacatgtaaatgctatatataccaagcaatttttgtctaattaaaaatttacagaatattgaaatcatagcactaagacgcaaaactaaaaataacaacattccatttgcatatgaaccaaatgggtcgtggtctagtggtaattcatgaagatgaaggttggttttggtgtgtcccaagtactgttgatatccttattcattaaatcggaacgtctaaaaatctgtctttggatacttgggaaaactacaaatgattttttgctgaaaacatgacttggatttcattgtgaaaagcatgcacgtgtgagccagatgtgcggtggagctcaagaagtgggagatatgacaacttctttgccactgctactttaccttcgagaagcaatcacactctatatacgtaaactacttggtattagggaataaggacccacatattcaatgtgtgtgtaacataagtgtttaatattatagaagcaagatatacgtgctcgtaataactccattttattggattactttctattttatttttatttaggttataattttgtcttttgcaatttgcaggatttattagtacaccatctatttaaggataatgtttcctttcatttagccattattaaattcagtactgaatctattcgacatgttgcagttaagtagaatctaacataatgtcgcaaatcatgttccattggaattgacgttttttaacattttgagtgacccttaagagaaattactttaaatctgttcattatttttagatttggtgttggatacaattcctaatttattttttaactgattcggttaaaaacttaaaattgaacatatttcactaggatttcattttctttggtttaggttgaaccggaacaaaaacattgaacgaattaaagggcagaaaggacaaaaacattgaaatcctccatttttactaacccatcgttcttcccgctcgttcggttcattcaatttgtttcgaaaaccttttaacccggttcgcggttattttattttaatcctcaaccacgttcgaatctattagcgacacagtaaaaacaaatatattttattaatcaaaaattcaaaatctgaaaaaaagacgctttcaccaaaaaaaaatatctccaatcgatttctctctatctctctcttcaccaccgtcgcgtgaagaagacgaaacaatcgctctctccttgtgtggtctcactatctttttctcaccttcgcgtagcttaaccatggaaaagtagagaagaagaagaaagagagaagtgagagaaagacgaagaagatgaagagcatattgctttttctgtccccagccatgtgagtttccactgacacattctctccatcttcacatttggtgtttttttcttttgcttgattctttctatcttcattttcagatttttaccgagtccgtaaccgagtttgaacgagttagtggatg

SEQ ID NO: 30870 - DNA, 3000 bp, Unknown; identical to SEQ ID NO: 10408
  misc_feature (1)..( 3000): 2750-1469P.txt file - cDNA_ID_3036327; gDNA_ID_2213647; Annot_ID_181476

SEQ ID NO: 30871 - DNA, 3003 bp, Unknown
  misc_feature (1)..( 3003): 2750-1469P.txt file - cDNA_ID_3036331; gDNA_ID_2213647; Annot_ID_181475
tcaaaagatgaatcaaagatatggcacagcagattatgccatatgagtcagagaaatattgatgtgttgatcaagaaaggatgccttcaagctgaaaagataaatggtctcgagttttgtgaagactgtgtgtacgggaaaacacatagagttggttttgggtctgcaaaacatgtcacaagagagaaacttgagtacattcactcggatctttggggagcgccatcagtaccaaactcactaggtaattgtcagtactttatcacgtttattgatgaccttacaagaaaagtatggatttattttctgaagaagaaagaacatttcttctcttgtatgttgatgatatgttgatcatatcaaagaacaaggaaacagtcaaggaattaaaggaaagactgagttcagagtttgaaatgaaggatttggggcctgcaaggaaaattctgggaatggagataacaagaaaccgagaagaaaatattttggagttatctcagagaagttatctgcaaaaggtgttaaagacattcagaatggatgaatgcaagcctgttaaaacaccattggcaccacatatgaagtttgtagcagcaacagagactgaagcagaggagcaagctgatcaaatgaagtctataccttatgcaaatgcagtgggaagcataatgtattctatgatcgggtcaaggcctgaccttgctcatcctgttggagtcataagtaggtttatgagtaaaccattgatgaatcattggctaggtgtgaaatgggttctccgttacattaaggggtctattgattcaaggctgcagtacaagagagaaggtgattttgtggtgacagggtactgtgattcagatcactctggagatcgtgatcgaagtagatcgaccacagggtacacattcactgtaggagggaacatagtaagctggaggtcatgcttgcagccagttgttgcactgtcatcaacagaggctgagtatatagccttaacagaggctgcaaaagaagcatattggctaaaagacttgatgaatgagctgggatttaaacaaggagcggtagatatccattgtgattctcagagtgctatagctttagcaaagaatgcagttcatcatgaaaggacaaagcatatccagagaaggtttcattacatcagagatgcaatcactgatggagaagtgaaagtgctgaaaatatccacagttcataatccatcggatattttcacaaaggtggtaccggttaacaagttcctgagcgcgttgaagaagctcagggttacaagtgcctgataagggatcatggtccgagatggaaatcaagttacactagaagggaagcaaaggaaaggttgacactaaggcaaggtgaagttttgtggaagtattgcctaaagtgtcataaagactctaatccaaagagaaggtctcagcttgtgaaagaaacgaagtcacgagaggcgcacgtgctttgtcatacagctcatcaaggctagagacgtaattaacctcttgccaatggttcaaccattttgtctctttgtctctgcatttgaaacagagtacggaagaagagagaggagcgtggcggtgagtagagttgtataaaggagaagataagtgagacattagggttaagagagtaagtgcaagagaggcagctgaaagtttattcagtcttgtttctaagggtttgtgtaaccaaggctttctagtggatttccgggtaatctcggtccagacgtagcgttcatcactgaacgtgaactgggttaacatttgcttgtgtctgttttactttctttgtctaaacacacgagtgatcgaacaaagagagatttagtgagagcttccgcataaaacagttaaagattcaagctttttttttttacatcaacatttactaataaaaatgtatagttgaattttcaatattatatgctccaattgatacttcagaatgtgttaagattttcagcttagcaaaagtacacaaaaactatagtagaatagttcaaaaaaaattacaataacaattaatgataaattttgagaccatttttgacactgcaatttccttttaaaataattaataacaaattaacaatcaaaatggtgtatacactcacctaccattcaaacccataatttcatatagaacatattcctaaaaatgtgaaaaaattttaaaagattaaaaaatatttgacaaagagtcaaatacaaaaaaaaaaaaaaaaaatcctatctatgtttaattttggccatcagaagggaaatcaaataaaggggagatagagcgagtatacatatacaagctactcgcagcgtctgcaaattcatctatccatcatatttctctgctgctctctgctttcttcttcttcttcttcttcttcttcttcttcttcttcttcttcttagtttgattcaaaaaatctccttcctcttcttactttatctcgtattatccattaatcctaaaccctttagtctctccatcttccgcttcaacaatcagaatttgggtttggcgaaagatgctaactttgaaagtgagactaatcgtttgagtaaaaaacatgcgaattttgtgtgatgcttgtgagagcgccgccgctatcgtcttttgcgccgccgacgaagctgccctctgttgctcctgcgacgaaaaagtaaccacctttacctgaaaaaaatctcatttttcttaaagtaacacttttatctcaacaaatgcaaaaatttggaatttttgagacaatatctagttgaagtgctaaatttatagattttgaggttattataactcgaacatggccaaagtagtaccaaaagttgtgttttgattgttaaagaaacattctagtgattttagcttgtcataatttgaactttgcatatagcagttctctggtgatacactttatttacagttacagtcactctattgaagctggaagagctatgagactttttgttatctgcaatg

SEQ ID NO: 30872 - DNA, 3000 bp, Unknown; identical to SEQ ID NO: 10410
  misc_feature (1)..( 3000): 2750-1469P.txt file - cDNA_ID_3036346; gDNA_ID_2213647; Annot_ID_181469

SEQ ID NO: 30873 - DNA, 3000 bp, Unknown; identical to SEQ ID NO: 10411
  misc_feature (1)..( 3000): 2750-1469P.txt file - cDNA_ID_3036350; gDNA_ID_2213647; Annot_ID_181467

SEQ ID NO: 30874 - DNA, 3003 bp, Unknown
  misc_feature (1)..( 3003): 2750-1469P.txt file - cDNA_ID_3036354; gDNA_ID_2213647; Annot_ID_181466
tgcttctcttcctgaatccctgattgggtaaatatctgctcagattgagagtttctcagtgtgtgtttttagtaacgcacacgttatataaaggggccatgattcctcactactttaggcccaataatccagaaccgtttatttattaggcccagtacagttgatgcgagaggacaaacaagaagaaacgtcgtttaatcagaggtcccctttgcatctttttttccggcgagttttcaattttgtaaagttctaagctttggtatgtttgtatcgatatcactattataattcgatgattgtagaatttatgatcggaatcttttattctgtggaattccggtgagtggtattggaacaggtttcctaggatcttaatgggcttgtttcaaaaggtgtgatattgaaacttggagatggttcttcgtatttctaggtttcttttcttctgctcagattcgaaattggagtcttaggttttcttaaaaaagttgaagttatctgatattatattcttaagcttcatttattcatatagatagatagagagagagagtgtgtgtgtgatcaagcgtagagctcaatgccccaaaacttggctgtttggtgcgtgcggtaattcctctccatgcttttgatcacttccatgtcctctttcgatagttggaagtcgaaaacctgaaaattctcttccaatctttcaggcttcgatgtctttggtatcaccaccgtgttcctctgaattccccacctcaggacaatctgtgccactgtctgtttgtacttctcggccacatcctatgaattcagacagacaaaaggtttaattatttaactgtttcagtccaaacttttaaggtttagaggatggggcttactttgagaactgggtcatccagacatgacacggtgccaaaccattcggcattggctgtggcacctcccagaggagtatgagcagtgacacagataccatgtttctggcagaatttgactagagaatcgcgttggaagtaaggatgtgtctcgatctgattcacagcaggtttgatcttggagtaagccaagcaatctctcgttagaaagacatcatagttactgcaaaaaacctaatggtcaaataattcatatattggcgactaaacaagagaacttgtaatgatagtgagagaagttgaacctgattccaatgctgcggactaaacccatagaaacaagcttttccatgtcgtgccatgtagtttccagagagattgttgtatctatgtccaataccccatcatcccccaaagcactatcggttgttcctattcctgcacaaggcttacatgttacagcttattactctgtgtgccaattgctagagacttgagaaaacttaattttccagccagtaacaaggctgaaatgcaatggtctctactcgaaactgataatattcatgaacaaggctgaagcctaacccgtgtgttttgtagctatgggtatatgaacgaggaaaaggtcgaggtaatcaagttgaagtttcttgagactgtctttgcatgcctcaataacatggccatggtctgaactccatagctgcaaaaccaagacagagagcattcgatctgaaatgaactgatatcaaaggtatgtagtagtttaacttaaagccgtttggaccttagtcgtaatgaagagatcctccctcttgacaagacctgtcgtgaatgcttctgtaagagcctcaccaacttcagcttcgttcttataattagctgaaccaagtaaccccaaaagatactcataaatcaggatacagaacaaagcaactcactcacatgcaaagaaacaaaaacaattgtctgtgatacagcaaagacttaagatcattctacgattccaaatttccaaatacttaaaaacccaaatcttaagacataatttccaagtaagattccaactttcaacaaattaaaacaaaacctaatattttattcacatatcctgacaaacccgaagcaacaaagatcagaaagaaaaggttttaagcagtgttaagttataccagcacagtcgagatgacgataaccgatcttgatggcatcgatgataaggtctcgaagctcttctttctccattctccaaactcctaagccgatgatcggcattttgaagccactgttcagtgtaatctccatttcttcttcttgcttctctcctcaatccgtgattgggtagatatctgctcagaattgagagtttcccagtatggtaagttggtaacgcacacgtcaatataaagtggtcatgattcctcactattcgaggcccaatgggctagtaccgttttttgtgaagcccaaactgttttacaaagacatgaatcaatacgcaccgtatgggtatatatatatacaagcaacgttatcacaggtcctcaaagtttgcatctttacttgggttgtgtctggaatcaattacttcctaaaggtaattttattggtcgggcagctcaatcggtggtttctgagttcttattcttctctgataatctcaagacgagcttttaattttgtaaagtttttagctttggtattgtttgtatcgatcccactctcaacttttgatcggaatcttctgttctggggatttccggtgaattgtttaggaataggtttccaaggatcttacttgggtttgtttcaaaaggtgggattttgcaagttgtagatggttcttcgattttgtaggtttctattcttctgctgagattcgaaattgaggtcttaggtttttgataatagcttgtttagttatctgttaaagtcactaactttgatgttccttccggtcggaattgttggccacaattgattattgaaacccttaaattaaagagtgccctctttttctcttttatgatttggatctcttgtaattgacttgtgtgaggtttctttttctgtaggttgccatttgttaacttactctgttagtctactaccaccaataactatg

SEQ ID NO: 30875 - DNA, 3000 bp, Unknown; identical to SEQ ID NO: 10429
  misc_feature (1)..( 3000): 2750-1469P.txt file - cDNA_ID_3036445; gDNA_ID_2213648; Annot_ID_181520

SEQ ID NO: 30876 - DNA, 3000 bp, Unknown; identical to SEQ ID NO: 25325
  misc_feature (1)..( 3000): 2750-1469P.txt file - cDNA_ID_3036482; gDNA_ID_2213649; Annot_ID_181572

SEQ ID NO: 30877 - DNA, 3003 bp, Unknown
  misc_feature (1)..( 3003): 2750-1469P.txt file - cDNA_ID_3036486; gDNA_ID_2213649; Annot_ID_181571
cggtttgtactatcacaaacgacccggaatcttctaacactgatcagattgttccgtcgaatcctacttcgattccgcattctccggttagcgttagagaaccggaaattcacagtcatagagggattaaaccgggaataatcgctgcggttatcggtggttgcgtggcggttattgttttagtatcttttggttttgctttctgttgtggaagattagaccgtaacggcgaaagatcaaaatccggaagtgtagagactggtttcgtcggaggaggagaagggaagagacgaagcagttacggagaaggaggagagagtgatgcgacgtcggcgacagataggagcagacttgtgtttttcgagaggaggaaacagtttgagcttgatgatttgttgaaagcatctgcggagatgcttgggaaagggagtttagggacggtgtacaaggcggtgttagacgacggctcaacgactgtggcggtgaagcggcttaaagacgcgaatccatgtccgaggaaagagtttgagcagtatatggagattattggtaggcttaaacaccaaaacgttgttaagctaagagcttattactatgctaaagaagagaagctcttggtttatgagtatcttcctaatggaagcttgcactctcttcttcatggtaaaactctcttctctaagctttgattatcaaactgaaaatgctctgttttgcttagtgacaaaagtgttgatttttactacattatcggccaaagttatgatttttttattggtggttttagggaatcgaggaccaggacggattccattggattggacgacgaggattagtctaatgttaggagcagcgagaggattagcgaagattcacgacgagtatagcatctcaaagataccacacggcaatatcaaatcctctaatgttctattggacagaaacggcgtcgcgctaatagctgatttcggtttatcacttttgctaaacccggttcacgctatcgctcggttaggaggataccgtgcgccggaacagtcggagatcaaacgtctctctcagaaagctgacgtgtacagttttggtgtgttgcttctcgaggttttaacaggaaaagcaccctcgatattcccgtctccgtctagacctagatcagcggcgtcggtggctgtggaggaagaggaagaagcggtggttgatttaccgaagtgggttagatcggtggtgaaggaggaatggacggcagaggtttttgatccggagcttttgaggtataagaacatagaggaggagatggtggcaatgcttcatatcggtttagcttgcgttgtgcctcagccggagaagaggccgacgatggcggaagttgttaagatggttgaggagattagagttgagcaatctccggtcggtgaggattttgatgagtcacgaaactcaatgtctccgtcgttggctaccaccgacggctaagtttggtttctgtctgtcgatgttgtagaatacgtatcgtttggaccttgtcgatttttaaggttcttgcttagaatccctgatttgcgaacttgtcggagtttttttagccatgttttgtgttttcactgtttgtgatcgtaacggggttgtgtggttttgtggatttatgaagccgtttcaataataaaaccccatttgttactctttaaagcccattaggcccatatgttttagatgaattattttgcaattgctgctatttaattatagaacctaaaactcgaacgcccattgattagtgcttctagaacggtggatgcttctgtgtccactggtaattgtctttttggttgaagagtcagcccttcggatttgacctttcgtgtaccttttaagcccattgattatgattggcagattaagtaaattaacgaatggtcaagcacatgattagccaaatcatgacaaataaatggattcctttttcatttctggaagcggaatcttgtctaacaatttttttaattgatagtaatattttatgttatgggtttctgatagttgaagacttgaaatgttgaacttaaaagtgaaattacgctttcataatttcattaagccatgatggcaagttttttttttgggttgaggtcaacaagagcaagtttaatggtatcgaatagtgcgtaactgaaataaaacttgttgaaaaatcattcattcactattcctcggcgcgtgaggccaatttgaccccttcccccacgaaattaaacttggggagtactaaaagtctaaaccagcaacgtcgcttttcatgtgccttaatcacacccttttctgccacgtgtacgatctgggaccgtcgttgtgctcattgacatttgtagatccctttctagatgttcattaaaattacttaatttatatccagtccttctacttttagttttttgatactttaatccctgttgttttaatgatacttcattcagtatccatccaaaatcaaattaaatccatagattaagatgtacatttttgaaaataataaatggtttattataatatgttactaaatttatggtatttttcgctcttgtattgacttttacatggatacattaattttaatcttctttgatttctgttaattttctttgaattcattttatacatttattagtgaactattctaaaaattaacaaaatcatttaaaccgacaaaaaaaactttaaaagatcagcgtattataaaccaacgggggatagtttgcattaggtattggacatctggggggtaaatagagcgaaacaaaagttgaggcttgtttttcaacattttcattttattgtgtgctatttaaactgcgtcgtatttggaggcatattcgccggtcaagcgtatcaaatacccaatcacgcgaacttttctccgcctcttctccactccaaaattcttctccgtctttctcccgtcaccgtcgaataaagcctgagatctccgaattctgatcagcaactatg

SEQ ID NO: 30878 - DNA, 3003 bp, Unknown
  misc_feature (1)..( 3003): 2750-1469P.txt file - cDNA_ID_3036495; gDNA_ID_2213649; Annot_ID_181564
gaaaccttcaaagagacgtacatgagaaatgagtattgtaaatcatttatttcatggacttggttggaatcttagtgaatcgttgttgtcaatcttaacaacttgttggattggttatgagcctatgacttatgacttatgagtgagtcaatggtggtcataacctaatgattgggttatgagcaaagaaatttggaatttgtaaaaaaaaaaaaaaaaatcaagagcttttttgtgtggacatatctatcctagaaactgagacgaataatagtggataaaaagttgggaacggattattcgaatgtttaaaactattattgaaaacaatacaactaaatatggtacaaaagtaaacgaattcgtatagctaaacctaattcaaattacgaagctaatccatacttggatcctaaacgcttttacttttacttacggtttctttttcaaaaaagtttttacaaatttgggtttgtcttatgaagattatggcagaagagactgatcaaaagtgaatgcctaattcggtttaatccattcaagtttatcttaaacaatgaaactgaccatgaaagtgaattcaaagaccaaatcaaagaaaaattaaactgatttagttgtaatattggtattgaattaaactataaatagaaataaccaaacatataaccacaaaagaagactatttatataaatatatgagttggaagtcatttttggactattatataagatctaattatcacacgacgtgtggatgtatggttagcagagttgtgttcagagagttcgataaagccatcactccaaacatacaaaatatccatacattgatccaccaatataaccggctgtgtgccaagcaaagtgaagcttaggcctaactagggttctcaaaagttcaaaatataaaaaatattttggcgtcgaccttaaagtccttgcttcatcgactatagtctaaagccggcatgcctaaaaacctcatataaatcgtcgcttgttactcgatcatactctgtaactataaatatcctgatcttaattataacttgaaatactactaatctacgaatctatcatgtaacctgtttactagtttttatttaatataatcaaggagataggtcacttgaaaacaaagacgccacgcttgtatctcaatccatacttctattttttgtcttatgatatggtatcattcacgtagtttatatattaaaaaaaaaaaaatatcattcccatagttcttagttctttgttttattcataattttataatattggccttcccaaaaatttgggtaaggtcttggacattacaaagatccaacatatacaaaaataaataatcaaaaaaatctttgtatgactggagataatgatcggatcttgctgaagaccggaaacagagaatcagagcaatagtaccagcggatacaagacccacgacttcgctgatttgttttctcataacatgtttgtgattattttctgatttaagcgtcgaaagatttttttatcccataaggtcaatcctctcaagcggtggcaggagattcccgtttcacgcactgtgtgagacgtgtgaatgacatagctctcgcttaccatccacgtctcatgtatcagattcattcaactcttttactcattcaccatgcatgaaaagtataaattacattgaattttagcaaagcacttaattcttatcttattataatcctattttacatgcacacgttataatgttatgatattataatacattttgtatcgacatgatattatccatataaacaatggtgaaacttaactcaaagagacaaataccatattgtgatttcatgcaaactgagatagtgccaagtggaagccaagtgccatctttcgatcttaaacatgtcacatagaagaagactacaataacccacttaataagtataaactttatttattaatgcatgactttttcaactgttcctttccccatgcaatattgatctatcttttggatcattgtttataaaagttcacttagaacattcattctagaaagtatataagtcgattcttttgatgaacaaactccaacgagaaaggttctttatatatactcctaataatggtgataacgtagaatatacatattgtttacgccaattcgccaaacaattcactccttaaaatgacctctgataaataaaatcgactaatataaaccttatctactaatgacaccaactaataacacccatttagggtaatcctcatttattaaacatagcttactacctaacaacaataacagaattattgttctattaatcttcttttttaattttgggttgagtgatagaaaccaaccaccagacacgttgttaaggaggatgatgataacgatttttaaaaaaataaaacagaaaatagaaaaaaactcaaaaggagaaaaaaagaacagatagcgaaagaaaagtcttatttctggaatcaaatccttgtgagttttcttaagatcaaaacatataaatttgtgattttgattattgggttttgctcatagaagacgaaacagaaagaaacattcgtaaacaacaccaatacaccaacccatacaatctaaattacattaacatcagagaaagtttcaaacttttccaaatcttcaacgccattgaaatagcatctcacaggttagattctttcatttagatatgaatcagatttctgaaaatttgttggattcgtgaattctcattgtcttcatgtccattatcgataccctgaatttgtctgaatctccaatatctaagataagtaatgtatgtccttatcttactgaatttgcatgttctgtttttttgtttgatctgttttgttgtttgattatctcttttctgaagatgtaaagagattatggatcaaatgattgttcttcttgtgtttgcttaagaagtatatgtggttttgtagattgatgagtcattaaagaccgtcaatatg

SEQ ID NO: 30879 - DNA, 3000 bp, Unknown; identical to SEQ ID NO: 10441
  misc_feature (1)..( 3000): 2750-1469P.txt file - cDNA_ID_3036499; gDNA_ID_2213649; Annot_ID_181563

SEQ ID NO: 30880 - DNA, 3000 bp, Unknown; identical to SEQ ID NO: 10436
  misc_feature (1)..( 3000): 2750-1469P.txt file - cDNA_ID_3036503; gDNA_ID_2213649; Annot_ID_181562

SEQ ID NO: 30881 - DNA, 3003 bp, Unknown
  misc_feature (1)..( 3003): 2750-1469P.txt file - cDNA_ID_3036513; gDNA_ID_2213649; Annot_ID_181554
tataattttaataagtttcatattatctgatgaaaattaaacatcaaactttgttatttataattttagtaaatagattttttttcttttttatttcataagagattaagttatttaatgtaaagcttctcttgactgtataatatcttaactatattattcttataaaatttctcaaatttcaataaccgtattatgttagtctacaaaaaaaattatattacatcaatattcttacataccaaactaagatatatattgtccagttcttttcatggcatatgtattttacatgctctattttaaaaaattactacgtgtttcaatatcagtattgttgaaattatacaccctccaacgagtaaggagataacccattacaatgcattggcactgatctacatgaacatgactgaccagatttaaccattcgagcaaacaaaataataagtcaactatattttgaatagtcacaaaactatacatcgtaattacaaaactatttctgacatataagattaataggttaaaagaaccaccgtcgaatcgttgatgtacgtagtagtagtatcgtattaacgaggcaatgatataactatcaatatttttcgtaagaaaacacaagtttccttattcttttcttacgtcggcgataaaagttaatgtcgtactttgatttatgaaattgtgatggaaaattgttttaattaattaagaagagaaacgagttatttgtacaaacaaatctgaaaatatagaaatagagcaaaggacagagaataagaagaagaggcaaaggagggcgagagttcacatgttcaagagaagacaaatacgtttctctgacacaaatctgtcagaccaatatttttaaatattttattgtatagtttttattttgttttgttgtatgagaaagaaacgtatattatgtctttattaccaccacaaggggtcaggctccgtccacttggggtcccaattttttctttgttacgagtttttttttgtagtaaaaggcaagtcacgccggcacgcgagccctcacgtgatcccacgtgctttatttattctctccataccaaaatttcttttcctttgttgtttggtaaggttttttcttttttggccaaaatatgatattggcgagattgaaaacatgtatatttttaaaaaaaatgtaggcgtaaaaattatgttactaacacttcattaagcatatgccaagatttttaaattaaaatttatatatcactattggtcgtttttttttttgtgtgtgacagcagctcactattggttgtttatattaaccacatactaaataaggctagctactaccaaacttggaccagaacctaacacatgatgttatttttagtaatatgaaaaaaaagaaacgaaaaggaaaaaggaaagaatagatctttctggtgagagagcatacacaacacattggtgacacaaggtatctaagggcatgaccgcacgtgtcaacatgcatcaaacatgcgatctttcaatattagtattatatatttagcaaagacgcaaaagaatccaaggcaaagactacttcgcctgcatgtcatgccaatctctctctatatgttttctaatcaatatactagattactagacaagttgttttctaataagatctctcacatatgagccaatttgagccaaaacatgatatgatggataaagcttatttgggtattgaaagtatagagactgtcaatgagaaagtagtcatttgggcccaagtacagagatttaaaccttatcaggaaaagcccaatccagtacaaacttgaagaaaaagattgatctccttgtaagttgcaactggtaaagaataggacctttgttcaaggtctactgtattgagatactgaattagtataaacggccacttaaaactactttgtatttgtttaggcccaaaacattggactatcatgttgagaaaataaacacgaacgcaacagaagtttcctacttattatatagcccaacaaatattgatctctttgcttccaatgaatctttgttaaggcccaaaaaatacaaagccgaaactacttccatcttgtactatttttaagtttattttttggaaattttaccatgtatgattcagatcgttggtttaaatttttacaactagaaaatagtatatactctattagcctattatgatattaattaatgggcaatatttcgattagtttacgtgtagagtgtagtgataatgtatttaggttttgaccggcaataatgcatttgtaagaaaagtctttggacaataatagctttggtcaagtcaatgtagaacagaagactaatttctcttgacaaaatattaaaccttaaaaacaaatcctgtcagaccaaaaggtgatacgattgtaacttacaaatgatactatatatttttatagttaacagtctagtatttaaaattttgaaatattgatgatcattgattggttcatataagtaatccattaggttttcatgttggtcaatacagatgtacatgttttcaggattaatataggttccgtcctatgaatttatccgaccatgcataagagtaactctttaatctactattacaagttttcaggatttgaaagctctatacaagtttaactttatgtgtatattagttaacgtttgtaaccacagattcataatatttaccgtcgaactcttagccataaaattcggactaaaagactcgattcaaaaaggtatcgatgagatggaaagttgttgaacttattgtataaaagcttagagaggatattgataagtcgtcttttgcttttgtatctacagctatgacgtatattgtttaatccaaatcaaagtgttttaaagatattttggtttctggtggaggtggtatactaaagattcacatatagatagagatatttatgaatacattgatatgaaaatcatatacaatatgctaaagaacaataaatg

SEQ ID NO: 30882 - DNA, 3003 bp, Unknown; identical to SEQ ID NO: 28161
  misc_feature (1)..( 3003): 2750-1469P.txt file - cDNA_ID_3036519; gDNA_ID_2213649; Annot_ID_181551

SEQ ID NO: 30883 - DNA, 3003 bp, Unknown; identical to SEQ ID NO: 25327
  misc_feature (1)..( 3003): 2750-1469P.txt file - cDNA_ID_3036523; gDNA_ID_2213649; Annot_ID_181550

SEQ ID NO: 30884 - DNA, 3003 bp, Unknown
  misc_feature (1)..( 3003): 2750-1469P.txt file - cDNA_ID_3036543; gDNA_ID_2213650; Annot_ID_181588
acaagagactatggatgtaatgtactctcatcatataagcacatatataattagcatgagactttcagacctagttccgtgatactataatatccaattgatacatggaccctaacttgggcctgtctctaagcacaatcttgtgaaaatatccaggcattggctgatgatttaaaccaggtacaatcttctaaagctcacgagttcgagttttcacaatcttgaataaaactttcatagaaaagatagtttatgtccgacaactatatataccaaaaagttaggttttttttttaatgatatcttcagtttgtatcatgaactctagatgtatattatatacgcaaacatcagtgcttaactatataagatatacaatttaaaatgtaactgcatatatgcagttggattttgtctgtcaaattaaaggggaaaattaggttgagagtaggaaccggacacacatactataatgtcgtcggcttattttaatatcacacaattgcaaccaataatatttcttagtttattaagtgtgtattagaatattaatcaaactctaaaatttatttataaaaaaaaaaaaatcatttgcgagatgaaaataaaatgtgtttgttgcaatatttcaagtattttcatttcgataaaacaaatattttctggttttaacagtattcaaagttgtatatattctacaaattaatgttattgtaaaatcgattgtaatctacaacaaacctgttactgcaaaaacaatatcatcattcatcacaaatttaagatagattagtgataaatagcagtaataaagtataaccaaattgagaacaatattatagccatgtgatatcctcctatccttttaattgaatacatatgattatatttcaatactttagtttgtaattaacgaagagccaagacgacgttatttattaattattttcaataaatcatcatgctgatgtagatcattatatttgttggcatttccttttctcattcaactttttctttttggttattacttaatagtcaaatttaaataacacaaaagctgtataaacctaatcgacggtgatatcttaagacttaaaaagttaagattaagggaacccttaatttaatgtttttttttttgttataagttgtccattccttgttgcttttaaaaatatattaaactgttaaaaaggtgatctcgttgtcaatgtaaaaagttggctaagtactaagcatgtgacgatcttggctaatgcctgaaccgcttaattaaggtcacataattttatacgattgaataataacatatgacgtatgaatcataattaaatgaaatccaaatattcaaagtcttagtaatagaataaaaatcaacctacatgaacgaattcaaacgaattaatactataaatatcattgtctcaatcgtggacatttttgttccactttattccttaaccccttggggtgcaaattccataaacccaaaaactaaaattaaaagttagtagaaatcaccaatcattcaaaccttttttttttttttttttgttcaccggccatatacttactaattactatgtctcatattttgctagtaatactgtgtcgccgaaccttgctagtataattgaaactacgggtgataaaaacaagaaaagagagatggtatgatatcatattagctaaaaacatacaagaggtcaatatgggccatgcctttcccaccttcttacgtatctttatttatgactcctttgtttgtgaatgtctcgtcgcatatgtgtgtacgtttttgatcttcatgatcactttatgtttttttttttgcataaggattctgacactggtgtgcctctatgtgactgacttgtagatcaaatttcgactgtgtagaaaaggaagcattcggtacttgcataatcttttgctatttctagtaaattacgttaatgttaaagccttaaagtcatcatcataatagaaacacaaaaacagaagactttatcatagtacgttagatcagagctgctctgtggaaagtaaattagcagagaggtaagacataccgaatgtttgttgggcctttttcaatgcaatgatagctagctaggtcagtgactcaatgattaactgttttaatttttatatttttaattataaattcttctatttctgataatttattttcagaactaaatcctaattcttgtgtggatatatttagacaaaattaaacaattatgattagtatttgaaataaacaatgtctagctaaaattatcatgtaaggcctgcgtgtttgaatagtaaatagatgtagttagacaaacaataccaattctctaataatgtataattgacaaaagagtatattttgaatgtaatatacatatacagatatacttttctagtgggatattcaagtatccggaaatcgaatgcctctgaggtcatgcttttgctaaatattcttcccgtggacattttcttacataaaatctatcatttgtttttatttttttaaaatctataatttcgttctaaaattcatttatagtctcctcaatcatgaaagtttagtttccaaacaataaataaaatttgacaaaaaatctatatgataataactcaatcgaagacttgaagtacttaaaataaatgatgtcagtaatatcacatagatatttttaaaaaaagagtcgaaattttcttatttgtttatgtcactaatcttttcaactccgacataattgtctctattatattaagaaaatgacgttaagaaagaaaaaaaacaatgtatcaacttgccccagtttcggtagtggtattattgtaataaaaagtaaaaagatggaattttgtcaaacaaaaagactttgacgctcttatataaatacccttcactgattaaccaaaatatcattaactaaataatcactcccaattagtactaatcatcactcagggcaacgtgaacagagtctagagatg

SEQ ID NO: 30885 - DNA, 3000 bp, Unknown; identical to SEQ ID NO: 10452
  misc_feature (1)..( 3000): 2750-1469P.txt file - cDNA_ID_3036546; gDNA_ID_2213650; Annot_ID_181586

SEQ ID NO: 30886 - DNA, 3003 bp, Unknown
  misc_feature (1)..( 3003): 2750-1469P.txt file - cDNA_ID_3036603; gDNA_ID_2213651; Annot_ID_132465
ctgctctgctatgtttcatcaacgagagttgagattaggaagtggtagagttatggggatctctgtcacgagagtggattgacccggtttttgaatctatcgtcatgggtatctacctttcgcctattagccatttgatgaaccctagagttgcccttatcaatgaatccatcattagaacttctataagattgatttgtatcccctattgattacacttttatttacctgttatttgtatcctccatttacatcccctgttgattgcattttagttcttaattttgtcacatgttggttctactcgacccaatgatcgagtagggctgttaagttcttatttttacttgtttgaatcctgacctaggagtgttactagaaacccaccatctttataatctggcttgacttagttgtttttgtacacatcttgattgctagcaatacaatggactggattgacaccctctatgactgcatcgacatgtttgtgttttagaggaattgaactgaactcaaacagcattcagcatataagtaggcgtaaaaatctgcttatcagaagtacacaacaatttgcagcaacaaaatatctctactcgccactctcgttattctaaacctttcagatatctacaagttccataatattaagattatcaaaatctatgattaaacatcgctatggcaggtcgataccaaacaggcagagattcctaatcgacttctatgtcatctttcccatcccagtggcggttaagtcgctgcataaacattgttcccaagccgtggttaaggcagaggctattcaattgaaaaatatcgtttcaagagatttttgggatgggagagagagcgttgaacaggaatatcaaccaattcaaggatcatacctgactcggagattccgaatcgacttttcaaaataattccttggtcagaagaattaactgccatcaacatcgatattgtgagataatttcagtcggcgaaggtagctccctttctcatctgtaaatatcaactgtcgttttattagaaaccaaatcaaaacaaaactatgctaactggttaagcaattgatggtttagattgaaaaggatataattgtctatttattctccacgaaacaagaaaaagtgtctcatccctcagaagtgcctcaaaaggaataaaagtgcatagaaatgcctaaacgtgtcacattccctatattatattttggaacgtgattttgtggaagatgggtttgaatcaatatttataaaaaattaaaataatcttaacatgccactttaatacaagttaaattttcaatttattaacaattattttgtagactcgtgatatatcattatttaatttaataacaatcgtaaactattttttttttgtcgttaacaatcgtaaactataatagatacaattttaaaacttttatatatggtaactttaaaatataaattattccgcggtaaaatctagttttcaataattatttgccgactatcaatcattgtggtttgtggtctggttcaaccgccggtttgcttcgaatttacaaaaactattttcaatttgattttttgatatatatatattttttttttccattcccatcatctaacagagaaaacaacacgaactttcctgagacggaaaacaaaaaaacagaacacgaattttcaaagttttccacacgatgtcttccataagatcgttaccacgtccctaactcttctccttcagacaaaagtactttagttattcttctttcttttgccatacttctctgaaaacagaataaatcttttgtattcggtcaaactgattcaaatactgtacagtcaagtcaaagctacaagatcgtgttccaggttttggtcttctcttccttaactctcctgggttttctctaaattggtctcttctacaaaagttcgaatcaaaaaattttctgttttgatttcgcttaattgatttctcgttttctttcttttcttggaaaccttttaattccgaaattgagagttttttttagggtttaggaaatctcttactggatctttgctatagtattgaaatggaaccctaatgttggaagctttctaaagctgagtttttgtttctacaggtttagagaaaatcttctgaactcaaaagattctcataactgagtttataaatggataattgaagttgtgtattttgttgataaaaccaaaaccatgggtggagatgatttgagcttcacaagattggtgattactgctttgtttggtctgttaatgttgttacaaatcaaggaaacttctgcatcaacatcctttgtaagctcgagtgtttgtaagtctgatcacttgacctacacaaagccttatcaacaagggagtttgttcacaattaacggtaatccggtggagaaactccggttttgcgaagctttacggtttcacaaagccaatggttgtatctttgaggattcttttagtgatgacttctgcacaattcactctctactaggtttgctctatttaaagatttttttgtgctcctttgattatatatagtaaccgaatttggttaattgtgacattgtttaatgtagggagaaggtttttggaagaaaaaactgtaaaagattccaaaaatagtaagcctaaaactgaatatagccatgttaaagttagcatagcaggaagtgggtttcttctcttgtgttgcgctctttgttgtccttgctttcataaagagaggaaagcaaatagtcatgaagttctacctaaagaatctaactcaggtcacttagtgtctctcacatttatctttcttttgtagctatgaaataataacatttgacattgaagcttatatatttctatcacagtgcaccaagtttcttcttttgaaatgagcccttcttctgagaagattccacaaagtccattccgagcaccaccaagtccatcccgcgtaccgcagagtccatctagatatgctatg

SEQ ID NO: 30887 - DNA, 3003 bp, Unknown
  misc_feature (1)..( 3003): 2750-1469P.txt file - cDNA_ID_3036603; gDNA_ID_2213651; Annot_ID_181609
aaccctcctactcgatccactactcgattcatttactcgaccaagggtgaccatctttacaagacttgttgagctatcaaagcgtctttggatcctcctcattccccactcaaccagacatctgagcatacggataggagaggatgaagcttctacttgaccaattgatcactcggagcatagacacaaaggcgcagactttgcagcaccctctttactcaatccccaaggtcgagtattcgccaaaaccgcctcaagtctcttgtcttctaatgaatctagattttccaacattttagtataaatagatcactttgggatttgtccaaaggatctatgctttatctttcagtttttctttgtgtttatgaatcttgaaaccttaattactcttaatctatttcgtttttgcatttgattgtttaagtaaagttgtttagcttgtttagatctacattttggtatgattttagtaatttctgggtttgtgttcttgagaatgttgcttgagtagtgattagggttcttgaggatggattagattaggataatctctaggttagttagctggttagtgtttaggtttatacccttctggattcgcttggcccctatgcggttttcgctggctaatgtggagattcgatcatagacgtccagcgtccaaaagacgttcaaatggatgtctgacctacgaattccagagatatgtaaactcgaccaagggattggcttgtctgcctattggctttggtagattatttcttaaaccctgctctgctatgtttcatcaacgagagttgagattaggaagtggtagagttatggggatctctgtcacgagagtggattgacccggtttttgaatctatcgtcatgggtatctacctttcgcctattagccatttgatgaaccctagagttgcccttatcaatgaatccatcattagaacttctataagattgatttgtatcccctattgattacacttttatttacctgttatttgtatcctccatttacatcccctgttgattgcattttagttcttaattttgtcacatgttggttctactcgacccaatgatcgagtagggctgttaagttcttatttttacttgtttgaatcctgacctaggagtgttactagaaacccaccatctttataatctggcttgacttagttgtttttgtacacatcttgattgctagcaatacaatggactggattgacaccctctatgactgcatcgacatgtttgtgttttagaggaattgaactgaactcaaacagcattcagcatataagtaggcgtaaaaatctgcttatcagaagtacacaacaatttgcagcaacaaaatatctctactcgccactctcgttattctaaacctttcagatatctacaagttccataatattaagattatcaaaatctatgattaaacatcgctatggcaggtcgataccaaacaggcagagattcctaatcgacttctatgtcatctttcccatcccagtggcggttaagtcgctgcataaacattgttcccaagccgtggttaaggcagaggctattcaattgaaaaatatcgtttcaagagatttttgggatgggagagagagcgttgaacaggaatatcaaccaattcaaggatcatacctgactcggagattccgaatcgacttttcaaaataattccttggtcagaagaattaactgccatcaacatcgatattgtgagataatttcagtcggcgaaggtagctccctttctcatctgtaaatatcaactgtcgttttattagaaaccaaatcaaaacaaaactatgctaactggttaagcaattgatggtttagattgaaaaggatataattgtctatttattctccacgaaacaagaaaaagtgtctcatccctcagaagtgcctcaaaaggaataaaagtgcatagaaatgcctaaacgtgtcacattccctatattatattttggaacgtgattttgtggaagatgggtttgaatcaatatttataaaaaattaaaataatcttaacatgccactttaatacaagttaaattttcaatttattaacaattattttgtagactcgtgatatatcattatttaatttaataacaatcgtaaactattttttttttgtcgttaacaatcgtaaactataatagatacaattttaaaacttttatatatggtaactttaaaatataaattattccgcggtaaaatctagttttcaataattatttgccgactatcaatcattgtggtttgtggtctggttcaaccgccggtttgcttcgaatttacaaaaactattttcaatttgattttttgatatatatatattttttttttccattcccatcatctaacagagaaaacaacacgaactttcctgagacggaaaacaaaaaaacagaacacgaattttcaaagttttccacacgatgtcttccataagatcgttaccacgtccctaactcttctccttcagacaaaagtactttagttattcttctttcttttgccatacttctctgaaaacagaataaatcttttgtattcggtcaaactgattcaaatactgtacagtcaagtcaaagctacaagatcgtgttccaggttttggtcttctcttccttaactctcctgggttttctctaaattggtctcttctacaaaagttcgaatcaaaaaattttctgttttgatttcgcttaattgatttctcgttttctttcttttcttggaaaccttttaattccgaaattgagagttttttttagggtttaggaaatctcttactggatctttgctatagtattgaaatggaaccctaatgttggaagctttctaaagctgagtttttgtttctacaggtttagagaaaatcttctgaactcaaaagattctcataactgagtttataaatggataattgaagttgtgtattttgttgataaaaccaaaaccatg

SEQ ID NO: 30888 - DNA, 3003 bp, Unknown
  misc_feature (1)..( 3003): 2750-1469P.txt file - cDNA_ID_3036613; gDNA_ID_2213651; Annot_ID_181606
tgtatcatattatttgtttattccatccataaccccaattttttaagggcatctaacagttgatatcggttaacaatgcgaacaaaaaaaatactttagagtattttgaactattgttgatttggtaaatcattcgaactaattatgtttacaaatacgtgaaaaaattaatataaatgtcatccaatgataataatttatccaatcatacaaacgaattaatacagttatattgtggatggattcatatggatacattaacaattatctttctcttttaccttgaaagacaaatctgaatttttttctaccgagaatattgagatactgttgtatagcaagaatattcccaccttcacgtttaaaactaggattattatggttagagcataaaccagaaacattatggttagagcaatattcgtttaataaaagttttaattatcacgtttattatgaggaggtgagcataattatatacggttactaaacacccacgatttatttaagtttcttccattccccattccatctgtttcaacttgaaaacaaataagttatgctcaagttagaaaaagtcgacaagaatgaataaccatctggtgtcaaaaaggttgttcagcataaactaaactacttagttttctacgttttacattcatcgtaaacaaaacataatcgtctgcatatgttttttttttatctcaggttgctgctatcccaaaaatttacatcccggcaccaatacttgtttaaattattagctacgttgccgaagatgtcgtggatgctttgaaacccttggttatggctggtccaacatttaaggatgcaatgtattccaaggaaacactaagttgtgtccgcatagacaaatatcgttatttcatgtggtggttcatgccgcattccatctattatcattttttcacacaatgtcttgaagccaacaatccacatgctttgaaagctgtattgtacaaaccaatagcatatgagaattttgttgccgaatgctatagatctaccttatgggcaaagctatacggagagcattaaggataggaatcaaagaaaggaacaaatagtcccaaattttgaaagacaatgaaaagtctgtttttgatgttcatttctgatgttctgcctttcatttcagaaaatagttgcttattaatttctgatgttctgcctttgtttttataaaatacataatttatactctgtttactcctatgaaaagtcagatcccatcaaaatttgttcgttgccatgaatgaggtttgcatatttatgtttaagctaagtccgcaaaaatgatttccaattgataaccctttaaggccatatacgtgtgctcacgtcgttataataaattccaaacggacatatatctttggacatgttctcttggatagaacatatatttagcatttaattacaaataaataactcgactataaacgacaccagacgaattatctatctaatattacaaccacccccaactcaatacgtaatattctcaaaaataaatatgtcatatagtgtaacgacaacggatcgttcaagtaaccaacccttcgatgttaaaagttacatctttttctcgcagacgaagttacaccgttttggcttcaatcaaaggaaccttttcacttgctataaatacctctcctatacttgactctaccaagacaaccccatcacaaaagaaaaacattgtcctctgttttcgtttccataatcctctgtttttcgttactcttcaattctgccgcttttcaccatgattcagttccaccgtctgtatgagttgtctccgttggtaactggttgggcgatatgtgtcatggtagtgagagtttacaaaaaaatactcaaccatgatgcattcgaactaagacttctcttggttgataaattggtatacaattttctcgtattccttttcgcaatttgcagatttttttctaatccctcacccctataatgttgttttcatagggcacccaaatagaggcaacaatcgggcctcgtttttctgccttctattatgacagaatcaaagagaatcaatggaaaacgattactacttttattgttcgaccaaactgcgaagcaataagaacaactcctcatgaatttcggattttgttcatggagcaaactgtcgtgactccctcaaccaccaaagaaaccgttgtgcttaacaacttcactccatttgactacatcatcgaagacactgttcgcaaatatactttggttggtaagtaataacttcacaaatttaattttctttccaaacacatagatttaactactgtcatcttcatcatatttcgaccagatttgcttggtgcactcgttgattatggatttctgaccaataacgcgaggaatggtaccgatttggacggattcaagctacccttcaagatcatggatagatagtacatctctttaccaacactacaagaaaacaggtaaacgacgactacaatcagcgacaacaaacgtagtcgtaacattatacgactatttggccacggatttacgactcgcatgcgacaacacgaaaaattgtagttacatagtcgttgttttacgactatcgtatgcagtcggcaaagagtcggcaagtaacgactatttgatgattaaattattgaagggataatgttgtcgttgcttagtcgctaattaacgactattctaccgtctattttatttagtcgctaatttgacgactacaggacgactagacgtcttagtcggcctgtagtcgtagaaacgtcgcaccatagtcgtataaagtagatggaaaacgtgtttcgcattggtaagtaggtacagctaactatttagttgtagtcgtaaattagtcacaaaaattggcctatataataaacgttcacgcaactcttctttcaccaacaaatcaaaacaacaacaacatcaaagagaaaaaaaaaaaattagttactttattgtataatg

SEQ ID NO: 30889 - DNA, 3000 bp, Unknown
  misc_feature (1)..( 3000): 2750-1469P.txt file - cDNA_ID_3036716; gDNA_ID_2936563; Annot_ID_194509
aaaaacacattgataattctttatatattttattaagctctcacttttggattcaaatcatttgtttagactatcacttcatttcacttggatcacggtaatttagatatggtttgatttgattttgtaactaaatatatttctaatacaatatggaatatttttgttgggtaaagaattgtggtatggatttgaataaccattggtgttcttgatttggttaatacaatgtcagatttcttttctgcatattttgtttttgtctttttgcaaccacttatagatcaaaaggtcaaatgcaataactcaccgaatactttgttgcatacttgcataagtaaaactttatatttttcttaccgatgcaaaagtttcttttaatatcgttttttcatattatttttcttgataaaatatgtataaatgttgcgtatatttttgttttgcattaattaaagagcgaagaaattgcagtcttacattgataattctttatagctgaatctcagatttgtatacaaattaaatgttaaaataaactagagtagaatttcgttatattatctaggatcacgatatttaaatttatgggattttgaataattattggtctttcttgatttggtctgcaatgtcagattttgttataatatattcaattaaaaaatatttgtttgcttaccctgtttcggcggtcagatacagagcggtgactagcgcctactacagaggtgcgttaggtgcgatggtggtttacgacattaccaaacgcctctcattcgaccacgttgcacgttgggtcgaggaattacgtgctcacgccgatgattccgccgtgatcatgctcgtcggaaacaaagccgatctctccgttggtaaacgtgccgttcctacggaggatgcagtcgaattcgccgagactcaacggctttttttctcggaagtctcggctctaagcggcggaaacgtcgacgaagcttttttccgtttactcgaggagattttcagccgcgttgttgtttcgagaaaagctatggaatccgacggtggagccaccgtgaaacttgacggttcgagaattgatgtcatctctggttcggatcttgagactagtaatatcaaggaacaagcttcgtgctcgtgttgaaattttgagtgataggccataaaatcaaaagccaattattgggcctttctttaagcccatatatgactcggatctttgtttgggtttttcatgtttagagaattagaggtggtgcttatagtaaaatcaaaaagctattcatgtgtcactcgtaatctctttgacattcttgtatatgtaaagaaaaaacaattcttttattctgtcaagttccaaggagtttcttctattcaatcaaaatgttaagtaaaaactagagttttatcaatatttctagcaaggaattttttaaaaaaaaagtctaaactatatggtagtgaaatgatggagatttgttttcaaagattaggatagtgaaatgatcagaaccacaataagttcattaagtagatatttcgtgacatcaattgtgagtgtcacgttagaatctggaatataatccaaatctaatggaagatatgattctatttatttttgcatgcaaccgaatcatttgaagtgctccaatcacaaactcgcttttcctcttatgacctaaaaaggagagtatattatataatcagatatataaaacatcacacattaatatttacattgtatctaagcacatatgattaatcggccaccaagtgctttgtgactacttagttttctatgctgatacctctgtattatgtgtaaagttactaattagtttatgtatattagcaaaagaaagattcttatataagaacaatgtaaattactcctttgaacttttatatattttcaataaacgataggatcgagttaagataagtatatgtattaactgaattaaacaaatactataagaagaaatttggattcagggccacaatgttatgataaattttgctggtgtcttaaacacttcgacgatctatatattttactaaagaggtgacaatttttgcaggagatagctataaaaattatatttagccttgatagttacagattagtagctatctgttatttacaacgaaatttacatgttataaattttcttctaattaatctatttatattgtttggaatgaaaaagcgcatacatatgtaagttggaaagtatataaaaaagtagatgattaaaaggaaaggtcgttgactaacaatagaaaaagtcaaatggtaagcaagcaggagaatagtcgtacgttcactgttcccaacttgcaatgagactcatcagaaaattggcatctttgaaaataatagtaattacgtatacatgttattttatattgtttttgttaattaagcactacgtttagatacgcaaattactttattaagatgcatatatactcacttttacttcacattatgataataaaaaaatcatgatttataaaccgtactattttatacgtaaattgtatacgtatgcgtttccttagaaaaaaacttgtagaaatagaatactcatgaatgtataagaaatagttaaaataaattaaaaaggggacgatagcagacaattattcagaactgacgtatatatcggacatatgcaagtataatcttcaatacttgtgtttatttagattaaaattctatgtaggggatatagtaatttgagtgtaccaaacatgtcataacttattagcatatacccatgagcaccaacagatgactttgaaataaagtatttataatttcaagtattctctgttttgcaattggctaagaccttcatagttcgtacgcctatttaaagcctcacaaagacccaaacataaatcacaacctataaacggaaaaacaaaatcacaaacaaaaaaagaagaagaagaacatttatcctatccataatgttctctttgaacatg

SEQ ID NO: 30890 - DNA, 1870 bp, Unknown
  misc_feature (1)..( 1870): 2750-1469P.txt file - cDNA_ID_3036716; gDNA_ID_2213653; Annot_ID_181663
cttcgtgctcgtgttgaaattttgagtgataggccataaaatcaaaagccaattattgggcctttctttaagcccatatatgactcggatctttgtttgggtttttcatgtttagagaattagaggtggtgcttatagtaaaatcaaaaagctattcatgtgtcactcgtaatctctttgacattcttgtatatgtaaagaaaaaacaattcttttattctgtcaagttccaaggagtttcttctattcaatcaaaatgttaagtaaaaactagagttttatcaatatttctagcaaggaattttttaaaaaaaaagtctaaactatatggtagtgaaatgatggagatttgttttcaaagattaggatagtgaaatgatcagaaccacaataagttcattaagtagatatttcgtgacatcaattgtgagtgtcacgttagaatctggaatataatccaaatctaatggaagatatgattctatttatttttgcatgcaaccgaatcatttgaagtgctccaatcacaaactcgcttttcctcttatgacctaaaaaggagagtatattatataatcagatatataaaacatcacacattaatatttacattgtatctaagcacatatgattaatcggccaccaagtgctttgtgactacttagttttctatgctgatacctctgtattatgtgtaaagttactaattagtttatgtatattagcaaaagaaagattcttatataagaacaatgtaaattactcctttgaacttttatatattttcaataaacgataggatcgagttaagataagtatatgtattaactgaattaaacaaatactataagaagaaatttggattcagggccacaatgttatgataaattttgctggtgtcttaaacacttcgacgatctatatattttactaaagaggtgacaatttttgcaggagatagctataaaaattatatttagccttgatagttacagattagtagctatctgttatttacaacgaaatttacatgttataaattttcttctaattaatctatttatattgtttggaatgaaaaagcgcatacatatgtaagttggaaagtatataaaaaagtagatgattaaaaggaaaggtcgttgactaacaatagaaaaagtcaaatggtaagcaagcaggagaatagtcgtacgttcactgttcccaacttgcaatgagactcatcagaaaattggcatctttgaaaataatagtaattacgtatacatgttattttatattgtttttgttaattaagcactacgtttagatacgcaaattactttattaagatgcatatatactcacttttacttcacattatgataataaaaaaatcatgatttataaaccgtactattttatacgtaaattgtatacgtatgcgtttccttagaaaaaaacttgtagaaatagaatactcatgaatgtataagaaatagttaaaataaattaaaaaggggacgatagcagacaattattcagaactgacgtatatatcggacatatgcaagtataatcttcaatacttgtgtttatttagattaaaattctatgtaggggatatagtaatttgagtgtaccaaacatgtcataacttattagcatatacccatgagcaccaacagatgactttgaaataaagtatttataatttcaagtattctctgttttgcaattggctaagaccttcatagttcgtacgcctatttaaagcctcacaaagacccaaacataaatcacaacctataaacggaaaaacaaaatcacaaacaaaaaaagaagaagaagaacatttatcctatccataatgttctctttgaacatg

SEQ ID NO: 30891 - DNA, 3000 bp, Unknown; identical to SEQ ID NO: 10474
  misc_feature (1)..( 3000): 2750-1469P.txt file - cDNA_ID_3036734; gDNA_ID_2213653; Annot_ID_181651

SEQ ID NO: 30892 - DNA, 3000 bp, Unknown; identical to SEQ ID NO: 10483
  misc_feature (1)..( 3000): 2750-1469P.txt file - cDNA_ID_3036738; gDNA_ID_2213653; Annot_ID_181650

SEQ ID NO: 30893 - DNA, 3000 bp, Unknown; identical to SEQ ID NO: 10473
  misc_feature (1)..( 3000): 2750-1469P.txt file - cDNA_ID_3036742; gDNA_ID_2213653; Annot_ID_181649

SEQ ID NO: 30894 - DNA, 3000 bp, Unknown; identical to SEQ ID NO: 10470
  misc_feature (1)..( 3000): 2750-1469P.txt file - cDNA_ID_3036750; gDNA_ID_2213653; Annot_ID_181647

SEQ ID NO: 30895 - DNA, 3003 bp, Unknown
  misc_feature (1)..( 3003): 2750-1469P.txt file - cDNA_ID_3036752; gDNA_ID_2213653; Annot_ID_181646
tatatattttttaagtatagaaaatagaaatatgacgtgctaaattgagctatggacaaaatcatatatgagaaaatgaatgtagatggatagagtcgtcccacacttaaggttggtccacaatgaataccgttggaggcttcgcaggcttttgttctgtccttgtctctctctcccctaaaaaaaatttgttacgaaaaattcatttgaattaattttggtcggtatgtgtataatattatacaattataatatatttctaggtttagacatttttttattttatttttcatgaagtaaagaacacaaacaaaaacccataaaataatgtaagatagataaaacaagaggatgtcgtcataaataaattggaatttggcatttaatgaaaaagggtgaaaggtgcttgacatacacgcgccgtagtttcttacccggaaagggattggtattgatgttaactagaccgggcccggtttaggctggggcggcggccgaaccgaccacctggctactattcttgtttgtattcgctgattctgcaaatctaaactcggatcttttatggacttggattttcgggtgggtggggttctgctaaagagacggcgctcttgtcattttaagtcggtcactgcaaaacgtgaaccctgtgactgtatttagagtctcgttacgttggatctctctccatgaaccgtccaaagtaggtcaatttttgtgggttcactcacgtatacaacgaagtacggcgctatttaattttccgaaaattttgaaagagacttttataccagaaaagtttgtaatccaaatttttaatatattgcagatttggttcgttttgggcttaaagagcttttattggtgtggtggctcaaatcgtttttgtaggcgtcaggtcaggcccattttcaatgtcgcttgctcatttgatacgctaatatagggctttgcttaagatttgaatgggccgtacccccattttgcttcatgagaatgggatggtaataaagaaaaaaatgacaggaaacaatgaattggtcacgaaaaaatgttgtattactttttccaaaatgcacctttgagaatcttaagattcaatcatacagtgaggtccatgtccacaataagaaatcaaataccaaacaaagtataaacgtgaattgtaagctaggcagtgtatgaagatgcatttgtcttaaagttacgaatctgataaataatattattcgatcgactttagatcgctttccatgcagatttatgcaattatctggaagaagaacaaaacaatatcttagtttcttcggcctcactattcgacttctatcttcaatatattttcgcgtatttttttatttgaattatttggtttttggttagttaactaaacgagcaacagaaccaagatcgaattgcgtttgccgtttggattcaattattgtagaaaattcgacttttcagacatttgttacgttctttctagtagttatattagttattatatgtggagtggaaagagatgaaagtagatgtaaaacataagtgatttcttcatagtgattttaaaactttttgttgattttcaaaattatataatatccataaaaaatagcctatgcgtgttggatgcttacaaagaagaatttgttttcggcgttagccaaaagtcgatggcatttgctaaaggtgttatttgagtggaaatgatctagaacaaaaacgcattgatataccaccactataatgatttggagacgtatctagttctcatcaacttttcaatagtaaacgcattatcaaggtaaacgaagagttttgctttatcagtgtaccatacacacattaatagattgatggacgttagtgactttggtattgactttaacgccaaatggacatcaattctgcaaggcaatgcctagtttcaaagcagcgttacttaacatttaactaaaggtagtgcaaactggttaatactttttaacggctttgcaggaagagtctcgactaaaaggagaggaagagatgagatcgacgaagattttcatatcataaaaagtaatataggtttttgaaaatagttagaataattatttttatttttatttttatgggaaagaagttgcacgagtcggtccacagaatgacagaacaaaagcattttagaagtttagaaccaaccaatcactatagttttccacttgtccgtatctcattggttcatcgaatattaacttacatggaaacagtaaaaagcgtggaataagtcgtaaaactgaaatctaaaaatgaaaagatttcgatttcgatataaatacttaatctttataaaataatatcgaaatcttttcatttttagttttcagttttacacttttacttgataaatttaatacatctgttaattttttttcttctaaaattaacatatgatatctattcgggagataaccctaagaaaactgataaaataaataagttactttttacaaagtcgaataaattatttacccttctgctttaatggcaattatcttaatattgcaaaaaaaaaaagagagaaatattactacaaaacagaagcaagcaagtggaaaacagaccagaagagagaggaagacgaagagagaaacagaacagagtagggatcgatagaccgtggaatctcagaatcacaaacactttgcaaaagggttttcaattcctatttatttacaaagaaatcatcaatagtagtggtctctagggttttgcttgctcttcttcgtgacccctttttacctgcaaacaacaacttcaaaattggcgtgtttcgtacggtctatctaaccctaatctgtcacaaaacactcttcttctctcacccctttttctgggtttattcaattctcgtgcttttggttctgttttcttctctggggatttggttttcttgagtgagtttttctcctctttcttatgttcttgatttgattattatatagaattatggtaatg

SEQ ID NO: 30896 - DNA, 3000 bp, Unknown; identical to SEQ ID NO: 10492
  misc_feature (1)..( 3000): 2750-1469P.txt file - cDNA_ID_3036827; gDNA_ID_2213654; Annot_ID_181694

SEQ ID NO: 30897 - DNA, 3003 bp, Unknown
  misc_feature (1)..( 3003): 2750-1469P.txt file - cDNA_ID_3036831; gDNA_ID_2213654; Annot_ID_181693
acgacagatggagaatatcaaatcacatatcctaacaaacgggcaagtttctttattagatcacacataggtttttatcattcctgtatatgtatattatacgatgttattaattattgtaaaggaaagtgtaataatccagccaaatatacgagagaacatgtagaaacgggaagtttttttgaaaggtatgtatgtttttgatataaaactcgtatgaaccggttttggccttataaactttcttcttttctaaaatagaattaatcatgaattgtcagggctgtagcattgttctcgttggctcgtagaaacattgagaatagaatgaaatctggagcagagatgaagaattcctcagaaatcgtagcatgtgtatcctccaaggagatacataaagagatggagaatattaagtcccatatcattacaaatagcaaccatataaaggttaagcttgagaaagacttttagtatgttatgttacaccctgaccttttatgtattgatttcttgggtcttgtccatacctatgtttttttttaatatcaaattaaaactgagtttatcatttattgcctaaaaagccgagtaaaagaacttgggatcgtcgatctcttccttcaaaatttggatgagtcggtccatggtctgaaaacactttctaatgtcgaattctaaaaacaatcgagaggttccccactcttccttgatccgtcgtaggaacgagtgggaggcctgactaatgctaatatgtatcgcttgtccaaagccacaaacttattaaccaattagcaaactgggtgttggtcattttggaacatgattatcatcctttattgatcttaaaatatgtaaaacatttcattttgttaacataaaacattttaaaataaaagtaaaatattattaaaaattaaaaaggaatataaatgaaaatgaattacaggaaaatgtaaaattaataaaagagtagtcttgaaagagaattcatagcaatttctatagaataaaacgtagaactcatatttaactggagtgaaatatagaaaaacaaaaactaataaatccaaaaatatttttgtgaaaccttataaagatgaaacattagtaaaatctagcaccagaatttaaattgatgagtgaaatgaaaattaataaaaaatatagaaattgtctttgaggttttaaaaaaataactttagataaaaattcatatgattttttagaaaaataaatataatctgtcacttacaaaataaaataattttgaactattatgtatgagtttatatcaataatttattttgtaatttaccttattgtaaaagtaatatatcttatttttattaatataagatatcaaatcataaaagcttttaaaatattttttagtcatctacatatattaaaacaaaaaatactttataaaaaataaataaaaattgagccacgtaactcggactattatctagtaaccaatggaaaaaggcaaatatattgaacgtatcaaaactttatatcatcgattgagataatagatctgttttattattcttgggatacgtagtatttaagaattgcacaaatacgatcctttgatttacaaagcaacccctagaaattattttattcgataaagtggagtttttctttactttattccacaacagacccaaccctaattcgtttcattctctcgtttcttccccaaaattctcaacttctcgcgctcctaaccctagccttcccaatttcctcatcttctagatccgcttttgtgatttggtaaatctcttctctccctcacttctaatttcgttacagggcaatgttttttacttttgatcagccaatttcaaaatcctcgtttgtttttcagaaatttctagggtttttttttggtgtgtgttttatggattgttgctatgatttagctgaattttgttgaattaaactgttttcttttgctgtttagttctattcaaagttttgtactttgtggtgaagacccaattttgttgtttctgagtcctaattcaaagactggaactttaactctttagtaaatgtctctttgtgagtaaggcatttagctttctctcctctatatataaaggtgagattttgatgagttcttgagtgaaggaagagttaaaaatgtagggtattatctagagtgtgctaatctggtatcagagtttgtgtgggattgatttgtacagactattgcttttgaaattccaagatactcagtttgttttccctctcttagtgtgtatggaattgttgctatgattttagaggattacagaagttacttggtttggtagctgacttttgtgagattcaactatttccttgtgttcttttgctcttttgttttgcttagttctaccaaagttttatcctttatggtgcagctagcctattcaaagactaaaacttaaaccctttagtaaatgagcaactctttgtgattaaaacattcaagcttctctaatctactaaaaaggagagattttgatgaaattttggttaatgaagagcaaaaatatgcattttagttgcggccattgtgcttatctggtgtcagaactcagaatttgtgtgggtttgattatatgctagctacatttggcttttgcggtgatttgctattctacgtgtgttctctatacgttatcaagtctcagtttagttcaaactgattgtgaattcttacagttatatgcgctttttgtttatatttaaacatttgcacgcttgacatttactaaaatgaacttattgtcctatcccggtttgctagactgacccttttaccggctatggttgtagtttaggcgtattacttaagacgatacaatttgcttgtgtatctgatgtaacttttttcttccgtttcgagttcctcaggtttctgtgggtatgggaaaaggtaagcttatattgatttgtcaatctggcggaaaatttgtgactgatgatgatgggacaatg

SEQ ID NO: 30898 - DNA, 3003 bp, Unknown
  misc_feature (1)..( 3003): 2750-1469P.txt file - cDNA_ID_3036893; gDNA_ID_2213655; Annot_ID_181733
gtcaatcgtacactaataatacctcgatcacaaaaacttttaggttgtcccggagactctggagcctagtctacagttggcagctgctgttcttgctcaggtaaaacataaatgtttccttatttagttgaagtagtaatcctaaacagtgtatgatcattttttgggttgaaacatgtcaggcaaaattaccgacatcggaaattgcaaacacgattaacgagttcagaacccgtcacttgtctgaactgaccgaggtgtgtttcattgtcgatatatccatctatatttatcagaatctggtttggtctgattgatgtgtattgggaaatggtgtaatgataatggcagctatgtgaagcaagcggaagctctctaggctatgggtactctaggacgagtaagcctaaacctcaaccatcggatgcatctggcgataaccagataatcgaaggaggcacagtcgtaatctgatgacgttctccattctggtgagaaaaagaagagtatttctcctttggtgttcttcttaaaccaccatcaccaacttgggttgcagtgcgtggtgaagtgatggatccatcagatgatgtgtagtgtgactaatatattcattatatgttcagtacatatctctcatttaagtctttgatctcagaacaattagatttgaacaaatgcgtagcaatcgattctcggcggcagtaataacaaatgaaactacatcccgttcttgtactacagatgtgaacaccttgcagttgttggtaaaagactgaatgggccttcttttctttgacttcgactgaatgggccttaaatacagttggttttatggtccaaacaagatttacgtaattgtttgaccatcgatcattacaaaacaaaatagataccaagccataaattaaaccaaagattgggttaatgtcatgttccagaagcgagaatgataaaggcatgtaatatgaaaaatgtccaaaacacaagtgatgccccaacggaaaaaaaaaaaaaaaagaataagaaggaaaactactgatacaggaaaagccccaatagacgatgagaaaaaaacagttgctctcttttggccatttctatttgtagcttcatcagagcaactgtttttttttttgttaataatatatattgatatatttgaaacgttatttaggtcaaaagagagatttttaacaaaggaaagggccaaaagagagatttttaacaagaataacgctgaccaaaaagggaccaccaaatcacatttgccgaaaccacaagtacctcaacattataaaaacatccaaacatatatccaatgtactgtgcatgtcattattatatttgaggtcaaatatttaactaatgttttttttatgattaacatgcgagtttacataaagagttagtatatgataaactgttggaaaaaaaaagtagtagggtacatgttacgagaaaactaaaaaaaaaaattattacattgtactgacatatatgttaagaaaaaaactatatgtagcataaacgaaggcaaacgaaaatacagctcgaaaaaactaaaaaattccgattttggtgttaaaagagccaccagaaccgataacacaatcagcggcgactaagtttctttaagagagaagcatgagggtttttgaagagagaaagggtttggtttttgtacagtatttgttcgtttattcgcagaaaaaaaaacaaaacatagcagtcatggattctctttcaacgcctccgtcgactatgcaaaattccaccagaggctctcaatccttatcgtccctgctaacgtcaaatctccctccaccgtcgtttcagccaccaacgacaaatctcagtctgaattctctttcaacgccttcgtcgactatgcaaaatctctcactatacctcgggattctctagctcttgcacacttacaccatccatgctaacgtcaaatctccctctgctgtctaatctctctccactgtcgtctcactcaccaacgacgaatctcagtctgaattccctttcaacgatgtcgactatgcaaactttcaccggagactctcagtccgtaccgtctctgctaacgttaaattttcctctgctgtctaatttagggcttttattgtgctctatccaatagtgccaattctagctatggttgggttctccgtgtgcgagtgtattgtttgtctactcttctggtttcatttaggacaaaatgatgttgcagagcctgaagaagacatgtgatttggtctacttccgaagattttgatgattataattactcctttttattatatgagaattatatgttatgcacttctttctattctatgagaattatatgttatgaactcaaattaattctatactatgttttagaaacgaatgtttgctggatatttcttattaatattatattttgtgttgaaaagtgtttctagatgcgcatacaaattagttgagtttgagtagcaaatatgtatgctgcttttttcctacatttttcggtttgttatgttttcacatattcccttgggaatcgatccaagcggaaagcctaaaaagaagaatgcatcaattcgtgttgatttgtgggcttaagcccaatagctttggaccctccacactgatagcattttcttagggctatcaatgctaaaggctaaaacgagactgataattaaataagttgcattaattaagcaagtgtcacgcttcttcttgttaaaacgtttagtctgtgactaaataaatatagtatgacactgaaaaaactcctttcactttttttaatatatactataatgatgatccattctcctttgatgctaatttggaaatattggtcttatcaaaaaatataagaaatatagcggtgtctaatcttccatgtgcacacacttgtttatccctatttttttgtatatacttttttagttaacagcatgaggcttgacttttctctgtcctttcaacaattcaatg

SEQ ID NO: 30899 - DNA, 3003 bp, Unknown
  misc_feature (1)..( 3003): 2750-1469P.txt file - cDNA_ID_3036897; gDNA_ID_2213655; Annot_ID_181732
accttacaatgagaggctatcaatctggatttcatcactctcctgctccatctggccaaaagatcccactctactctgttgcacatagccgggctggcgataaaggaaacgacataaacttctcaataatcccgcattattccccagatgtcgagcgtctgaaactcataattactcctcaatgggtaaagcatgtgatgtcagttctgttatcaacctcttcgtttctggaattggatgcaaaaccaatggatgaaaatgtgtcagtagagatatatgacgttgaaggcattcatgctatgaatgttgtcgtacggaacatattagatggtggagtcaactgttccaggaggatcgaccgacacggaaagacaatctcagatctcatcttgtgtcaacaagttgtgttgtaagactactttaactttgcatatcagatttttctattcaaattctgtggtaatatgttaataaaaagggagacttgaactacactatagttctaaaagataatagaaaaagaaggaatcgacttagtggtgcttcactttcttttacttctatacattaaaattactttaatttacaactggatatcttgatagatacgcatacagataagtattaaaagcattgttttgattgagagagaatgatattatatatttgtgtaatgttaggttgttgttatattcttttgcaggatctgactgacatgggttgcaccacctcagagacagttggcttaaagtaacaatcccttattggattgaaattgtcagaaaccacaacccttcttttgctcaactccaatcactttgccacccaattttatctcattcattttgcaaaaaagatcaaagagagagagagagagagagagaaagaaaaaaaggaaaaaaccttcctccgttacaacctcacaattgcaacaaagtttcatataaaagaggacagaaatttcgcaggttcctccgttgtctgaggtaaaggtttccttctttaactaattcctcagatgacctcttgatttgttggaaaaaaaattaaaaaatctgtttcatacaggatcttggagaaggaaggaaacaacaacaaccaaaaaaaaaccaaaaaaaaaaaagataaaacaaaaaaaatgtctttcacaggaactctcgacaaatgcaatgtttgtgataagacagtctatgtggtggacatgttgtccattgaaggaatgccttaccacaagtcttgcttcaggtgtacccattgcaaaggaacccttcaggtgcactcattactcattttcttgttagatcttctatgatcatattatatcaacaatttatctatgtgttgatggcagatgagcaactattcctccatggacggagttttgtactgcaagactcattttgagcaactcttcaaggaatctggcaatttcagcaaaaactttcaaccaggttcgtattataaaatctctgacatcgaatctctctatctttcaaatcatcatgatcataacaagtctctttcttttctcaggaaaaactgagaagccagagctggtaggttcatcattacatgtccttgtatatgattagcgtgtcaatatttcattttctttcttttatgatcgactaataggatctgtgtactgatttaaacattacagactaggactcccagcaagatatcttccatcttctgtggaacacaagacaagtgtgccgcttgcgaaaaaactgtttaccctcttgaaaaggttagtggtatacgcatctgcaaatgttctcatggcctaaaataccaacgaactagtctcgtagagaaatttatttgctctagaatttgttttttgttttttcatttccgtagaatttttctgttcggataaaatcattactagatcaaatggaaataaaattttgattttggtttggtttagtatacttttggttcgatttgagaacgtgatgttggttggtccaagcaaatgtggaatcaattttggcttggttctaatcgggttatttggtaacagatacaaatggaaggagaatgcttccacaagacatgtttccggtgcgctcacggtgggtgtacgctgactcactcctcctacgcctccttagatagcgttctctattgccgacatcactttaaccaactcttcatggagaaaggaaactacgctcacgtcctccaagccgccaatcaccgtcgcacagcctcaggcaacactcttccaccggaacctaccgaagacgtcgccgtggaggccaaggaagagaatggcgtttcagagtcttgaatatctcttacatgagtgtttttgagtgaatgattgaatgaatgttgttgcgggggaaagatttgatttcatttgtaatgagttgtttccatatgaagacatgattttttttgttatttttttaattcattcgttatacatttattattacacacgaaaaaaaggcaagaattgatgttttttcactctatgtgtgctgcttatgatatgctttccgatggtgatgatgatattcgatgtaatatctgttcggttcaaagataccaaactacttatataccggatcaaaccaagtggttatcgggtgatgtgaatcattcattatttcgttaggtgagagagggtgttttcgtaaaagtatctaaaaacggccttagcaatgatgtctggttggcgagaaactcaaaaaggaggagacagagaaagttgtttgactgggaaaatttgaagagacgagccaaaattatctgtttgaaacgaacggaattgaagacgagagccactcctttccgtttccacctttcttccattcttactcaactttccatgattggttagcctctctatctgtccgtggcttgtcgttgattttttttatcttggtcgtctgaatgtgtggaatttcgttttgcttcacaggagttgtatataaggttcgaggaataaagtaaggctactttttttatttgatttccgatatg

SEQ ID NO: 30900 - DNA, 3003 bp, Unknown
  misc_feature (1)..( 3003): 2750-1469P.txt file - cDNA_ID_3036901; gDNA_ID_2213655; Annot_ID_181731
ttcttgtcgtttcctgtttcgtgattaaatctgatcattcttgttgtgtcatcaggtctatgaactaggttggaattggaatgacttggagctgctagctcagggaactctcgctggccaccttctggagtgcggttgccagctcactggtggatacttcatgcatccaggtgcgttttacgcttattggctcagggaagatatgatgaactactgttttccattatcagtatggtcatttcgttcctcaatgttctttaggtgatcagtatagagacatggctttccctcttctccaggatttgtcacttccttatgcagagattggctatgatggtaaagtatgtgtatcaaaggttgaaggtagtggtggaattttaaataccagtacttgcgccgagcaacttctgtatgaaattgctgaccctagtgcctacattacacctgatgtggtaagttagctgtacaaaatctagaagaaataactgtaaaaacggcggaaatatttgatttgaaaaccttctttgcaggtaatcgatattcgaggtgtttctttccttcccctgtcagactgcaaagtacaatgcagtggagcaaaaccatcttctaacacttctgtgcctgagaaactcttgcggttaattccaaaggttgttatccatagaaaatgctggtggtatttgattgatgctaaagagcaacctatgtttggttctataattcgtattttctttgcaggagtgtggttggaaagggtggggagagatatcttatggaggaaatggttctatacaacgtgctaaagcttcagagtttctggtgcgcctatgattaatatgtctatgatgtagtagcattttttggccccatcgtcgcttgaaatgactccttatggtgccttaaattggagttcatttcttatcaagtgtatgtacgtattttacttgtgttttttccttctttctttcaggttcgatcttggatggaagaaaccattcctggtgttaaccattgtattctttcttatgtgattggggttgatagcttgaaggcgacaagcaacggcactgaatcttggcagtcatgtggagatattagattacgtatggatggtctttttaaactgaaggaacatgcggtccagttaacaaaagagtttactgctctatatacaaacggaccagctggtggtggtggaattaggtaatttcttcacgttgatgttcgctccatatatcaatccaatgctaattgtagctttacagtagtaccaaatcctgttgagttgagacatcttatgactagggacaatgtattgaaactagttatttgttatgagattcggggtggtctttttggtttgacaaaactgcttgtaaattatatgcagtaccggacacaagatggaaattgttcttgaaaagcgtttggtaggtcgtctccatcaaaaaatttaaactaatatagccttgcatcaatcaattttacggattctgatgttatatgtttggttatccaggtcagccgtgaatctgtaatgtggaaaactggacttcagcacaccaacacttcagagccagagacctctgaacatcattctccagagaaaatgccaaaggttagctcgagagttcttactaaactaattgtgatgactgatagataatggaaataaacatgacctgaattcaaattccttggtgaatcaatcctagtgtgttcgaacatcaaactaactctgatgactgatagatatgttttactatttgaaagctgaaaatgtgaaagaactctaacatgtgcatttgtattaacaccttgttattacttccatttgtagttacctaaggaaaatccaaagaaccttacaatgagaggctatcaatctggatttcatcactctcctgctccatctggccaaaagatcccactctactctgttgcacatagccgggctggcgataaaggaaacgacataaacttctcaataatcccgcattattccccagatgtcgagcgtctgaaactcataattactcctcaatgggtaaagcatgtgatgtcagttctgttatcaacctcttcgtttctggaattggatgcaaaaccaatggatgaaaatgtgtcagtagagatatatgacgttgaaggcattcatgctatgaatgttgtcgtacggaacatattagatggtggagtcaactgttccaggaggatcgaccgacacggaaagacaatctcagatctcatcttgtgtcaacaagttgtgttgtaagactactttaactttgcatatcagatttttctattcaaattctgtggtaatatgttaataaaaagggagacttgaactacactatagttctaaaagataatagaaaaagaaggaatcgacttagtggtgcttcactttcttttacttctatacattaaaattactttaatttacaactggatatcttgatagatacgcatacagataagtattaaaagcattgttttgattgagagagaatgatattatatatttgtgtaatgttaggttgttgttatattcttttgcaggatctgactgacatgggttgcaccacctcagagacagttggcttaaagtaacaatcccttattggattgaaattgtcagaaaccacaacccttcttttgctcaactccaatcactttgccacccaattttatctcattcattttgcaaaaaagatcaaagagagagagagagagagagagaaagaaaaaaaggaaaaaaccttcctccgttacaacctcacaattgcaacaaagtttcatataaaagaggacagaaatttcgcaggttcctccgttgtctgaggtaaaggtttccttctttaactaattcctcagatgacctcttgatttgttggaaaaaaaattaaaaaatctgtttcatacaggatcttggagaaggaaggaaacaacaacaaccaaaaaaaaaccaaaaaaaaaaaagataaaacaaaaaaaatg

SEQ ID NO: 30901 - DNA, 3003 bp, Unknown
  misc_feature (1)..( 3003): 2750-1469P.txt file - cDNA_ID_3036905; gDNA_ID_2213655; Annot_ID_181730
acaagcttgggaatccagaagaaacttacgaagatttcaccagatctattcccgaggatgagtgccgatatgctgtctatgactatgatttcaccacccctgagaactgccagaagagcaaaatctttttcatcgcatggtacaactccctgcccttgtatttttaatgatttgaaaaattagatgttataattgagacatcaacttgcttcaggtcacctgatacatcaagagtgaggagtaagatgttgtatgcaagctcaaaggacaggttcaagagggaattggatgggattcaagttgaattgcaagcaacagatcctagcgagatgagcctcgacatcatcaagggacgagtcaatctctgaatggaacttaccgcatcttaattcgtttcagtcaaaattcatattttctgctttcgttttcttgggtatttttcatttaacttctttactatttgtatcttctgtgattcaagatctcacctctttcttttttccttttcggtacgcaataatcatcccaatagataattactttgcttccctgaacaaagctggcaatttcaagcaacttgttgatgctaatgaactaatgatgcaaagaacatacgctaaaagagagagtaaataggatgacatacctcacgtctaatttatcagaaaatcctcgcaattcaagggttttcttagccaattgttgaatggatactttcctttaaaaatctttgacatcaaataatattccgtagctttgttctgcatacaattaaaacaaaaaagaaacgtaaatcatctcagaattaaccagagaacaatatcacaaaatcacaatcttgcagcatacatgtcaaaaactcactatgagatttatacactttagcatgttagttgttccagtggaagcatgttaaagctgcagaaaagaatcagcatcgcacacaccttcagttctcggtacgatttttttgacttggaagattcccttttgtgtccatgagtttctttcaagaatagctccagtaaccgctgtctagaaaaatatatgaatatgatatcaactacaaataatgaaggtcatgcttggataacaaggctcatccccttacttgcatatagatgattgagtagacggatacagagctcctttagctgatgtgccttgctttctaccggttgttccaagaataacttcgtgtaagccagaatagttccaacacaaggaatatctaagagccaacaaatagatcacaccaccttttaagaaacaaagaaaggacacacatgtcatgtgaggaagagtattgaaaactaacccgcatgttaaagtagcttgcgcagtttctgaatgctgaaactctgatggtggtactggagctacaaaaaacagtggctggaaaggaattagcacgatatatgctagtaactactgcaatttccatgatacattggtataaagcagctagtgaaccttgttcaaacggaaggaagtcagaagttcatccgataatgggaggatcctctcatacaaagatcttcgcaagtgatcagctaaagaaaaattgtcaggactgtgcagagattgtccaacggtgatggtagaaatatacacaggctggaggacttggtaaagcaatgcccctgaagtaagaacacacaaagagagaaaatcccaataagcaaatcttaaattacacaacaaattatctgtcaaaattcagggtacagaaaccttgaactccaagaacattccatcgagctatcttatccgaacagctaacagagagtgttgtttcaccgcgaccaggctttctttgcaccatatctgctacttgtgagccattacctgaaatagagacatccaaagtaaattgataccaacatgagcctaatccgctttctcccagcttctaaataagaggaaggcaagctgagagaaaactcttgcagcattacctttgttgctattactacctatctctggaacatcagaatgccgagacgagcaaatatcagaagcttgaactaacaatgagtcatctacttgtgttgatggaatctttttcagggcatacaagggtgaactagtagaagcataaccacctacatatgacaaacacgtcaatgccaagtatattcttgaaacagataaagaaacgtaatgaggcaaattgaaggtaaattacatggcaattgagaaatgtacaaatgcaagaggcacccagatttgagcttatatttgacttctccaggacagcttgaatctgctgactctagtattgagcttgtttcgctatcaattctctgacgcttggcttcattactcttacctgaagtcaattgcatccgctgaatctcggaatagaagaacctgatgagagctcttctggcgacaacttcggcatgagaatcgttcacaatgtccccacggggactcagcagcgacccactaacgcacttggtccccgtccctaacgctatcactttcgggtctgcacaaaatcctaattagctctaaatcgaaaaccaaaaataaagcaaagagtgacagagaccttgggaaggagaagagacgaggaaagcggagaggacggtgacttcacgtccctgaggttttcccttcttcgggagagacatgtaagccgaaataaccttctctgatactgtctttccccaatcctcctccattgctacgattcccacaaacaagtccgttgattcattcatgctactcaaaaaaagcagattcaaggacccgcatgaaaatagttataagtttagggatcgttttagtatatatactacaaaattattaaagtaatcaaaatcccaatgggataagcatctttaactcacttccgtcactcgcttccttcacgtctctctcccaaaattcaaattcctcaggcctaaccaatcctgtgatcgacgtcgtcaaatattcaaaagcagtccgtgatccattgcatgatcctcttcctgtgggattcttactctcatg

SEQ ID NO: 30902 - DNA, 3000 bp, Unknown; identical to SEQ ID NO: 10496
  misc_feature (1)..( 3000): 2750-1469P.txt file - cDNA_ID_3036913; gDNA_ID_2213655; Annot_ID_181727

SEQ ID NO: 30903 - DNA, 3003 bp, Unknown
  misc_feature (1)..( 3003): 2750-1469P.txt file - cDNA_ID_3036917; gDNA_ID_2213655; Annot_ID_181726
aaatataaacggaggaactaggcagtgggaccggagatccaccgaccggaaacgaagaatccatagtaagatagagcccaggggttcggtcgtatcggaccggtcggatttggattctaacgacaagtgagtggacccccagaaacgacagacgtaagcaatgacaacatcaaactcatcgccacgtcagcaacggagttctacttgcgaaacgtgtcccggcagcgtcatccacccacgtgtgttctagaagctcttctcctcctccgtatctcgacacgtgtccactccctctccttatataattgacttttctctcattctttccaagtttcaaaaacgccaagtttcagaggtagagagagagatactacaattgattaggataggatcaggatcatcctcaacaacctcctcctaattcctcctccattcatagtaacaataatattaagaaagagggtaaactatgtcagaattattacagttgcctccaggtttccgatttcaccctaccgatgaagagcttgtcatgcactatctctgccgcaaatgtgcctctcagtccatcgccgttccgatcatcgctgagatcgatctctacaaatacgatccatgggagcttcctggtgacatactagctctctttctctttaatctttgccggattctaaatctgagattgttctctgctgactcaaattcaattttacaggtttagccttgtatggtgagaaggaatggtacttcttctctcccagggacagaaaatatcccaacggttcgcgtcctaaccggtccgctggttctggttactggaaagctaccggagctgataaaccgatcggactacctaaaccggtcggaattaagaaagctcttgttttctacgccggcaaagctccaaagggagagaaaaccaattggatcatgcacgagtaccgtctcgccgacgttgaccggtccgttcgcaagaagaagaatagtctcagggtatggaatcagatctgattcacatctttgtttcaatctcttgttctgtttctggtaaattgaatcaacggtgttgatttttgcccagctggatgattgggttctctgccggatttacaacaaaaaaggagctaccgagaggcggggaccaccgcctccggttgtttacggcgacgaaatcatggaggagaagccgaaggtgacggagatggttatgcctccgccgccgcaacagacaagtgagttcgcgtatttcgacacgtcggattcggtgccgaagctgcatactacggattcgagttgctcggagcaggtggtgtcgccggagttcacgagcgaggttcagagcgagcccaagtggaaagattggtcggccgtaagtaatgacaataacaatacccttgattttgggtttaattacattgatgccaccgtggataacgcgtttggaggaggagggagtagtaatcagatgtttccgctacaggatatgttcatgtacatgcagaagccttactagaagggaattcctttcctgccgccgaaacgcaacgcaaaacgaccctcgtttttgcgtttatggcaacacgagaccgttttatatggtcaatgagtgtgccgattcggccattagatttctgttcagtcttcgtttattctatagaccgtccgatttcagatcatccctaatcggacggtggtcgttggatgtatcagtagtgtattactgtgttaggtagaagaaaatccacttgttcttaaattggcataaaagtcagaagctaatatttatatgtgccgcaatcaatttaatattttctgtctacttaggagtaatggatacaaactagcgtattggttctatatttatttatcagctttcacagttgatctgacttacatttattgtgaacatatctaacaagtgtagaggagtaatggatacaagctagagtacagtgtgttagcagaaacgctataagatgaagtctgatgttgagctacatgttactgtccattgtcacttgtcggacttctttgatggaaagatgaactctttcacggaatcttgcgctgaaagtatcctctgtctgatctgcatatgcaaaatgtcatagataatatagagttaattggctacaaaaccccatcgaaccataagaaattgatttggtgttcaagagtaaatgagtaatcagtactctcaacatagagagagtaacaacagactaaaaactcagcaaaacaaagtagtcactactcattcgttgaagatccaggcaaacgcaacaaagctgagcatagaagtcaggaacattcatatctcattcaaagttttctaagatcaaaattcaaccctagcaactaacaactaataaagagatctaaccaatatcaattgaaaccaagtgattgtaggctgtagcaaatatctgcgattcgaagcgatgatgatcgagaaggttgacggttcgatttattaaacacaaacaaaaaaaaaagagagagagagagagagagagagagagagagagagagagagagagagagagagagagagagagagagagagagagagagagagagagagagagagagagagagagagagagagagagaaactcacaggatcaagagcgttgggctctggaccgtaatcagcggttaagaggaagtacgatacaacagcagtcgccaccacactggttaccttcaccaccttttcaatttggggattcatcgatgttttcgttcccagaaagaacaattccggtgattttggtttttttcaagtgacacaatgatgatgttatacgtttttttattggtaaaacgacacacaatccgatttgtgtaagaaaattcatgccgttttcgttcacttcaaatatgggcccagaaaggcccaaacatctcatcaagtcctcacggcgtcgtttttaagatccccgctgcgttgatttatggcgatctctttcggcggttgaaaacctttgaaaattgaaaatg

SEQ ID NO: 30904 - DNA, 3003 bp, Unknown
  misc_feature (1)..( 3003): 2750-1469P.txt file - cDNA_ID_3036921; gDNA_ID_2213655; Annot_ID_181724
ttttgtgtgtctgggttaaattttttaattacattgaggcattattccagtagggatcttccagataagtaactattacgagttactattcctcatttggtttgcaggatgtggtttcaccgacctctaagagccgacgagtggttgctctatgtggtagttttttctatccttgtttcttatgaacatttcagatcaaatgtttgttcagaataaatgaaaatgatttttggtatagagttgttttataaacttgtttgctgtaagaggttcacccacttacaacacaaaggatgctgcttgcagattgtgagtccaactgcgcatgagacccgtggttttgtgactggtcaaatgttcaacaggaaaggagaggtactctttctctattcttttgaaccctattatacatacatatctggaaatgataagtgataaaagaattccttttggtatgtgtttttgaatatgagaacaacagctggttgtatcattaacgcaagaggccctattaagagaggctagacctccaaaaccctccggcacgtcgaagctctgaatggctctcaacgtaagttaaataagatacattattacgagtacaaggcgacgaataaaaagatcaaaaaccaatctgggtgggtactaaataaaagattttattagacaaactcataatgtcaatgtagcacgctgtatgtacattgtttgattccggccttctcacctctatcatcatctatctataaattctcttgttttttttttttgttttaaaattctttctcacaagaacacctttagatcgattcgtgggccagaaaattatgggcccaagtatcaaattagttttcgtacgacccattttggatccgcgggggtatctttgatggaaccggtacacctgcttaaccggccggtttatagttttgtatccatttgtgatttgcgggtttctgttgccacctccccactctcctcgcttttgttggtcttggaaaaaccctgggattttgggtatctctgagcacgaattctacattctcatggctttcgaacacagaaatgaagacctaaattccttggattcggaagaagatctggagaaaatggagtcagaggtggagcaaatgtcgcgcaaggtttccgagtacaggaaaagcctaccgagtaatctgagcaattctgtgatttcttctcgtagatccaattttcccaacatcgattctttgggctttcgcacaactagcacaggttcgtacgtttctttgcttatatttagttagataccttccttctcctttggtttcagctggaattttagtctctttttctttctagatgatgtaataatagattgatcctctacattattcgtggatcattcttgtgaagaccaagttgtttagcagcagcagacttgccttttgattgtgatgtcgttttttgcatttaggtttgtgtcatgccatgcgtgtagaatattgtgatacttgctactataccctctggatgattatgttcatgagttattacgcttaattctgaggtgatgatacatatacaaggcttttccattacaataaatcatgtatttttgtggcttagaatcgacaagcatgagactatgtgatgatatgtttagctaagctgagagaaaatgattgtttagccaatttttgtttacagataccatgagataagtggccacattaggtgacactaagatttcatagcattgtaatatacacaagtctctagtgaactgctgttgtgataaccaactcatcagttattttgttccttgcaagtttggaagaacctctagtgtcaagagatggagcacatataggtggaatcgaacaagaatctcgagatagcctgattcagctcaaagaaagagtgtacgagaacattgccacagtgcctctagttgtagagagaatgcgagagagtaaagagagaatcgacaagtccatttctttcaatggaactactatgcacccggctttcacaaggcggaaagctagctaactgatcagtttctacttctccctattggctttaccactcaaagaaagctaatgcataggaggagatatggctggtatttctttctactatattagtatcaaccaacatctctcgcatttagaataagagtataccataacctctgttttgattgtgttctacattgaaacaggtctttctctgattttaatatggactcttatagaatcttgggctgattctacaccctgtatgtatatgtaagaatcacataatcagatggttgcacaattgtcaagaacacccaaatccaagcttgcgatttagcaatctcacccgtgtaagaaacttaaaaccataaaaccaattgatataagagcttttctagcaaaaacttaaaaatataattaacaccgtcgaaaatggtggaggctactagagcgagatataaactttatcaccgtttaatcgtgtgggattttgaaatgatatgaacctattgcaaaaagacaaaaaaaaaatataaacggaggaactaggcagtgggaccggagatccaccgaccggaaacgaagaatccatagtaagatagagcccaggggttcggtcgtatcggaccggtcggatttggattctaacgacaagtgagtggacccccagaaacgacagacgtaagcaatgacaacatcaaactcatcgccacgtcagcaacggagttctacttgcgaaacgtgtcccggcagcgtcatccacccacgtgtgttctagaagctcttctcctcctccgtatctcgacacgtgtccactccctctccttatataattgacttttctctcattctttccaagtttcaaaaacgccaagtttcagaggtagagagagagatactacaattgattaggataggatcaggatcatcctcaacaacctcctcctaattcctcctccattcatagtaacaataatattaagaaagagggtaaactatg

SEQ ID NO: 30905 - DNA, 3003 bp, Unknown
  misc_feature (1)..( 3003): 2750-1469P.txt file - cDNA_ID_3036925; gDNA_ID_2213655; Annot_ID_181723
ctgacttttgatatatattccaacgacaagcgtgtccaagtttcttccctcacttgtcattgcagcttacgtgtttggtgttgccgcgtgatcactgtcatttgcttgagactaattccatctggcaatcggatacgtcacttgacaaatgctctttagtggaacgcattttgcaactcgaccctttagaagtacgtacggacggtgttcttctttatcacatttctttctgcttctggcaactgaatctctttttctctgtgcttctttcttctagttgaatatcttcagggggatcacactacctgatgctcctatatttggaaaggtttttggaggacaatttgtcggacaggtatcgcattttctctaggaaggttacattattatgtctctgtaaaccttgctgatctgattcatgtgcatatatatattgcttgttaacagtgataaccgtaaccactactaagtcacttttaccaacattttacaggctcttgctgcggcgtcaaaaactgttgattttctcaaggtcgtccacagtttacactcctattttcttctcgttggagatattgacagtatgtacataatctcactggggcactttctagccaccaatgatgcctttcttccctattgaaacccaccctgctgttggattcatctgattatcatagtttgttgctcttgcttgcagtccccattatttatcaagttcaccgcatacgtgatgggaacaactttgccacccgaagagttgatgcagtacagaaaggaaatatcatattcatcttgctggcatcatttcaggtttcccattttattctttacaagatagcttatgaatctctacgtccacctgccaccaagagagaatagcctttcacaaaactgggaaaattgttttcttaaattttctcttttattactttcatagaaagaacaacaaggatttgagcaccaggagtcaaccatgccctctgtaccagatcctgatacggtaaatcatttctccagatttaagggttccaataaattgttgtgtgttttatttttcaccattatctgctacagcttctatcactggaggagttgcgtgaaagccgtataactgatcctcatttaccgaggtaagtggtagtgttttccaatgtatgataacttatatcaaaagctcaagttggaccaatcttccaattgtttctttctttcaggagttatcggaacaaagttgcaactagaaactttgttccatggcctatagagattcgattttgtgagcccagcaattcaacaaatcagacaaagtctcctccgaggttaacaactcgctgaaataaatcaattatatcatagagtactcttgagtgtatactcataaattccattaagtatttcttaaaaaaaaaatcaagaaactcacaatgccttcttgcagattgaactattggtttagagcaaagggaaggctttctgatgatcaagctttgcaccggtaagtaactccatctatgtatatcaaggtaaccatctaaaaattggtattattcatctggtaacaatcctttaaactttaaaggcaagaatgattgtagacaagtgaatcaatggtgttttagtatcccaagttgataggttgagacttgtaaaaggccaaactttcttaatagcattgaaaaactgacggtatattgaaattcaatttatcattcttagcaaactaatcatttggcaaagccatgttgatatgcagatgtgtcgttgcatttgcctcggatttaatattttgtggtgttggtttgaaccctcaccggagaaaaggggtgaaatccgccgcacttagcctggaccatgcgtaggtttttattttctcttggtgatgtatgagttttgtgtgtctgggttaaattttttaattacattgaggcattattccagtagggatcttccagataagtaactattacgagttactattcctcatttggtttgcaggatgtggtttcaccgacctctaagagccgacgagtggttgctctatgtggtagttttttctatccttgtttcttatgaacatttcagatcaaatgtttgttcagaataaatgaaaatgatttttggtatagagttgttttataaacttgtttgctgtaagaggttcacccacttacaacacaaaggatgctgcttgcagattgtgagtccaactgcgcatgagacccgtggttttgtgactggtcaaatgttcaacaggaaaggagaggtactctttctctattcttttgaaccctattatacatacatatctggaaatgataagtgataaaagaattccttttggtatgtgtttttgaatatgagaacaacagctggttgtatcattaacgcaagaggccctattaagagaggctagacctccaaaaccctccggcacgtcgaagctctgaatggctctcaacgtaagttaaataagatacattattacgagtacaaggcgacgaataaaaagatcaaaaaccaatctgggtgggtactaaataaaagattttattagacaaactcataatgtcaatgtagcacgctgtatgtacattgtttgattccggccttctcacctctatcatcatctatctataaattctcttgttttttttttttgttttaaaattctttctcacaagaacacctttagatcgattcgtgggccagaaaattatgggcccaagtatcaaattagttttcgtacgacccattttggatccgcgggggtatctttgatggaaccggtacacctgcttaaccggccggtttatagttttgtatccatttgtgatttgcgggtttctgttgccacctccccactctcctcgcttttgttggtcttggaaaaaccctgggattttgggtatctctgagcacgaattctacattctcatggctttcgaacacagaaatgaagacctaaattccttggattcggaagaagatctggagaaaatg

SEQ ID NO: 30906 - DNA, 3003 bp, Unknown
  misc_feature (1)..( 3003): 2750-1469P.txt file - cDNA_ID_3036928; gDNA_ID_2213655; Annot_ID_181722
gaagatctcctcatcaacgatcaggtttgctacttaatctaaaagacttaagagttatcttctgtagatcgtctcttcttcttcttctgaagaaaagttaattaagctatgattgatttcatatttggtgctgacttaagacttaagagatgttatacgtttaatatgggtttacacataatttaaaattttagcacttgtttttagtatattaataaatatttaaaaatatacttttatttaactcttaacacttgttttaaaacataactaaatgttaaattctccccactaatattattcccggtatctaataatctatatacagcgttcgtctttcttacataaggaaaacaattcttaatatgattttacttcaatttgaatcttactaggtagaagaaattaaaagtaattatactcatcattcttctcctctcattgttttgtctacataaagaacatcatcaatccaagcaactatgttaaaagctaaaccttcaagaactcttgaataactctctaacacagcttttccaacatcctgcaaaccacaaaccataaattgttataatattcaataaaacatgattcaggtcactgtttgtttcttaattaccttgttgcaatgaatcttgcaaatatctaacgatgtctgagacaattctgggtaccgttgtttcaaacagaagagcaaagactctgctctctcagccaaaacatagttcttgtcacttctctctgtaattgacattaaatctttcaccatattccatgaagacttggaattgttaagacaagctttgcgtctccatgtgtacattgaagcttctactctatctgccagctgaagcgcttcatgttctgatacaatcttgagacgatctagaagtttttctggtgaaaaccgccctgaactcgtcatgtgtcgatagattgcatctcctgtgctcgcttttccgctctgcaaatgcataatattgtaagcaagaaaatgacaccaaaaatagaaaaccaaaacttcaaaatcatcttaagtgtggttacctttggaagagttgccatgtaagaatcaggaatatccatttcaccgagtatgctgctattgatggccatagcagctttatggatttgattagtgctctctcgcttgctcttaagttgtttccttgccttctctgataaaccttgtaatggaaccagaggaatcggtaaccaccatttctcttctttcctctgcacaatcactttcctgaatgatccagttgcggaacgcgttgacttcatcgacaagcttccttcttctgcataccaaaactctgtcttttgaaaactatccaatgcctcctgcagaaaacaaagagaatgacttttatgaggaatattaaccgagtcaatcttattgatgatagcttcttgttctggtgtagtaactaccataagcatggaatctagttttctgagtgcaggcagattgatgtagatatctgctcttggtctactctccatgacctgacaaaaaaaccgcaacagctatttttaaactattgatgtttatttcagtttttggacttatatctataagcaaatcttgtttacctcaacagtggctccattgcttagattctgtgactttgggataaactcgaaaatatagtcacacacagagagaaggcaattcatttctctcttccacgtcgtcttctgctctatctccaatggttctaatcttagattctgtccaaaaacagtagctgcaaatctcaaaatcaaaagacattaactacagtttctctagatggcttagtttgaaagtcacaaaactgtgaggcgtattagtgtttagttaccataaagattggttatagcgtttgagattgtcactgcggtgcaaacgcctttgccgcttcctgacatatcttccccaagcagaagcttcgagaatctttccttcatcgtctccagctctgctacgaaaccgataacagtttcatgattataatgacaaagaggaaatacagacacagagaaagagagagagacggagaaacacaaaacctggctctgaaatttcttggaccgcaaggtgctcatcagtctcaatctgattatgtttcaagtcgaagacagttggaaaatttgagctcgcagagttgttggattcggttaagacaggccaatcactaggagaagcctcagtgcagaaactgctggtttcatctatttggtctgaaaagcctcctccagaggtttcagaacatgttcgatgataagcaaaagaatctgtgctcattgttgagtaaaccggagtttcagatgctgaatgatcatttggatcgatgggaccaggtgactgatgatagcccacatcgtcgttttcttcgtgatttggcaaattctccatcttctcaatgttctgtttttgaaaattcctctgcttttgttgatctcttgttttaataaaagaaataaagcttagaactttcgttgtgatgtatcaggaaaactttagaatatgaatctaaatccgacaattagaatcgggaattatttttgattcttggatagtgaaattttgaggaccagatagcagtaaagtagaagaattgttttgtttttttttggccaaaagcagagaccgttaggcgtgccaaaatcaaaaagcaaaacaaaacataaagaaacgaaaagaaagaaatgaagtaatcacaacattatttatcgaaactttcacgaagatttattttattactataacaaacatttcgcttatgtcgatcaagatacatgaaagtctgaaacttgaaattttgaaaaacgatattaaggaagaagaaaaaagcaacggtctttattttatttacctttaaggctttaaagcttctgcaaatttgtctttgaatttgaaacgcttgaatcttttataacgtttataaaacactctcttttccgcattaagctttctacacaatttatcggtgcccggaaaaaacttgaacaatg

SEQ ID NO: 30907 - DNA, 3000 bp, Unknown; identical to SEQ ID NO: 10500
  misc_feature (1)..( 3000): 2750-1469P.txt file - cDNA_ID_3036932; gDNA_ID_2213655; Annot_ID_181721

SEQ ID NO: 30908 - DNA, 3000 bp, Unknown; identical to SEQ ID NO: 10502
  misc_feature (1)..( 3000): 2750-1469P.txt file - cDNA_ID_3036948; gDNA_ID_2213655; Annot_ID_181717

SEQ ID NO: 30909 - DNA, 3000 bp, Unknown; identical to SEQ ID NO: 10508
  misc_feature (1)..( 3000): 2750-1469P.txt file - cDNA_ID_3036956; gDNA_ID_2213655; Annot_ID_181715

SEQ ID NO: 30910 - DNA, 3000 bp, Unknown; identical to SEQ ID NO: 10494
  misc_feature (1)..( 3000): 2750-1469P.txt file - cDNA_ID_3036960; gDNA_ID_2213655; Annot_ID_181714

SEQ ID NO: 30911 - DNA, 3003 bp, Unknown
  misc_feature (1)..( 3003): 2750-1469P.txt file - cDNA_ID_3036983; gDNA_ID_2214454; Annot_ID_182618
atggctcatagccatcaacttcaccttcgtacccgccttcacttgccaaatattcctccaatctcagagcaagaacaagatcatcgcctacgtgtctgctgtaaccttagggctccatgttttcttctcgtggctcctagtggttcatttcaatttcgggatcactggtgcaatgacctctacgctagttgcgttctggatgcctaacattgtgcagctcttgtatgtcacatccggtgggtgtaaggatacatggagaggattcactatgttggccttcaaagatttatggcccgtcttcaaactatctttgtcttccggtggaatggtttggtaaggtttcctaaaagcttatggaatctaaaagctctgcaaacaatataaatatcaattagtgatacttttacactgagaatctgatccgaccgttacagttacgcatatatattatacactgaatattttattataattcatgttacttttcttttgttatatgtttgattttttcttgttaatttactttactttttttaatttatgattattacttggtggtcgttattttttacagcttggagttatggtacaactcgatattagtattgctcactgggaatttgaaaaacgcagaggtggcgattgatgcactagcaatctggtaaataaacaagaattgaccttatatctcttctggtttccatactacacattttctttatactaactcgactcttaagttaaaatatggtatgagtataaatagagtaacatacaaattataatattttacaaatcgactaatcttttccatttcttttttgcagcatcaacgtaaatgcactgcagatgatgatagcacttgggtttttggcagcagtaaggtgcattgatatatatactatacacagatacacttcacttcactgatactaattatatcttatctttttttttcttggtatgatcttaatattatttatatatcactcttctatgtaattatctctatatatagtgtaagagtgtccaacgagctcggtaggggaaaccccgaaggcgccaaatttgcaacaatcgtagcggttttcacgtcactctctataggattagttctattcttcgtcttcttgtttctaaggggaagaatttcgtacattttcactacaagtgaagctgtggcagccgaagtcgctgatctttctccacttttagcattttccatcctcttgaacagtgttcaacccgttctctcaggtatatacattagctagttcaagcgtgatggttatcatcgtatcgaattcgaactgatatttgaaacgtagtatatgcctttaattggtttcaaaccttatcaggagtggcagtgggagcgggatggcaaggatatgtggcttacattaaccttgcttgctattaccttctcggaattcctgttggtcttgtccttggttacgttgttggtttgcaagtcaaagtaagtttttctctttatatattttttcttcataatgaacaaaagtaataaaattaacaattgaaaacaacataaaactttacttatctttttttgaagggtgtatggataggaatgctttttggaatatttgttcagacttgtgtgcttaccatcatgactctcagaacagattgggatcaacaggtttaaataaacaaaattgtagtttccccttccaaaataattagtttgttcaagcaagctatgttattggtttggagcttaattatattgtttgttgccacttttttctgtaggtatctacgtcgttgaaaaatataaaccggtgggttgtaccagaatctagagatgcaaatcaaatttcatcagaggaataattcgtttggattatgatatgaacaaagatattatataattatgatgttattttgggcaatagttctttctaactcagattttcaatatgaaataaattttgatggtaatttattaggctttttgttgttgttgttgttgttgtggtacaatgaaaaaagagagtacaatctatataatttattataatcaaagaagaggataactaaaatttattaatgagctatttaaaagataaaatcccttttagttctttaatttcaccaacatgttaactcatagtaaaattaaactttggtagaattttgagatatactagttattgaaatagtgcgaattagggtatgaccaataaaaagaagagagtacctttggaattttggggaaatttgtgtgcttactactatgatgacactaaaagagattaaaataatcatgttttataaactgattaccatttaaaaaaaatgaaatttcttcgtttatcataggaaaagtacaaacatgtttaaagaaattatattggtaattatttttaaaagatcttcgtggctaaaacgttaaattgattgattcattttgacaaagaaaaataaacgtttgattctggaaatcctcataataaatatatacgacaatcttaattcactaaaaattgtaattgcttacgttgcttagaacaagaatttgactattgtagtttgatatgctcgtttcttgattttttttttatatttttattttttttaaatgggtttattatgcaacacatagacacgagactcacgaccaagaaatatgtatatgaataattatatttttgataaaaatattttgttttattccaatatactttccaaacacacactttttaagcatatataaagataaagtttagatatgaattatagataattgcatttaaacaaatgatcgatgaatgcacgatcttaggtgatcttaaaatgcatctatttcttagagtattttcatcacttagtcactcactgctacaaaaggcgttgacgaccttttgtttcccagctgaaatataaaaaaaattgcttcttaaactcaaactctctgctctctctttcttctatttatttcctcctatcagataaaaacacatagactccacgatg

SEQ ID NO: 30912 - DNA, 3003 bp, Unknown; identical to SEQ ID NO: 30911
  misc_feature (1)..( 3003): 2750-1469P.txt file - cDNA_ID_3036983; gDNA_ID_2213656; Annot_ID_181781

SEQ ID NO: 30913 - DNA, 3003 bp, Unknown
  misc_feature (1)..( 3003): 2750-1469P.txt file - cDNA_ID_3036991; gDNA_ID_2214454; Annot_ID_182616
taggcttcatcggacaaactcgagtaacaaattcgaaaattgaaaagcttgactatacataactcaaacttagagacacaagctgcagtaaacttcataggagatcaagagaagtgtcgaaactaactaacacaagcatgcccatgaggaaggaagggataacgaagaaactttatgagttggcaactctctgcgacatcaaagcatgtgcggtaatctatagtccgtacgagaatccagtggtgtggccgtcaatcaccaacttctgtagataacaataattcaacgttagagaaaaaagaagaagttaccatcaaaacaattaactaaaagtgttttgaaagatttacaagggattttaaaagggttttataagatttacaagagatttttaaagggttttaaaagatgtacaagggtttttaaaagatttttttaaagaatttacaagaaaaccctttaaaaactcttgtaaatttttttaaaaccttttaaaatctcttgtaaatcatttaaaacctttttaaaatttttttgatggaaaatagatttactagggattttaaaagagttttaaaatatttacaaagaatttttaaagggttttaaaagatttacaatggattttaaaagggttttaaaagatttataagggattttaaaagagttttaatattgataaatatatatttatatttatgacgagagaaataaaaagaagaaaaaagtaaacgtacgtcattttagaagaaaactttttcttttgctatatgtagaggaattaaatcttctactttactctgctttttgacttttcaaaaagaaaaagattttttatttacaatagaaaagtatattacattacataatacacaatcaaatttcatatttcaaataataattcagtaaattttgtaatttattacaatatctttatttaataattattttgtttccagcacataaagtatctacaatactattatttaataaaataacacaaaatattatgaatatttctgatttataagaaataaggttgaattttgatgaaattcaaagttattatatttcacatataatcaggttacctaaaacacgaatataacatatgttcttaagttaataacattatctaaaaactcttaaaatgatccaaaatgtcaactgtaactcataaaacgttaatgtagattttagtacaaatttaaattaatatatttaaaagttttatcaatcataattattatatattttggtgatttttaacaaaacttaactaatctttctttttttttgtaatcaaaacgcaaactaacgaaaccaattgtgaaaattttgatttacaatattaaagtatacataatttattaaaaacataacaaaaataacatcattgaaaacctttataaaaaatatataactaaatgctgtgactactttcctaagtttctctcaagtttttttcaagttttgctcaattatttatttggtaaattatatgcagaaaaacaaaacaattccacaactttttctcaaggttttttttttgtgtgctcataatttataaattgaaattagaaagatacatgaagattaggcttcatcggagaaatccgagtaacaagttcgaaaattgaaaagcttaaccatacataactcaaacatagagacacgaactgcagtaagcttgataggggaagaagtgtcgaaactaactaacacaagcatgcccatgaggaagggacggataacgaagaaactccatgagttgacaactctctgcgaagtcaaagcatgtgtggtaacctacagtccgtacgagaatccagtggtgtggtcgtcaaccgaaggtgtttaagaggcggttttaatgtttattaaaaggccggcgatagaacggtccaagctgatgatgagtcatgagacctacttgtagaaccaaattaccaaagaaacaaagaaactggagcgtctacgtcttgaaaaccgagaaactcagcttacacattttatgtttgattgtgttgagggtaagataagtgagcatcagtatggtgcaagggaccttcaagatttaagttttcatattgatcactatatcaatcagcttaattccagggtcaagatccttacaaacaatggtgagtcttcttcttccgttcctcctctacttcatacttcagttgcgggtgcgggtgcagctcctcttcctgttgcgggtgccgatcttccgatggatcagaatcagtatgagccgattcagctctatatccctattggtcttagttatcatattcaataccaacatgaaatctatgataatttcagtttggatccaaatcattagtatccgtttcaacatgatccactcatgaatatgttgatggaatatccttatcaacaagtgggttatgttggagagcatgcgcacatccttttcatgaacggaaactactacaactaccaccaaacaccaaccgttggtcttactaccaccggtcacatgccttccaacaacaacaccacccccaccaccgatgtgtgatgtgtttcaatagtttgcatttttgttttgttcgtttcaaaaaaccttaaactcttacaacaattaattggatttggtttggttataaaagatgtgtctattcaaacaccaacttttggtaaaatatttgtagaggccatacctcgctgtgatatatatttcgactatctcatcccattttttgggtgatttgttcaaaactagctatgtctttttcggtatgcaatgtataaatgtaaatgtaattttgacaaattttaaattttatttaaaatttatttatgaaaagtattcattttgcatataaaataccaatttggcaaattaaagaatcttaaaaagaggtgtaggccggcttttcatttcctccgtacgtaaataaacaacccaccaaacaaaaatctctcctcgctccatgccttctctactctctcttcattctctcctaagctatg

SEQ ID NO: 30914 - DNA, 3003 bp, Unknown; identical to SEQ ID NO: 30913
  misc_feature (1)..( 3003): 2750-1469P.txt file - cDNA_ID_3036991; gDNA_ID_2213656; Annot_ID_181779

SEQ ID NO: 30915 - DNA, 3000 bp, Unknown; identical to SEQ ID NO: 10514
  misc_feature (1)..( 3000): 2750-1469P.txt file - cDNA_ID_3036999; gDNA_ID_2214454; Annot_ID_182614

SEQ ID NO: 30916 - DNA, 3000 bp, Unknown; identical to SEQ ID NO: 10514
  misc_feature (1)..( 3000): 2750-1469P.txt file - cDNA_ID_3036999; gDNA_ID_2213656; Annot_ID_181777

SEQ ID NO: 30917 - DNA, 3000 bp, Unknown; identical to SEQ ID NO: 10516
  misc_feature (1)..( 3000): 2750-1469P.txt file - cDNA_ID_3037003; gDNA_ID_2213656; Annot_ID_181773

SEQ ID NO: 30918 - DNA, 3003 bp, Unknown
  misc_feature (1)..( 3003): 2750-1469P.txt file - cDNA_ID_3037026; gDNA_ID_2213656; Annot_ID_181765
caaattgcaacaggaagttgataggagccaagtactttatcaacggttttcttgctgaaaaccaattcaacgccacagaatcccctgactatatatccgctagagactttgacggccatggcacgcatgtcgcctccattgcgggtggttcatttgttcctaatgtaagctacaaaggccttggtagaggaaccttgagaggtggtgcacctcgtgctcgcatagcaatgtacaaggcttgttggtatataaacgagctagacggagtgacatgttcattttctgacatcatgaaagcaattgacgaagctattcatgatggtgttgacgttttgtcaatctctctcggtggtcgagttcctctgaattctgaaaccgatctacgtgatgggattgctaccggagcattccatgcagtcgcaaagggcattgtagttgtttgtgctggtggtaatgctggcccatcatctcagactgtggtaaacacggctccttggatcttaacagtggctgcaaccactctagaccggtcctttgccacacctattatacttgggaacaatcaagtgatattggtaaaacagagtagctcttctacaaatgtcgtttcttcttttctttaataaaaaaaacaagttaggccttcgaactctctgattatgggtattgttactgcagggtcaagcaatgtacataggtccggagcttggcttcactagtttggtttacccagaggatccagggaacagtattgacacctttagcgggtaattaatgataacaaatctattggtgcttgcttagaaatttgttcagtttccctaaagaacattattctctgatatccttctgaatacgtaacatttttcagtgtctgtgagtcccttaatctcaactctaaccgtacaatggccgggaaagttgtattgtgtttcacaacagcaagagatttcactgttgtatccacagctgcgtctattgtgaaggcagccggtggtcttggcctgatcattgcaagaaacccggggtataatctcgctccatgtagtgatgattttccttgtgtagccattgacaatgagcttgggaccgatatacttttctacatacgttatactgggtatgaaactatgaattatgatcttcacttcttatattagcacatgctcagttgtttcattcccttcaagaaacacataatcataagaaaaaaaatacagatcacctgttgtgaagatacaaccttctagaacactcgtcggagaacctgttgggacaaaggtagcaactttctcatcaagagggcctaactcgatttccccagcgattctgaaagtatgtctggatccttattttctgacttatcagtttttctgcaatatctctaattttttacacaatgcagcctgatatagcagcacccggtgtgagcattttagctgctacatctcccaatgacaccctcaatgccggtggatttgttatgcgttcaggaacatcaatggcggctccagttatttcaggagttattgcacttctcaagtctttgcatcctgattggtctcctgctgcttttagatcagccattgtcactacaggttctttatcttcttgcaactagaaaagcaagagaaacttgaatcccccttcaactcaataatcttctttattttgtagcttggagaacagatccattcggagagcagatagctgcggaaagttcatccctcaaagtacctgatccgtttgattatggtggaggcctcgtgaacccagagaaagctgcagaaccaggtctcatactcgacatggactcacaagactatgttctctacctgtgttccgctggttacaacgactcatcaatctctcggcttgtcggtaaagtaacagtctgttcaaaccccaaaccttctgtcctggatatcaacttaccttcaatcaccatcccaaacctcaaagacgaagtcactctcaccagaaccgtcactaacgttggaccagtcgactcggtctacaaggtcttggttgagcctccgcttgggattcaagtggttgttacaccagagacactagtgtttaactccaaaaccaaaagtgtctccttcacggttattgtctcgaccacacacaaaataaacactggattctactttggtagcttgacttggactgattctatccataatgtggtcattcctgtttccgtgagaacgcagattctgcaaaactattacgatgagaactgaatgattcgtaatagttatttattacccccaaacatttgtttcttacacttcagcctcgtttaataaaccactaatctctgtgttgacaatgaactagaatttagttgaccatgtatgtagtgagtgtaaaacattctttagtttctgagtgatccaattccaagaaaatgtaaacattctttgaaggagacatcagacctctatgtataaaatgttcgtgcttccacaaccaaacctttttttttttgcttggaatgagaaattttgtcatcaattcttgtggtgctatgtccgataatagcttcgctttgcttgtgttgtgataatctcaagtaggtttaggttcatatacagtgtatatggattggccgagaagcagcatgatgatatatagtgcatgctcgtactactcacaagctagctagctttattatgtataaatagtataatcttccgccaagggattggcatggaacatagtaaggaaagtgctgcagatactttgaaattattatatcttgttcatctagaatacattagaccccacaaagaaaacaaaacattcttggccacacaaagaccaagacatttccgtttattttgaattttcgtctcagtctcccacaagtcgtacgtagtataattgcatacaaactaaaacacgtttctatatatatataaatgctggtgcttctttaaaaatattcaagtagattgaaagaaagtgaaggaacactatttcttttctggaatg

SEQ ID NO: 30919 - DNA, 3000 bp, Unknown
  misc_feature (1)..( 3000): 2750-1469P.txt file - cDNA_ID_3037034; gDNA_ID_2213656; Annot_ID_181763
aagtattgaattcaaagtatctgcagtgatttacttagtgtgttccttccatgccaatcctttctacataatcgtttaatcttttcgcagcaggaacgaaatcgccgtcgccgaccgtcacgacggagactcgtttttgtaatttgtaaaagataagtttcttctgcaaactcatgttcgtgaaatcaaaatttgtgagcatctgaaattttccgatgaaaggaaaaaaaagaaaagaaggatgtgatactatcggagaagatgattcgaagctttattgggcttttgattcggatttaaggcccatttaaaatataagctcttcaagagtcaatattagccattgacttaggttgattgattgaatgcggaagataattttaattgttaagataaaatcttaattttaaatgttacatgaaacagaaatcatttgattaaaaatatattttatgctagaatatttttgttgaataaattaagttactcaacaaaaaccaattatttgtggtttgatagtttacttttcttcttgtgacttgtgagagataaggataatttagaaaattttgctcaaaaaaatatgaaaggataacataaattttgaagtatgtacagtatagagagtattattgctaataatgatattcttacaaaaaacttaaaaatatggtattctgaagaatttagaattgtcttagaacagattataatcatatgattattcaattgttctttcttccggttaccaattggtccaattttgtcatcactcgaccaaagccggttcaagaacatgcaacccacttttttgaatttcgaattgtgcagcactgcatgattccccacaccttcgtcttcttgcgaaactgactataatatccttgtctcccgtccaagagcttggtgagaattttttatttttgttattttcgaaatttgagaattttaattactatttttttttttattttttttttgagaatccatattattagtttaaaaaaaatttagtttatttgtgcttttattgaaatttaagtacgataaatgggtgagagttgaagtatgaaggagacttacaagattgatttgcttcaaaaaacatttgcgtcaaaagacacacaatgaagaatgatttattttgtttctatatttaaaaacaatttgtattaatttatatatacgttgatttatttcttttaaatataatttaatattagcttaaaaaaaaatagtgttacttccttactggcaaaagaattagtcccttacaattatgacttttacaaaacatgaatatctattagatcatttaagttgtattaactgaccgtttataatacacaaaactgtctaaaatgttaattaattttccaggttttaaaagcaacaatctttatctaaatccaacatttttttacaattacatacagaaacgatattttgttttcaatggctagttacttttattgttaacatataacacattataaatttataatatatcgacatttatctagctttaaagataaaaatatatatctaaaaatacataaaatgcataaattctagattattagtttcgattcataaactatattattgtcataggccttaatagaaggagtaccatgacaaagttgagcattaaaaaacttccctgtcccttaatagttcatgataatcatttaatcaatgttcaagacaattctgatcatgtcgatgaataacgtagcatatcatatttaagagaatttaaaatcaaccgtctttctttagatgtttctttggttcaaagtaatgtgccttggccgaaataagtatggaactttataatatagtattaacgtgcttatctgtagattcaacccataattccgttaaattgatgggaaatggtactaatcattatacagaataagatatatatttaatgaagtttggtggccaccctggtctaaatataatgattaaaaagtcgaagatacataaattattatattaatctttgcatcaaaacattgatctattttatgaagattaataacgtcgagccccttaaactaatctcacgcttagattttgtctcatagtacaatgtaatttagctagaaaaagtggtttagatccacaacactaagcaaagttatggacattttatttgtatatgtaacaaacataaagtatctagtatggttagaatttgtacgaatataagaggaaacaaaaatgaaaattagttaacatagatgagaaaaaaaaaagacaatcgtcacctaattagagatcacataaatctattacgttcgagattctacctagtatcacaaaataaaagaaaaaagaatatgtataacgagaaaaattataatatatagtaaaagctatgtgtagtatttatttattttgaaattttgacatataatttatatttagaataatttcgtgaagagcagatctagtgaagagtatctaaaattccaaaaacaaaacaaattggtggtgttgtagattatagagaatataggggcaaaattggaaattcgcaattttttgtcttgggacggacagaacagtgaagctgcgaatcacgcgactcctttcgccagcaataatgacttttgattgagcaaccaaaaaaccacatattcgaaattaaagacaaaagcattctgcataaaaagatttaactcaaaagagaaagataaacaaaaaaaaatctccttttcttgttaagaatttagtccactgcaaaattcagagtgcagtgaaaaaaagatttttaaaaaagaaagaaagaaagaaaaggaggaatcaattacggacataatttgagtttttttttgttttctttttgctcatccaagaagacgacgatgatgtcgttttgatgagttcagctgttgttttcgctaagacaaccttaaaaataaagaaactagctttcctcttctctcattaaagagttttttttcgaaaagagttaaagaaaaaatg

SEQ ID NO: 30920 - DNA, 3003 bp, Unknown
  misc_feature (1)..( 3003): 2750-1469P.txt file - cDNA_ID_3037046; gDNA_ID_2213656; Annot_ID_181760
agaagtacttgctgctgttcaggttcagaacctgtggtgcctcaagagcagcctaccaacgatcaaagtaaatcaagttattgctcatgcttgtacgctattcaaacacagattctgcattatttatgaatttaatctctgtaggctacatgtttcaatcaaatgagaacccacgattcagaaacaacacaactgtaactacagaagtaagaggaaagagtgttacctgacacaacaaactgaaccggagttggttgtcattgtagtctactccagttataggaccatagattttggatcctgttttgcccacaacctgcattattaccattcctcattagctcaaagtacaatacacccttgtgattatctaaccaatataaacagaccttagcaagaaagattggatggtcaacaaagacacgatcaactcctcgtttgtagcaatggaagaaacgaacattctcaactttatccccaactttgatctgcatcaaataacattccaagatgacttacctaagcatccaaaattcatcaaggtccatacagagcaaaagaaacttgagagaattatacctgaaccacaacacaagtgtcccaagcatctttatattggtcataccgaggacaaattgtcatcacacggtggcctctagcctaacaaaagtcataacatgtaggttcatcaaaaaacaagtaaagacctcaaatcaagctaatgtttatatgaacttacagcaagagctggaggtagaccaccgagaacatcaccaagaccaccagttttactccatggaccaacttcagctccaataaaaatcacagacattcctttctcacacacaatcttaccagcagtcttaactttagaagatctctttgaggatttagcagaaacaggtttagcttgagatctcctctgaaggttatccaccatgttgaatgaccttaacccacaatgagtcaaggattggccttttaaggtaatctgagcgacatcagagcatgaagaagcaccatgattgttgaaaagtgaagttcttgacacaaagttagaagaagcagtcacagttgccattatgaactacccgtttacctggattcaacagatgaacaatcaaaatcgatactttaaatagaaagatacaatctttgacaaattttacattaaacagaagaaaaagctcacagattttcacggcaactgaggaaataagagccaatggaggagatgagaaagtgaagagagcagaggagaagaatggtcagttatgtagagaagaagaagagtggaggcttggactgacacgagtgacacgtggcgttgttatagttgttgagtggcgattttcaatcacatgatgagggtcaatactcaaatactcaatggcattgcctgagaatatgtgagaatcttgaggttatactttgggaggacgatattttgatgcgtacgttttggtccgagtggctaagaatcgacggctgagatttgttggttttgggaaactgggactcttttagtgggtcctatgcttacacaagtgtttctgttgtcgtcgtgcatcctcatgaacgtaccgttggacgacatttttcttggcccatttgttaaaattcacggtcgagaatttttgtcatgttttatttatttagttttgtgtaagcttaaccactgattattactaaatagcaatttttaagtttaaattgataatgtcaatgtgattgcataattttcaagtttcttgcgtatatatgtataatttagattcacatatatcagaggctagccaaataaattatttcaagaattttttcatgcaccatcatttttccttccctttcaattactttaagttatttaatttccattagtcacatcttaagtagtaatttgtttaacaaatcttggaatgttagaaaggagttaatgtcatgattatattttttggttattgtggacggttaggagtgatttgtcgcaacataggagatcgtgtgatgatgttgcaatctctccaagacagtttcacgcatccacaagaacatagtctttggcccattttgacgttaacttttatttcttaaattcggacacaaaattatgattcgtgaaatgaacattttatattttcatattataatctcatgatcatccgtccaaattcttcattttaacataaatttaaaactaagtctttattttttaacagaaattccatcatattattttttaaaaccatgtttattcatgtctcacaagtctataatattaaaaaccataatcatactgacaatctaataaatccatagtcagaagaaaaaatgtcaccataaaaaaaataaattcggatatgaaaaaaaaataaactcggaactaattattatccgaattcgatgctctcttataataccatattgaagtaaaccttaccggaacaataaattattgttaagatttggacatgtagccgagaggataccacttgagctagccaaaaccaaaggagtcaaggaatcatcaaggatctgatgatgttgttgtggtgattatcatctctatgattccaaccaaacattggaacataactccaatcatttccataatttagttatttttttaaaatgagatataagatcaattacttaaatgaaaatgtgtgacaattcagaaatagtactagatatgtgggaatagtgtattacacaaaatctgcagtttccaagtagccttgcaagttgcaacgtttaagtcattttcttcattggtgggtattcgccgaaattaaaaggtactatcacacagtactactatacagtaaccggccactagtggctaaaaggaaaaaaaaaatatccaagtaaaatggaaatagtcacgtaatttctctcctacacatttacatcttttataaattctctgactcacacagtagctttccaacacaccacagtctttttctttttatcttctctacaaaacaacatcctaccatg

SEQ ID NO: 30921 - DNA, 1345 bp, Unknown; identical to SEQ ID NO: 10509
  misc_feature (1)..( 1345): 2750-1469P.txt file - cDNA_ID_3037074; gDNA_ID_2213656; Annot_ID_181751

SEQ ID NO: 30922 - DNA, 3000 bp, Unknown; identical to SEQ ID NO: 10721
  misc_feature (1)..( 3000): 2750-1469P.txt file - cDNA_ID_3037097; gDNA_ID_2213670; Annot_ID_182269

SEQ ID NO: 30923 - DNA, 3000 bp, Unknown; identical to SEQ ID NO: 10525
  misc_feature (1)..( 3000): 2750-1469P.txt file - cDNA_ID_3037136; gDNA_ID_2213659; Annot_ID_181814

SEQ ID NO: 30924 - DNA, 3000 bp, Unknown; identical to SEQ ID NO: 10523
  misc_feature (1)..( 3000): 2750-1469P.txt file - cDNA_ID_3037140; gDNA_ID_2213659; Annot_ID_132512

SEQ ID NO: 30925 - DNA, 3000 bp, Unknown; identical to SEQ ID NO: 10527
  misc_feature (1)..( 3000): 2750-1469P.txt file - cDNA_ID_3037140; gDNA_ID_2213659; Annot_ID_181813

SEQ ID NO: 30926 - DNA, 3000 bp, Unknown; identical to SEQ ID NO: 10521
  misc_feature (1)..( 3000): 2750-1469P.txt file - cDNA_ID_3037148; gDNA_ID_2213659; Annot_ID_181810

SEQ ID NO: 30927 - DNA, 3000 bp, Unknown; identical to SEQ ID NO: 10535
  misc_feature (1)..( 3000): 2750-1469P.txt file - cDNA_ID_3037195; gDNA_ID_2213660; Annot_ID_181835

SEQ ID NO: 30928 - DNA, 3003 bp, Unknown
  misc_feature (1)..( 3003): 2750-1469P.txt file - cDNA_ID_3037207; gDNA_ID_2213660; Annot_ID_181830
aaattgtcacagccgttttcgatgcacatgatccgacaaccattttggttgtaatgatcctgaaaaccttcacactctcattacataacgtcgcaaatttactatacaaccatttcttgacaaacaaatcggtcactagctattcttctgttttttttatttttcttgtaatatttatatatataacgagtgtgacttgggctttgacaatgttagtatagctttaaaacgggggaaaaaaaaatactagaacattaagttttgagggtgcaaatatgtaacatatgtgttgtagaaatactttttaaaatttcaataataaccttggtttagtttccattgtttgaattggtattcatatctgactaccgtagaattcaatttgttagtgcagaatctgaaacagaaattgtgttgtctgtatattctttttttgggctctcaaatatttcgtgtatttttgtggaattttatataaagttggtgtcttttttaggacttttcgttgcattcaattatgttgaatgtgtaaaagtagtggctttccttggtcacatttatcaaacgtgttttcgcctttctttaattttccgtgttcaagtgaattctagctaacttttcggttttacgttgtatgaaaataattggctgtcgtcggtcacatgatcacatagagtttatttgattcaaatccatttaatatatgctgtatctttaatgcatacatagagatatattattatacgttatcttttaataggacattatattttgtttatatgaaagaaaagaatgtactgtatatgcagttatattatgctggtttatgtcaaagatagaagttaacgcaaattaatttctttatttcaattgtgttttgcgttacgatctgttttttttttttttggacaaatgacttaagattttattacttcatttgatattaataaattagtatgggtgatgcaaacgacttgaaggctagggttggtaccacggctgctaaagtctacttttggttggatctgtggtcggaagatcttgacgtgatcacttctataattgaggattgtgtgttgctgctactctcctctcacgataactcacgtggcctttttcttgtttttctttcttcatattttcacaaaacaaaatagtcagagatcttgagagattttttcagaagcatattgggcccaaatgtggacaatttcatgtggttgaattgttaaatttcagatagattagacaactaatcttgttgacgtgcatgcggtgaggatattaagtcgctatacgtcatatacgtgtatacttaaaatctcgtttgatatttctttcttttgtttttatcttcaacgacaattattgcctcaggcatgtcagcagaaaacgacaccgttcatattcgatctcgttattaatatgtttttgaagcaaaatatcattattagctatggagtttctgcagtagcctaaccggaagtctcaaaaagataacgtttatgccggttataattaaatccgataaggcgataaataagtgaacccgtaaagtctaaaattttcacatatatatgaacaaagaaatagtctatagatctccatgcattcttgtacaaacatatttaattttttattttattttctttatataagagttggtgtatgaaactttacattttgtaaatactaacattacatcataatgtcagaaccaataattctagtggaatgatataatctccactttaaattcttatgtctttatccaaagagatcatgaggaacttgagcaaaggaagagggcaccgtttagtagtataggtgaataacgtggcggacacgaggctggtctcattttcaaataaagagagatagagagaaaatggaaggaaaaaaaagctattggcgatgttgatatttgttcgtcttttagtggagacgaccaagagattttgaaaggtcgtcgaggagttagtttattatcttacaattattatggatttcttctgactaaagttttagtgcaatagttttctgagttattatatatttttcgaaattcatccaaaggctaaaactttgtaaggtattctgagtctattacgctagaaatagacacgcttacgtttttaagtcattttaatctgatatatatatatatatatatatactacaattttataaccaattatctttgtttcagacaatttatataaattcatataaactatcagaaataaagagacaattggctgtaaaattgtattattttgcatctatgaaatttttatttctctttatcaaaattgaagacgagttgaaattctatttcttttttaaaaaaatttatatatgggagtgtcaaaaaataattttcctttgtaagagaatattcgtatttggacgagtcttgatttgtgttttccgttagcgttccacattagttgtaaagagcgagaaagatttaagtgataattaaaaagacaagatatgcattttgaatatactctagatattaatcttaagcatttttcatattggttatattttatggtcgaattttgacatccgaaaaatacatcccttattcttcaatttatattgaatacttaagtttttgatagtaaatatgtataaataaattttaaacaattgtcaaaaagacattataacttatacggttatagttgttaaaaaaaaaacttatacggttataccaatagataaactgacattttagatttgagttttttttttttttactttccatgtagatagcgtggaataatacctcatttatatgtatcgttagttgaaataattgacaaaaggaaactattcgtttgctgttctagataaaagcctttaattgagaaaaagaaaatgcctccagctttgacccgttttgcctataaaaggattctctaagatatggactttcctcatcttctcgggtaaacagaatcaactagttttgtttttcctctttcaaaaatg

SEQ ID NO: 30929 - DNA, 3003 bp, Unknown
  misc_feature (1)..( 3003): 2750-1469P.txt file - cDNA_ID_3037219; gDNA_ID_2213660; Annot_ID_132525
gtataaagaaaaaatggtgatatgtgaggatatttaactaatcactagtataatgaagcatatccatatcaacatataatactactatactagatcaaatccttaatagaaaaatcgtagtcgataaaaaagcaagtttagatcaaggtgaagtcatggttaatttatatgggaggatattgaactaatcactaatgtataattaatctttaaaagaaatatgaaattaggtcgcgataaagtgaggagccaaaaaacacaaacactttggtgatgggtttcgattgatgacaaagcatcaacttcttatgtactaaaattccatgtacagaattattgaataagcacagaaacagtatcatatatatggataataatgatattgattatcaatttaaaatatagaatttaattaagagattttactctattttatatataatcaatcgtgtttgctagttatactcttaaatactaaaaattgtatcaaaaataacaagttaaaaaaaaaacaggagcgtgcgcctagcccgcaaaatccacaatcttagaacaaggtggataataaggtttggtttttctaaaaccacggttcataacgagtgtccactagaatccaaaaaaaaaaaaaaactaatttcgtcgtagaacaaaaaaaaatagtgagacaagaccgatttgaaacatgtaatgatgtaatacatatgatgattttatatctatagaatgaagaattttaagctttagtttattctagaagacgtttattttgttaatggttgcttcagatgtaaatttatataagatcattttggtaggtatttactctatagtctatagtaatatacactctacaaactggcccttttggcactcatgtataaacacgagtatttaattttcacattagtagacacggtcctgcttcaataaatctattttgacattagttcttaacctcattgttgtaattatttacaaacgagattaaaacaaaacacatggacatttttggataataatatttctcaacatattgttctagctttgatcgttgccaatagatcaacatatttgttactctcgataatcacttaagcccaactcatgtggttttaatgtaatggtgaagtgtttcctttcaaggtgtagtgtagcttcaaattgcacatactagaatcccaaagattaatgcactaaattcaacctcttctgcatcaactccatttgaagtctgtataatccatccaaaacaatcatatcttgcgctgtccatatccaaaattatgtgaagcgtcataattacacttcatccacccttctgtcggcatcctccatggcattgatctggagcttcataaacacatttggtttgtattaaatatttatgaaaatccatagtcagtcacacggatagtgaggtagaaatttagagagatcatcttatgaatctttttatttaagcaacaagcttttatccgtgttagtgttactttttatcatttcttttggaacaacctatagtatttaatttattcagagcgttcttaagaatttgtttgataaatatattcacgtagtttcgactacgtatagaaactttatagcaaaatgaatgttgtgcgtacgtacattgtttctatggtagataagtataattccagaaagagttaatgaggaagaattttattactgtggcataggatgaattaaattgatctatataaattttatgttacaacttacaaacaattttcacatggatttataaagaagccgctataaataaaaacgattgtagtttagttttggggtattcgaataaataagaaacttactccttaagttagcaactttttaatactaaaagagaaaagagatacagaactttccaaaaaattattgaacatgttctgatacttcactaaccatattgaaacagatggcataatcactttaattatacaacacacacatcttatctatatatgttacatctattataataattaaaccagatttaatataaatccagctatttaaaattatgccacagtttgaaaagaaaaaataaacaacgtgagatgtctatgtaattagaaacaatgggggtcttttctagtcgcattctggcattcgttgagtcgattttttttctttgttaggttgatgttggaacaacagatagatttatttattataaaaaaaaaaatacaatgtatgatttaattaattgctgtgaactgtttaagtgtttctaactattacggaatagtcttaaaagaataatgcgactagtttatatagagttttcctatcatttcatcaagtttaatctttggttggtaagtgccagctcatgttctttaatagccacattgcacacatataaattgaaacagtttctagatttctacgtaaatgttttaaatatgacaaaaatttactatatgtttcgaatcgaaataatctagcgtagtagtattcataactaccatctaccaccaacattattttgatactgtaatgtttgcttttaataaactgtcgaaatagaaaggcgcaattagttgtatgtagagtaacttaatagtctactcatctctaaacaaatgtgaaaagacttttttctcgatcaagtcgacgaataacaaacaaatacgatagattttttaaaaattaaacttttcgaaatcataatacgtgtatttttagggaattttctcttctttttttctttctaattcatgtcgacgaataacaaaagctcaccatcaaacgaagaataataacacaaacaattagaactagaacaaaagaaaatgataaagcaattttattctcatgtaaaaatgacataattcaatgacgcgtgtcccaccaattatcaccactcactctccatatatacttcacatacaatctttcactcatatatataccacacagtcacacattctttataatgtaaatcaaaagagaactaaaccaagaaacaaaatg

SEQ ID NO: 30930 - DNA, 3003 bp, Unknown; identical to SEQ ID NO: 30929
  misc_feature (1)..( 3003): 2750-1469P.txt file - cDNA_ID_3037219; gDNA_ID_2213660; Annot_ID_181841

SEQ ID NO: 30931 - DNA, 3000 bp, Unknown; identical to SEQ ID NO: 10553
  misc_feature (1)..( 3000): 2750-1469P.txt file - cDNA_ID_3037235; gDNA_ID_2213660; Annot_ID_181853

SEQ ID NO: 30932 - DNA, 3003 bp, Unknown
  misc_feature (1)..( 3003): 2750-1469P.txt file - cDNA_ID_3037283; gDNA_ID_2213663; Annot_ID_181915
tataaataattcataaaggaggagagagaataacataactaaaaataattaaaaaaacgtttatgtagagagaaattttgtagtaatcattgagaaactatttgcataagtgactgtttataattagataattgaaaaaataaaaaaataatttaattagaaaattaagttataataaaatattacaatttaactcgccaaaaatatacgaatttaatacaaatatataaatggagaaacttcggctacataaaaataagaacagtgtacttttaaattctataatctccacaacttgcggtccacattatttttttgtaatatcaatttttatttttatacagttttctattgatggacatatacaataataaaggtgatattggaacttgtttaggaagtcgatcggtaagaaaataaaaagtcggtcaataatatgaatagaccaaatcgtgattgcattagaaagcaggagttaattgtttttgaaaatgatgaattaagtcggtgagttgctgcaaatactattattgactgactttttctataatatcggaaatagtacaatttaggagtttaattgttaaaatacgtacatatgaataattaattatgttaatcttcttgcagaccaccagctcgaaccatatgtgagttttgaacatgatattagttcaaataataagggattcagtaactaaattaaattgaattttgattacgattatcagtgcgttcatctagtaaatcaaataatatgatattttggaaattactatccattattttttatatgtaaatacccagacaattggaatgtaatggacaatatagacaaatagacagttaagttagttggagtttaggcgtcatatcgttgaaactttttatatatagcacccagagaattttattctaattttttttaataattaccaactatctttattggcacaaaccccaactagtagtcatcatatccagaaaacccaacgtgtattttcgctcattaaatccccaacttttaatatactcccttcgataaatactgaatttatatttatcgtattgtttgttcagtttcataggcaatgagccaatgactcgaaagtcagataatttatgaattgtagaaattgttgataataggactaaatttttaaaaatctacagcggcagtttataattgacaatcatgtttttcatttgaaatatggacagtcatctgagaatatttttgtgttcaatcagcacaaatatacaaattttaatctataatttcaaaaattaaattaggacgctttgatttggtattttttcctagttaatctttgcaggcggtggtttctttgacctttttattaaacacatgattatgccgacattaataaaaaaaagagagaatatgttcttattacggtgaatttactcattgaaactatgacttcaaaaatataatattataataagttatagtatatatgttcttattacttatggtatatataaaagttaacattgatatttaactctgtttaaatataagtataatttgatcattgtgttttgacataatatttttctccattgatatgaattctaaaataataaacatatatttatttatataccaataataaaattgaagattacgtcacactaccaccaattggttgataatttacactattttattccttcagcttaactggtaaggttaagaaacacaccacaaatggttgctaaactcttagggtcgtttgataaatgtctaatcaagctacaaagtacgatcacatatataatttagattatatatattatccattaaaccacatccaaataaatatccgaactgagaactcattgaaccacacccataggcatagctatatgtactgcatatcaattttatgtgatcgattttatcatttactctcgtatataaaccttcatagaaacttaaaatttcaagtttaacaaaatgaacattaacatacaaattcttttgaggttttcattagggattcctttcagtaggataataaaattaaatagtaataaaattttaaaagggacatattttcaacaatatgggtccacataacacgaagaggagccaaaccttttaacacttttgagtggtatattttccttcaaacgttttttctgccatacgactctttattttctttccaaaagaggttattttcaaaaggtagatgaaggtcatgtggctatcgaacccatttttttctggtggttggctaaggaaccccataagatgactatactgacatagtcctatgtaatgtacaaggaaaaaataaactaaccctcatatggaacataaaattattcgacagacgtgtcaccctatggatctaaaatttaatggtaggatctaaaatctaaaatatgaaaatttgtggaaaattccataaccatcccaataaattaattgttacatatagcaatattttattaattaaaatacagtttttatttgacactaagaagaaaaataatatttagcttatcttgaattatatatataaattgcttattaccctgaatttcatacagatatgagatatcatttaagatatttttgagtgttttctaattgtggggctttttcaacaagtaaggaagttgcttagagcttacgtgtctcttctacatcaccaaaaaaataagaaaaaaacaaaacataaagaaaagaaacattattgttttttttagctcttatcttcctctatataaagacattttttttctaccttcacatacttttattttcatttcctttaactgcatagttcttcctcaaattgctcatacctttgcttctctttctttctttattcaacctcttatttcttcttcagcaccaacgtgtatctgcagtaaacacatatccatcgatcgatctcctcaaaaagttattgttttcttgaaggatttttcttgttcttgatcaagcatacatatatatagatg

SEQ ID NO: 30933 - DNA, 3000 bp, Unknown; identical to SEQ ID NO: 9384
  misc_feature (1)..( 3000): 2750-1469P.txt file - cDNA_ID_3037283; gDNA_ID_1972110; Annot_ID_178755

SEQ ID NO: 30934 - DNA, 3003 bp, Unknown
  misc_feature (1)..( 3003): 2750-1469P.txt file - cDNA_ID_3037287; gDNA_ID_2213663; Annot_ID_181913
taaaataacaataacttaagggatgcaatttatacttataaatttccaaatttatataacatgaaacacatgaaaaatatttcctctcataggctacagctagctaatataaaataaaatccacgctttttatatgcttaatttaaactctaattattaactctaataaaacctagtttaagtccacgtataatttcaactgatattcaataactaataatttatatatttgttgcaatctctgtaagactatcggttaggttaatcattcaaagatatcttcgtttcataaaacaagaaaaaaacaaaaaaaaacaaattttcaaaaagaaaaaaatctatttgaggagaaaaatagctgtgagagagaaagctaaagaggcgacgtaccacccacctaaccacaaccagatccccaaaagacagagaactttctcgatacgaacgccaaagagaagaagacgaagacgaagatgatgggtgtgttgaagtcggcgattggggatatgttgatgaccttctcttgggttgtcctctccgctacctttggaattcagacggcggcgattatctccgccggtgattttcaggcaatcacttgggctccgttggtgattttgacgtcgttgattttcgtctacgtctcgatcttcaccgttatcttcggtagcgctagcttcaatcctaccggaagcgctgccttttatgtcgccggtgtccccggagatactcttttctccttggcgattagattacctgctcaggttttctaaagatccaaacttttttctgaatttttaaacttttttcagcttactgttttgggtttacttggtttctatcaatatttgtgatctgtgatagtttctttcaaatgggtataggcttgtgtttgtctgcgaattagaatctagttttgtctgcgaattagaatctagttttgcatgaatcattgaatccaaagctatgtagtatatgcttttcccgtgatttgtccccacttgtatgccccattttagattagttgagtagaattcgacttttttggtacatatgagtctgatcttctgtttttcgtatattctcacctttgatctgtttagtatagttatactcaggtttgatatttcttggaaagaagaacacacagaatcagattctcttttgtttttgatgtttgtttttttgttgatgtatgtgtttcccacttaatttaaagtaggaaaacgaaaccttatctttctcgtcgatatgtctttgtgttttctttagccttttctagagtttcttgcgtgtccatgtgtttctgtgtactacaataacataaatagatagaaagactgttaaatttggtaacctgatttagcaaggagtaatttgtactctttttgagagttgaatcaagccagatgactttattgcctttggtaggaatagtcttcatgatcccttttttgccactgtttcttgatttcgacgggataatgtttgaaaggagatgtgatatattatatctgttattccaggcaattggtgctgcaggaggtgcattggcgatcatggagttcataccagagaaatacaagcatatgattggaggtccttctcttcaggttgatgtgcacactggagctattgctgaaacgatcttaagttttggtattacctttgcggttttgctaattatcctcaggggtccacggagattgcttgctaagacgttcttgcttgctcttgcaaccatctcatttgttgtcgccggatctaaatacactggaccagccatgaatcctgccattgtaagtatacatttcttgcttgctctttcagatgttctatactaagaagagattgaccccgaataagtcacctgataaattacagaagcaactttatgtttttgggccatatattcacatcattccaacactcttaaacccgagaattatgattgtatcttcaaagatagatgattaatcaatatctctcttgtgtttgcaatgcaggcgtttggatgggcatacatgtacagctcccacaacacatgggaccatatctacgtctactggatcagttctttcgtaggagcattatctgctgcattgcttttccgttctatcttcccgccacctcggccccagaagaagaaacaaaagaaagcctgaggaaaataaaacaattgggagaataccggtcagattcttcaccggtttgggctgtagaaagattcacaaagctgttccattctaaaataaggagaccaacaacaacaaaaagtcaaaagtctccttgtcattgtttagatccacacgcttattttacagatttgtgcgacgtaacttttctcttttatgttcataaatcattcagactctcttccggtttagaaacatttatgattacatggctggtttagtttggtttattatcggttcactctctattctggttctgatttctgacaacaaatcaaaggcaaaagttgtggatttccatccacaaaatttgggaattgggcctcaaaatttctttccaagggtggaagaaatctcaagcgagatctttcgacatttggtagtgttactgcgaaaaggaattgggcctggctaaggcccaactgtatactcttgctgaggcctgaccataaaagaagaagttatttacaaattaaatcagccaaacatgttggaccaggactcaccaactgtatataaagcctaacaacattttctccaaactgtaaatagatcaagactctgctgtgttgcaattttgttcccagtttcggtctacagttaaaaactactgattccctttgccataagagtgatcctaattaaactgattgagtaactcttaaaatggtggtggtgtgttttcagggatgtgaagacaactgatagtggaaatgcttcaagctgcgaagtctgttgtttccaactaagattaagaaaatggttccattctcaaataaggagaacaaaaaaggaataaaaaataatg

SEQ ID NO: 30935 - DNA, 3000 bp, Unknown
  misc_feature (1)..( 3000): 2750-1469P.txt file - cDNA_ID_3037291; gDNA_ID_2213663; Annot_ID_132619
aatattggttgagaattttcaagataaaggaatctatatcgctcgttctgcttcttttgcagtctcatcatcaggagaaaatcatatgatgaatcagctaaggaagcttaaggtctcaagagcatcggtttttgtggtgcatatgtccgagattcttgtttctcgtctcttccaatgtgtagagaagttaggtttgatggaagaagcgttcgcttggatcctcactgcaagaaccatgaactacttggaacattttgcaataactaggtcgatgcaaggggtcattggtttcaaatcttacatccctgtatctgaagaagttaagaattttacttcaagattgaggaaacgtatgggagatgatacagaaacagagcattctagtgtaatcatcggtttacgcgcacacgatatcgcttgtattctagcaaatgcagtagagaagttcagtgtaagtggtaaagttgaagcatcttcgaatgtatcagctgatcttctggatacaattagacatagtagattcaagggtttgagtggtgacatccaaatctctgacaacaaatttatctcagagacatttgaaatcgtgaatattggaagagaaaaacagagaaggataggattatggagtggtggtagttttagccaaagaagacagattgtttggcctggcaggtctcgtaagatcccaagacaccgtgttttggcagagaaaggtgaaaagaaggtgcttagggtcttagttaccgcaggaaacaaggtcccgcatctagtgtcggtgcgtcctgatcctgaaacaggtgttaatactgtctctggattctgcgtagaggttttcaagacttgcattgctccttttaactacgagcttgaattcataccttaccgtggaaacaatgacaatcttgcttatctactttctactcaggtgtgaaaatgcaaacagtttaaaaacatttttctagtcaaaaatgattatgtatgtttctaataatgtgtgtttgcaattttgacagagagacaagtatgatgcagcagttggtgatatcaccatcacttccaacagatctttgtatgttgattttactttgccgtacactgacattggtattggaatcttgacagtgaaaaagaaaagccaagggatgtggaccttctttgatcctttcgaaaaatccttgtggctagcaagtggagctttctttgtcttaactgggattgttgtttggttagttgaacggtccgttaatccggaatttcagggctcttggggacaacaacttagtatgatgctctggtttggtttctcaaccattgtatttgctcacagtaagtgtttatgttagagtactactcttcatgaaatcccatccttttgtatattttgatctataacaaattacgcacattcttggcaggagagaagctacagaaaatgtcatcaagattcttagtcatagtttgggtttttgtggtgttaatattgacttcaagttacagcgcaaacttgacatcaaccaagaccatttctcgcatgcaattaaatcatcagatggttttcgggggatctacgacgtcaatgactgcgaagctcggatccattaatgcagttgaggcctatgcacaacttttgcgagatggaactcttaatcatgtcatcaatgaaataccttatctcagtatccttatcggaaattatccgaatgatttcgtaatgacagatagagtgactaataccaatggctttggctttgtatgtacccttctcctcaaacctctcattttctctccattatttggttacttattcttgttacgtactaatttatgtttacctctcagatgttccagaaaggttcggatttggttcctaaagtatcgcgagaaatcgcgaagctaagatcattgggaatgttgaaagacatggagaaaaaatggtttcaaaaactggattcactaaatgtacattccaacaccgaggaagttgcatctaccaacgacgatgatgaggcatctaagcgattcaccttccgtgagttgcgcggtttgttcatcattgcgggagctgctcatgttctcgtactagccctacatctctttcatacgcgtcaagaggtatcacgactatgcaccaaacttcaaagcttctataagtaaaaagtgatccatcgttcataagctctactatagcaattgacgggacaggactcataagtaacaacaaagtacacttcgaaacaaatttcacatgtaatacttgtttttttttcccgtttaaattcacatgtaataatttaattcacgtaaatactaaagtgattcacccatcacgaagtattttttgaattaaatacatcaactaatcgagtttttgatagggacttttgcttttttgaatattgcttatcaaatcaaaattttcaaattcttgtccatatacgcctatcaaatatcttcttttaaagaaagtctcctaaagagttgaaaacttgaaatatatacttttctaaaatataattttatttgggcgttacgttctagaaaatggaacccgtctactaaaatgggccgctcgtgaactcgtggcagtcaaacactggtcggcgcataaaagcatatccaaatacgctgcgtttcatgcttacccgacccgtcttaaatatttaaagaatattccagattagcgcgtgagatgcagttgccatgtctcgcctcaggaatgacgacatttgccaaaataacagagctacaacggtaaataaggaaaatgattaagggcaatttggtcttttaggttaagaaaagtattgaatcagatctgactttttggccaagaaaaactctcagccactagatcattccgacccctcctccacgttcttctctcttttaaataacctcttcacggaacccttctcactcacctatctcactctaaaatctctctctgccaatctcatcttcaacctctctctaactctcgttttcgattctacaatg

SEQ ID NO: 30936 - DNA, 3000 bp, Unknown
  misc_feature (1)..( 3000): 2750-1469P.txt file - cDNA_ID_3037291; gDNA_ID_2213663; Annot_ID_181910
ttaagcatataaaaagcgtggattttattttatattagctagctgtagcctatgagaggaaatatttttcatgtgtttcatgttatataaatttggaaatttataagtataaattgcatcccttaagttattgttattttagagaaaatagattaaagttattttaacctaaaattaaatttttaaattttttttttatgtttatatattgacttcaattctattagctttaactagctttccaacggtagtaatttcaagtcaaacggaatattatagcaattctattagtttcaattagctttccaacgatagtgatttcaagtcaaacaaaatattatagcaaaagttatgactaatcaaatgaacggacttatactaatacaaaaaagttttattttttaaatgaaatttgatagaaaaataagataaatttggattttgaagttttttaaaaaaattatatgactaatctacaaaaaaataagaatattatggacaaattttgtagtagatatcttttatatcaaatttttcctattttttttgtaacaaaagaattttggatctgaggtatgttccctgtaagggatacacaaactcgtaattacctaaaagaacattcctccttgaatggtcaattagcctttacaccagctattacaccaattgggttaccataatagtttcttgactgattaatgaagatgttaaagtggttgccaaatgtgtttagtcaacattttttttttttttttgtaaattagtcaatacactttcttcataactaagatttaaatttaatgtctccaaactttgtaatcctatctctttctttggtctataaatagattgtgttttgcgcatggttttatcattacatacaaaataacaaacctacaagaaatcaaacactagttctggtttctgcaaacatgtcatctacgaagcaagcaaagggaagaaaaacaaaggggaagcaaaagatcgagatgaagaaggtggagaactatggagataggatgattacgttctcaaaacgtaaaaccggaatttttaagaaaatgaacgagctcgtagcaatgtgtgacgttgaagtggctttcttgattttctctcaacccaagaagccctatacattcgcacatccgtctatgaagaaagtggctgaccggttaaagaacccttcgagacaagaaccattagagagagacgataccagacccctcgtcgaagcttataagaaacgaaggctccacgacctcgtaaaaaaaatggaggcgctcgaagaggagcttgcgatggatctagagaagttgaaactgttgaaggaatcgagaaatgaaaagaagttagataaaatgtggtggaactttccttcggaaggtttgagcgcgaaggagctgcagcaaaggtaccaagcgatgctcgagttacgtgataacttatgcgacaatatggctcacttacgattgggaaaagactgtggtggttcatcttctgttcgtgtgggacgtcgagtttctggtggtgttcgtctgttcgatcgtgaagcatgatcatacatattcatacttgatgatttaaatttctttgtatttgaactgctgattttaatactgcatgtatccatttgacgaagctcaatcgtctcgagtatatctctattatctaacagtattgagaaaaaaggagtttcagttttcaaaagttgaaagactgagccaagtgatgacaaattcgagcgttagggtcttcacaaattggatattttgcgaaaaatcatgttagttttttatttgatgtattattaataagaaatgagggtttccttttttgaagtaatcaaaagaattttccatttttgcgtccaatcatgtaaaacttaaccattccttttgtttccttttaaagataaaattccttttaaaagtaatttttcattttcttcagaaacctttcggtcataaccttctcttataaaataataatctcttcttacgaatcaaaggtctcttattcgaagggcaataacatttgaccataaaaaaaaccccatatatatatacagtgtatatatatatttttgcccctttgtgaagaaaataaaacaatcagagatgagccctaaattttccaaccatgcgaccgtttatgtgatccatcgttgcgcgggtatatcgaagatcgtattatgagtctttttatgatcgtattatcctttgtgcgaagtacaactattgaacaagacgagaaaaagttttcattgcgcaggtaagtcgcgagggagatgtattccataagtattctataagccaagtctcctaatctccctggtaacgttatctcattccacatgtactctataagtattcgcgagcgtgtggtttcgatagagtaataatttaatgattgtagaaggagatgactgtgggatcatcctagactagagttttaatctcttgatttgatttttcctcgacgagttgaactaaccagcttgtgattttttttagcttctcgggttgtggtagattttattatatatcacttggttgtcctatcacttgaactcgaatatttacttctacgaattgactttgcgaaataagctaatatatctagtattatggtttcccctgcatatgtattttacattgtatttaacctggattttgaaatcagttttaaaagtaactgttgaaaacataaattaaataaaactttttttaaggctcaactatactttagaaggaaataaatgtgtttcctagtcaatttgtgtcgatgaacagtacacattgactttgattgtgtgcgatatcgcgttagtttgatttaaaatgattgtgaccatacacttcagaaaatcaaaatgcaatttgaccggaaaaaaaaaatggtccagtataattattattccatggcacaagtagatatggaaacaccattgtttataacccaaagcgaacgttacagagctatacaagaaattatatg

SEQ ID NO: 30937 - DNA, 3003 bp, Unknown; identical to SEQ ID NO: 28235
  misc_feature (1)..( 3003): 2750-1469P.txt file - cDNA_ID_3037295; gDNA_ID_2213663; Annot_ID_181905

SEQ ID NO: 30938 - DNA, 3003 bp, Unknown
  misc_feature (1)..( 3003): 2750-1469P.txt file - cDNA_ID_3037308; gDNA_ID_2213663; Annot_ID_132610
atgattggctaggtcctgggagtcggattatcatcacaacccaagaccgaggaattttgagggcgcatgggatcgaacatatttacgaggtggattatcccaactatgaagaggcccttcaaatcttttgcatgcatgcttttggtcaaaagtccccatatgatggttttgaggagcttgctcaacaagttacaacactttcgggtagacttcctttgggacttaaggttatgggatcctatttccggggaatgaccaagcaggagtggacaatggcactaccaagggtaaggactcaccttgacggaaaaattgagagcattctaaaactcagttacgatgccttatgtgatgtagataaaagtttgttccttcatctagcttgctctttccacaatgatgataccgagttagtagaacagcagcttggaaagaagttctcggatttgaggcaagggcttcacgtcttagctgagaaatcgcttatacatatggatttaagactgatacgtatgcatgttctgctggcacaacttggtagagaaattgttcgtaaacaatccattcatgagcctggacaacgtcaatttttggttgatgcaacagatattcgtgaagtactcactgatgatacagtaagttttgacatatattttttcttcctttattgttcttatcatttgacaactaaactatataatttcttcagggcagtagaagtgtaataggcatagatttcgacttcaatacgatggagaaagaattagatataagtgagaaagccttccgaggaatgtctaatcttcagttcataagaatttatggtgacctttttagccgtcacggagtatactattttggcggtcgcggtcaccgcgtgtctctggattatgatagtaaattgcacttcccgcgaggtctggactatttacctggaaaacttaggttattacattggcaacaatttccgatgacaagtttgccctctgagtttcatgcggagttccttgttaaactatgcatgccctacagcaagcttgagaagttgtgggaaggaattcaagtaactgtttgttctctttatttacttctctccaactttcatttttttttctttttcgaatggattatttgatgtatacgaacggctttgaaacgctttcacacttctaaacttctagttgtggtttttgtactgcagccgcttagaaatctcgagtggctggatttgacttgttccagaaatctgaaggagcttcctgatctttcaacagccactaatctccaaagactgtccattgagcgttgctcaagtttggtgaagctcccttcctctattggggaagccactaatctcaagaaaataaacttgagagagtgcttatctctggtggaattaccctcctcatttgggaatcttactaatctccaagaattggatcttagagaatgctcaagtctagtggagctcccaacctcgtttgggaatcttgctaatgttgaaagcctggaattttatgaatgctcaagtttggtgaagctcccatcaacttttgggaatcttactaatctcagagtgttgggtcttagagaatgctcaagtatggtggagctcccatcctcgtttgggaatcttactaatctccaagtattgaatcttagaaaatgctcaactctggtggaactcccctcctcatttgtgaatcttactaatctcgaaaatttggatcttagagattgctcaagtctactcccctcctcgtttgggaatgtcacttatctcaagagattgaagttttataaatgctaaagtctggtggagctcccctttttctaatatatatatatatatatccgttggtatagttctctgggattctagttcttcgcatgcggtcttaataatttgttcaacctcttctcatggtatgtgtgatttgaatgttatttttcccattttcttgcatgcagatgattttattgcaaatagaaacgtattttgtagttttcctttgttattgcttgtccgatatttttcgatgcgaaaacattcagtgtagttttcgatggagttaagaagacaactttatcattggtccatccatgtcttaatctattagctgtgaaatttcatgttttgacggagacatagatttaattaatgtatccttgtactttattccttgctaattccttcttagagatagattgctccaaattacttgtcatatagataaaacgattctgattattctcaaatttgtttaatacgaaaatgtataaagaaatgcaacaaatgtatttacattacaattataattactagatgatttttcgtttttttctgattgctaaaagttattctatttatgcgactaagaaatatgtatatgttacttgtatgatagagatccgtttgagcctactcaagacttaaaatcgaactagcatatttcttcctcgtagattttggatgagtctgaagattagtagagcccctcacgaattttccatgaagagataaataacaacaaattaagcttcctctcttgccatcttatcattctagatcgctgaatatttttacgccacacaattttgtgcgaaaaagacttttgcaagttggcttatataatagagatccgtttgactgtttgagtacaagaaagacttaatagagatccctcatttttctgctaagaggacattttatatagactcacgtggtggagccacagagaattagccgcccctcacgaatattcttcccatgtttgcgttgctagtcttcttattctaagtcaatggagttagtgtactaatctaatatatatacaacaaacccttttatctgttttgaataccattgcttcatatagctctctaaaaaagctctttgttcgtctctatatcatacgaataatggattcttattttttccttggcactgttgttgttgttgctcttgcaatctacacgcttttgggaacaatatcttttatg

SEQ ID NO: 30939 - DNA, 3003 bp, Unknown
  misc_feature (1)..( 3003): 2750-1469P.txt file - cDNA_ID_3037308; gDNA_ID_2213663; Annot_ID_181897
ggttgaacgacaagaaagttcttgttgttattgatgatgtgaatcagtcagtacaagtagatgccttggcgaaagaaaatgattggctaggtcctgggagtcggattatcatcacaacccaagaccgaggaattttgagggcgcatgggatcgaacatatttacgaggtggattatcccaactatgaagaggcccttcaaatcttttgcatgcatgcttttggtcaaaagtccccatatgatggttttgaggagcttgctcaacaagttacaacactttcgggtagacttcctttgggacttaaggttatgggatcctatttccggggaatgaccaagcaggagtggacaatggcactaccaagggtaaggactcaccttgacggaaaaattgagagcattctaaaactcagttacgatgccttatgtgatgtagataaaagtttgttccttcatctagcttgctctttccacaatgatgataccgagttagtagaacagcagcttggaaagaagttctcggatttgaggcaagggcttcacgtcttagctgagaaatcgcttatacatatggatttaagactgatacgtatgcatgttctgctggcacaacttggtagagaaattgttcgtaaacaatccattcatgagcctggacaacgtcaatttttggttgatgcaacagatattcgtgaagtactcactgatgatacagtaagttttgacatatattttttcttcctttattgttcttatcatttgacaactaaactatataatttcttcagggcagtagaagtgtaataggcatagatttcgacttcaatacgatggagaaagaattagatataagtgagaaagccttccgaggaatgtctaatcttcagttcataagaatttatggtgacctttttagccgtcacggagtatactattttggcggtcgcggtcaccgcgtgtctctggattatgatagtaaattgcacttcccgcgaggtctggactatttacctggaaaacttaggttattacattggcaacaatttccgatgacaagtttgccctctgagtttcatgcggagttccttgttaaactatgcatgccctacagcaagcttgagaagttgtgggaaggaattcaagtaactgtttgttctctttatttacttctctccaactttcatttttttttctttttcgaatggattatttgatgtatacgaacggctttgaaacgctttcacacttctaaacttctagttgtggtttttgtactgcagccgcttagaaatctcgagtggctggatttgacttgttccagaaatctgaaggagcttcctgatctttcaacagccactaatctccaaagactgtccattgagcgttgctcaagtttggtgaagctcccttcctctattggggaagccactaatctcaagaaaataaacttgagagagtgcttatctctggtggaattaccctcctcatttgggaatcttactaatctccaagaattggatcttagagaatgctcaagtctagtggagctcccaacctcgtttgggaatcttgctaatgttgaaagcctggaattttatgaatgctcaagtttggtgaagctcccatcaacttttgggaatcttactaatctcagagtgttgggtcttagagaatgctcaagtatggtggagctcccatcctcgtttgggaatcttactaatctccaagtattgaatcttagaaaatgctcaactctggtggaactcccctcctcatttgtgaatcttactaatctcgaaaatttggatcttagagattgctcaagtctactcccctcctcgtttgggaatgtcacttatctcaagagattgaagttttataaatgctaaagtctggtggagctcccctttttctaatatatatatatatatatccgttggtatagttctctgggattctagttcttcgcatgcggtcttaataatttgttcaacctcttctcatggtatgtgtgatttgaatgttatttttcccattttcttgcatgcagatgattttattgcaaatagaaacgtattttgtagttttcctttgttattgcttgtccgatatttttcgatgcgaaaacattcagtgtagttttcgatggagttaagaagacaactttatcattggtccatccatgtcttaatctattagctgtgaaatttcatgttttgacggagacatagatttaattaatgtatccttgtactttattccttgctaattccttcttagagatagattgctccaaattacttgtcatatagataaaacgattctgattattctcaaatttgtttaatacgaaaatgtataaagaaatgcaacaaatgtatttacattacaattataattactagatgatttttcgtttttttctgattgctaaaagttattctatttatgcgactaagaaatatgtatatgttacttgtatgatagagatccgtttgagcctactcaagacttaaaatcgaactagcatatttcttcctcgtagattttggatgagtctgaagattagtagagcccctcacgaattttccatgaagagataaataacaacaaattaagcttcctctcttgccatcttatcattctagatcgctgaatatttttacgccacacaattttgtgcgaaaaagacttttgcaagttggcttatataatagagatccgtttgactgtttgagtacaagaaagacttaatagagatccctcatttttctgctaagaggacattttatatagactcacgtggtggagccacagagaattagccgcccctcacgaatattcttcccatgtttgcgttgctagtcttcttattctaagtcaatggagttagtgtactaatctaatatatatacaacaaacccttttatctgttttgaataccattgcttcatatagctctctaaaaaagctctttgttcgtctctatatcatacgaataatg

SEQ ID NO: 30940 - DNA, 3003 bp, Unknown; identical to SEQ ID NO: 26771
  misc_feature (1)..( 3003): 2750-1469P.txt file - cDNA_ID_3037312; gDNA_ID_2213663; Annot_ID_181894

SEQ ID NO: 30941 - DNA, 3003 bp, Unknown; identical to SEQ ID NO: 16025
  misc_feature (1)..( 3003): 2750-1469P.txt file - cDNA_ID_3037319; gDNA_ID_2213663; Annot_ID_181892

SEQ ID NO: 30942 - DNA, 3003 bp, Unknown; identical to SEQ ID NO: 26773
  misc_feature (1)..( 3003): 2750-1469P.txt file - cDNA_ID_3037323; gDNA_ID_2213663; Annot_ID_181885

SEQ ID NO: 30943 - DNA, 2507 bp, Unknown
  misc_feature (1)..( 2507): 2750-1469P.txt file - cDNA_ID_3037327; gDNA_ID_2213663; Annot_ID_181883
aagctttttaggaacataaaaaagatagcaacaaagaccaatgccgctactcctcctacaacaatcgccaacgacttccccgtgtttacttttgaaccttcttctgtcaaaagaaacaattcgcaacttaagtacataatcaactgatatttgttttggttcagttttctttaataactgtacgtaccgtggtatgaatcattgggaagttcatgtgggtgatatgtataaccgacgtggcacccttctaagtatatttgtccggctatggaccaccgacactcttctgctgctgctgccgcggctgaacttatgcactcgccgcaatcgcaagcttcaacgtggccgtcgcattgagccacaacgtggaggagcttgtagctatcctcatagaatccgtgaccgtcaacaactcctgtttcggctgcagtgagtgcctccgtcctcatctcttcgaatccggggaaagtctccgcggtagctccatcgcatatcttgtggatgagaccgtgttccggggtctcaaataacttgtacttgtgatgattattaacttcttccaaaaataacaagaatcatatttattttacgtaatgaatcgtttactttaatgtgaattcaacttaatttgtttatcactatccttcaatttttctcgcgagtggaaaatttatatacctaagaaataatatattttttgataaaagtataagaaattttactataagaccaaataagtaagaaattttccaaccatttttttctgtacacgattttatgattttttgtcaacaacaaagatgaatacttacgagcgccaggggtatcaatacgttcgaatttgtatatcaaatgacatcctcgaagatgaatacgagctgacgtggcatttccacacgatctagacgaaatttcacgaagatcaccaacacatttatggcagatctcactcggataatcttctctgcattggaaccatccagagacagcgtgtttttcgttaccaactagagtcttcaagaatttagatcgagaggattctgattcgagtttgcgtaagaaagaagaaagggcttgtgcacgaagaaagagattctgattcgagtaatttggagattttgttgttgctttttggaggatgtttgcgtccaatggatcgcattgtttgaaaacaagagtgtcgtaatcaagttgagaagtgttgatgatagagggaagagacagaatgattagggctagggtttgtgtgaggagagagatcaagtggacaaccatgtttgagtcaaaactacagggaagagagatatatttttaattcattgaatatatacattggtgaatggagagggaagttgtggtagattagattttgtctacgtatgtctaccacttgtctacatatgttaaagatttagttgtgacttaggaggtcgtcaagcgcacgtgctaagcacaccaacgatttcttgatcttttcttcttgttggtatgaatatgatcctagaggttagtttaacaattttctaatgattttatgtatagtgaaacagtaatattattcacaatttgtggaactggctgatccaaaatatgttaaaaatgacattcggctactagcggaggtctgattcttagcctaacccttattcaattcttttaatactactagtgttggtttgaagtaagagaataataatgtacgtaaatgtatgtaatttgaaagtaagaaaagctttcgatgaagtcttagacagtaacaaactaacaaacatatccgctcaactaaatttacctaacaaatttccatagttttcaaccaagatttaaattaaaaatacactggaaattctaaacaaccctaaattatgttttttttttgttgtgtgagagcgaaatagtcggaattagagtaagaccaatcaaattttaaatatttatcgtaacttttatttcaagttgctttatatgatgtcttgaatctcaattgccttgccaagaaaaacaagcgctgacatatataaaaagcctaaaattacagaagaaaaatacaaagagctagaagaaaaagaaattcccctgttcttccgtaaatatcgttaattcgttatgacagagtttcattctctttgactagatctttatttttttctttacaccgatacaagtcaaaactcttaacaaacaaatatttagatcaacatagaccaaagagtcaaagaaataatgtctgtctccataaagtctccaacttttataacaaattttccgttgaatatgacagtaaataaaccaacggtctagttcttatcatgtctaaaaaccacaagctccttcctcatcttacgctcccctctttacctctccttttattctccttctcattctcctctcaacaactgatcgtataatcattctcacggagacgagtgaccaaaacaaggtctcccgcttcttgcgaagattaaacgaatccatttagattttaaaaaccacacaaaaaaaatatg

SEQ ID NO: 30944 - DNA, 3000 bp, Unknown; identical to SEQ ID NO: 10593
  misc_feature (1)..( 3000): 2750-1469P.txt file - cDNA_ID_3037338; gDNA_ID_2213664; Annot_ID_132637

SEQ ID NO: 30945 - DNA, 3000 bp, Unknown; identical to SEQ ID NO: 10593
  misc_feature (1)..( 3000): 2750-1469P.txt file - cDNA_ID_3037338; gDNA_ID_2213664; Annot_ID_182021

SEQ ID NO: 30946 - DNA, 3000 bp, Unknown; identical to SEQ ID NO: 10586
  misc_feature (1)..( 3000): 2750-1469P.txt file - cDNA_ID_3037363; gDNA_ID_2213664; Annot_ID_182042

SEQ ID NO: 30947 - DNA, 3000 bp, Unknown
  misc_feature (1)..( 3000): 2750-1469P.txt file - cDNA_ID_3037371; gDNA_ID_2213664; Annot_ID_182039
ccttgcacttgaaagttcatctcctaaagtggagaaaacattaaaataggaaactagcaaaatgattggacaaacttgtaccaatatatttaacatgtttagaaaatattcaactcacttagtttgattctttgaatcaagttttcagttattagttccaacttgtaaaaatggttgcagaacaaaatgatgaggaagttttttagtatcacataagtccagattcaagtttttttcaattgtatctaaaacacacacaactttcagattgaataaaatctgaatttcattctcagcagaggctaatataaaaatgacaaaagaagaggaggaggataggagctatatgtctactatttttatttttttagccaatgagagagctccacttcataccccacttttaccaatcgagcgatttcacaaccagtctcacccatgtcgcgttgagcgcgtgtctacgatttctaaaggggtttgtccacagaaatcatgccttttttgatccacgcaactcactctcaaaaatccatcgcgtgtcttattttttttggttttcttctctaaaccaaattaaaccgaaccgagatcaatttgaatttcaaaaccaatgtaaacccatcaaacccatcgctgtgaaaacaaaaagctcggccactgtaacaacaaaaatggagacgacacagaggtacaacttggaagagaacttaacggtcaagtactcgattctactagagtggaaagcaaatttctattacaaaatacaaattaagtgtttagcttcggaattgtggtgaatgaattcgagatgggtgattcagaaactgacctctcaccttccttcttgcttatctaccgttttgtccccttcgaaaatcctaatccggcagagcccaaattaccaagtctcgacctttctcctcaaccatgtcgatatgagccttctcttatccatctgcggcagagaaggctggtttcctcatctgggtccttgtctccacgcctccattatcaaaaatcctgaatttttcgagcctgtagatgctgatatccatcgaaacgctctggttgtttggaactctttgctttctctgtatgcgaaatgtgggaagttagttgatgccattaagttgttcgacgaaatgcccatgagagacgttatttcgcagaatatagtgttttatgggtttctgagaaacagagagactgagtctggttttgtattgcttaaacgaatgcttgggtcaggtgggtttgatcatgcgactttgacgattgttttatcagtgtgtgatacgccagagttctgtttggtgacaaagatgattcacgctttagcaattttaagcggttatgacaaggaaatttccgtggggaacaaactgatcacatcttatttcaaatgtggatgttcagtttctgggagaggggtttttgatgggatgtcacatcgaaatgtcatcactttgacagctgtgatttcgggtctgatagagaatgagttacacgaagatggtctaagattgtttagtttgatgcgtagaggattggtccatcctaactcagtaacttatttgagtgctctagctgcttgttctggttcacagcggatagtggaggggcaacagattcatgcccttttgtggaaatatgggattgaatcagaattgtgcattgagagtgcgctaatggatatgtactctaaatgtggaagcattgaagatgcgtggacgattttcgagtccacgacggaagttgatgaagtttccatgactgtgatattagttggtttagcacaaaatgggtcagaggaagaagctatacagttcttcattagaatgcttcaagctggagtagagattgatgcaaatgtagtctcagctgttcttggagtttcgtttatcgataattctttgggtctaggcaagcaactgcattctttggttatcaaacgaaaattctccggtaacacctttgtcaacaatggactcattaacatgtactcaaaatgtggagatctgaccgactcacaaactgtctttagacgaatgccgaagaggaactatgtttcatggaactcgatgattgcagcatttgctcgccatggtcatggattagctgccttgaaactatacgaagaaatgactacgctagaagtgaagcctacagatgttacctttctatcactacttcatgcttgtagccatgtagggttgattgataaaggccgagaactcttaaacgagatgaaagaggtccatggaatcgagcccaggacagagcattatacctgtattattgacatgttgggtcgagctggtcttttgaaagaagcaaagagctttatagactcattgcctttgaaacctgactgtaaaatttggcaagcgttgcttggagcttgtagtttccatggtgatacagaagtaggggaatatgcagctgaacagttgtttcaaactgcacctgatagctcatctgctcatatcttgatcgctaacatatattcatccagaggaaaatggaaggagagggcgaagacgatcaagagaatgaaagcaatgggagtgactaaagaaacaggcataagttcgattgaaattgagcataaaacacacagctttgtggttgaggacaaattgcatccacaagcagaggctatatatgatgttctgtctggattgtttccggttatggtagatgaaggttacagacctgataagaggtttattctgtgttatacaggagatgacaggaacggcacggtatcatagttccttaacgccttctctctacatgaatgtgtacatacaagagtagagaatatccatggcgttttgtaaagtttgattttggtagttgaagaccccctctagctgaaacagaggctctactgttttgtctctttatcttaattcttaatatatggacatctgtctggtcaccagttaacgcctcaaagggacaaacttagggaaagagaaggtaagagatacaatg

SEQ ID NO: 30948 - DNA, 3000 bp, Unknown; identical to SEQ ID NO: 10607
  misc_feature (1)..( 3000): 2750-1469P.txt file - cDNA_ID_3037391; gDNA_ID_2213664; Annot_ID_182031

SEQ ID NO: 30949 - DNA, 3003 bp, Unknown; identical to SEQ ID NO: 26782
  misc_feature (1)..( 3003): 2750-1469P.txt file - cDNA_ID_3037408; gDNA_ID_2213664; Annot_ID_182022

SEQ ID NO: 30950 - DNA, 3000 bp, Unknown; identical to SEQ ID NO: 10595
  misc_feature (1)..( 3000): 2750-1469P.txt file - cDNA_ID_3037413; gDNA_ID_2213664; Annot_ID_182017

SEQ ID NO: 30951 - DNA, 3003 bp, Unknown; identical to SEQ ID NO: 26784
  misc_feature (1)..( 3003): 2750-1469P.txt file - cDNA_ID_3037421; gDNA_ID_2213664; Annot_ID_182015

SEQ ID NO: 30952 - DNA, 3000 bp, Unknown; identical to SEQ ID NO: 10584
  misc_feature (1)..( 3000): 2750-1469P.txt file - cDNA_ID_3037425; gDNA_ID_2213664; Annot_ID_182014

SEQ ID NO: 30953 - DNA, 3000 bp, Unknown; identical to SEQ ID NO: 10583
  misc_feature (1)..( 3000): 2750-1469P.txt file - cDNA_ID_3037429; gDNA_ID_2213664; Annot_ID_182011

SEQ ID NO: 30954 - DNA, 3000 bp, Unknown; identical to SEQ ID NO: 10581
  misc_feature (1)..( 3000): 2750-1469P.txt file - cDNA_ID_3037433; gDNA_ID_2213664; Annot_ID_182009

SEQ ID NO: 30955 - DNA, 3000 bp, Unknown; identical to SEQ ID NO: 10579
  misc_feature (1)..( 3000): 2750-1469P.txt file - cDNA_ID_3037437; gDNA_ID_2213664; Annot_ID_182005

SEQ ID NO: 30956 - DNA, 331 bp, Unknown; identical to SEQ ID NO: 10615
  misc_feature (1)..( 331): 2750-1469P.txt file - cDNA_ID_3037448; gDNA_ID_2213665; Annot_ID_182082

SEQ ID NO: 30957 - DNA, 3003 bp, Unknown; identical to SEQ ID NO: 26791
  misc_feature (1)..( 3003): 2750-1469P.txt file - cDNA_ID_3037452; gDNA_ID_2213665; Annot_ID_182081

SEQ ID NO: 30958 - DNA, 3000 bp, Unknown; identical to SEQ ID NO: 10617
  misc_feature (1)..( 3000): 2750-1469P.txt file - cDNA_ID_3037460; gDNA_ID_2213665; Annot_ID_182078

SEQ ID NO: 30959 - DNA, 3000 bp, Unknown; identical to SEQ ID NO: 10628
  misc_feature (1)..( 3000): 2750-1469P.txt file - cDNA_ID_3037464; gDNA_ID_2213665; Annot_ID_132671

SEQ ID NO: 30960 - DNA, 3000 bp, Unknown; identical to SEQ ID NO: 10620
  misc_feature (1)..( 3000): 2750-1469P.txt file - cDNA_ID_3037464; gDNA_ID_2213665; Annot_ID_182075

SEQ ID NO: 30961 - DNA, 3000 bp, Unknown; identical to SEQ ID NO: 10621
  misc_feature (1)..( 3000): 2750-1469P.txt file - cDNA_ID_3037483; gDNA_ID_2213665; Annot_ID_182069

SEQ ID NO: 30962 - DNA, 3003 bp, Unknown
  misc_feature (1)..( 3003): 2750-1469P.txt file - cDNA_ID_3037503; gDNA_ID_2213665; Annot_ID_182062
tctcgccttcttttagcttttcatctttacctgtctctgcccttaacctcacacagatatcgagtctcggcgattgaagtgaactctcatccttataatttcatccgaaaggtaaaattttgacagctctagtcgctaaaccattgttgtttaggtctccttggaactcttctgaatttgcttttagattagtttactctttttgagcctttgtttgtgtaatcttcgaatggattcatggttttgcgttaatgggttctgtttgttattacagattttggataaagttttgatttttttggttcgcaatgacgctgctcgaagctatctccaacgccgtagcgaatcaggacaaggtcgactcgcaatccgattatccaatccctcttagccacgatggtatctttgcgaatctgaaaccaaagctagaaaaccctaatcttggtacccttgtcaatccaatttccgggtggggaatctctgaaagtgatgttgaagtcatcgatttgggtaaaaagttttcatctaagctgaaaaggaagcttaaggatactaacgggtttgtcaaagatgagtttgtcaagatgttaaagcagtttcttgagaaaattggtgagaaagttgggatttcagaggctgagtctgagatggttttgggagatcaagctggttctgagatacagatactggtggagaaaaatgggtttttgatgggtagagatgtatctggtttagtgttgaaaggttgtattagtctagagatgtgggagctagtggaaattttgatttcaaactccttggttgatcattcttcatactcttatttagttagcaatcttgttgagaagcaaaggtcagatttgctttgcgtagtgatcaaagaagcttcagatcttggggcaactgagctactttcaatcttgaagtattttttatgcccatcaaaggaagcaattagcactatggctaaggtaagagaagaatgggagagtcaggctatgttggctattgaaaaggtgagcaacacagagctatcaaagaagtctaaagttgcagaagaggcttctatcttgttaatggttgctcatgacgggttttcaacctcagagctttgcctgcattacttgttagcttcacggaatgttgacgaagtcatgtttgcatctgcagtcagtaagttgaatggcaatgagatgggtagctttattcgatacctctctaaatggatgaagaagtatgagatgttcccacaagctggtccatgccctaaagccgcctccaagcttggtttgaaactatgcaactgggttcctgaactcacagacattaccaaatgtttgggacttcttatcgatgagaacttctccactctggttctgtactcggatttgcatgaagagctaaagtctattgcaagagtagccgatgggttagcttcagaatcaaaactttcctgttttgtggctaatgtggttgaaagtttgaagcttggagctgcccgaaactagattttcacaattgttggagcttaatgcaaccctgttttcactttttattatggtctccagtgacatttgtattttctagtttcagttcatctcttaactaaagtataattttgttcgctatctttgagagtttgtctccaacctctgcacattgccaatctcatttaggatgcaccacatggtttaaaattgttttcttttccaagaattctttatcagttacaacaggaagagtaaaaggtttatctttgcaatacaacagcttactttgttgaagaatgagcacaagttgttgctcaacgaagtgtctcacagagccggataataaaaaccgttcctttatgaacactcacgagaccttgccgcaaaatcaaacggctaatgtatcatcaccacgaaagtgaggtactctcgctgaggttgaagaagaagaaggggcaagaatgtaattacatccagaaatgcttcatagttacgcagctgagttattacacttgttcacaaagtaagctgcagtctggggactacccaactcctaactttcttcaccttcttaaattacctatctgtcaattatcatcatttcccaattgtgttgatacttaattggtagtagcaattttttccattaaagttttcatttttttggttttttgttgatggaaaaagtattgatccaacggctgtagaagaacggtgcaacaagattttgaattcggagatgcgtttgttttagttttaaaatagaaataaataaagttgttctctctctctcttcgtggacactggaactaacaccaccgatgcactacactctgtagagactgcaaatggaaagcatcttttggtaatcacgggtactgttgtcttcgtcttagtttttgtcggaaatcagacattagatccgaccagattctctatttggagacagacattactcggatctttatttcattttgtatgattctttattgtagattttgagatcaggtagtgtggatttgagatcaggtacatttacttgcaaggtgagttccagatctggttttggttatttcatttctggagttttatacgtttttgcaattttggagattttgttgattttagattaggatgatcattgcattttctttctctttcttgtttgatttcattggttaatgattgtggattactactatttaatctttttataaaaaaatccaaatccttagctcatgtacttataaaagaatgattttatgtttgatagtgatctatacatagttataaacaaatggctgatccattgaacttagtatgatgaatcctgttacaaagagcttatgtatctctttaatgtctaaaagctctagatagaaccaaaatatgaaaattgcaatctttagtaatgaaagtgttgtgttatagtcttgtgttattgcttgaccataatattttgtgattgttcggactaatgcaggtgttttgaattttggttgtggacataatg

SEQ ID NO: 30963 - DNA, 3000 bp, Unknown; identical to SEQ ID NO: 10623
  misc_feature (1)..( 3000): 2750-1469P.txt file - cDNA_ID_3037507; gDNA_ID_2213665; Annot_ID_182060

SEQ ID NO: 30964 - DNA, 3000 bp, Unknown
  misc_feature (1)..( 3000): 2750-1469P.txt file - cDNA_ID_3037511; gDNA_ID_2213665; Annot_ID_182059
tccaaaaatatcatgtacaataatacatttgattatcattattctctttccaaacaaaaagcaaatagtcataatctaaaagtggtccatcctctcccagtttgtatattactgattcaattatgtaaatatcatgtgtatcgtagaggaactaagaaaaaacagtggtccactccatccagtgtaacgtgtcattgtgatagtagaggagagaagagtttaaaatattgactggaacgctatttgttctcatgtggtttcctatacctttagccacagcaacctaaattcatccttaatgtacaaacaaatttctgaatagtagttgacctctgatttggtcacaggtcaccaaaaagagaaagaaattagaaatgaatgtttcctttctagataatacatgtttcatgtgaatcatttggattttctgacaagaagatatagaagattcccccacttctttgtgttcattaatccgacactcagttttgtttaaagtctcaaacaattgaatttttcttcgttcagtttacttttctgataatataacctttaaatcgtcggaaaaagaaaaaattaaccaactaaagaagaagaaaaacttttttaaaaaaacgaaaagagaaaaagaagacgaaaaacaaacttatgagtaacgtcaatgattagtggttgtgatcgaaacatcacaagccataccattaacacgatatactcgtgtttcaacaacacgatatacttgggttttcgtgttgaatgtcgtgtttcttccagctcacttgtttctttaacacaatattgtcttgttaacaaaaataaatcaaatcttctcttaactttatctttttttaaactggcaaacaaaaattcaaaatgaaatattgaacaaacctatacgaatctacgatacgcaattaataacatctccgtcaaatgttggtcatagacgtactctttctttttgctctgtatatagtaaagtagatgacaaagacaacagaactattaaaaaggaaaaaaagcagtgcaggctcatacgaattcagatacgaaacgcctctgtaacgtaaatgattaatttgatatggacgtatcgttacctccccacacgtggcctgaaggggattgatttgttatcaattgttttgtttgaccatcaaagcttcgacatttattgttattttcaatagttaatataacttgacttttaaaggtttatagaaactgaatatgtaaaagtttgtaagagacagatatttgtttaagaatatataagaagagtctaactctcttccaaatctcaagggtttttcttttcactaatctctagagtttggagcagattaattccacatttccactactaagtggctaagtgctaacagaaaatatattatttacaaagataggacaattttaccttaattgttacgagacgattagttttttatttatttatcccgagcatattttataccgtatatgtcgatctattttattaaataaagattagggtttaaatttagattttatggtttgttaaaaataataatatagatttatggtttagtttaattttgctgaacatccattagataaattaaaagctattttgattcattcatttgataaacgtctatttaaatgtccatagaaatctatgatacatggctaactgtgtttaacctaattaatcagatgtgccattatattaacgaagaacatgatctaaatgttaagaacggtattctataactacatatgatttgcccgctaaggctattttggtaacgaaatggtggtgtactgtagaggcgcaacgttcgaatggtacatgaacatgggacaagaatgctaaattttagataaatatttgaaaaattagtctgagattcgtttcatgatagatcctgattaccaaataaaatcttcattttgttaattattaaacaatcacacagtcgatattaaattacattacaaatctatctatatatacatttttgcagccattttagcaaataaatcttagagttgaacttatttacaatccaatgccattagcattaaatctttttttcaaaataattaattttactttaaattcttaatttaaattgtcaattacattatcaataaaatttaatccagacaaacttcacatcaatcccttaaaattagcataaacgtattttgttaacaatattttaaaataaagttttttgtttaaataaatattgttcttactaaacgttttttgtttaaataaacaaatcatgtatttgaacttatttacaatgtcatgctactgacattaattatttaggcatgaaaatatttaattaaagatttaaatcttctaaattcttgcttttagagttattatatcattatttaaagaggcaaaaaatattaattttttaaatattattatatatatatttaaacttcataaaacattattaatatttaaatttataaaaagtttattatatcaaaaaaattaacatcattatataacatatagagtttaaaaaatctcaaaacaatttcgtcctattttgtgattcgaaattttaagaatgaacatatattaaccaataggcgaaaaatgtgtgggttcaatgtcccgtaacgactaaaatattttgacaatgattcataaagatattataaataagatcaatattaataaaataaatagtttttattgtagacgggtttggcaggacgttacttagtaacaattgcaaactataaaataatttacaaatttttatatatattaattgttaaaaatgagttgtcgggttaaaatctagttatagaccgaatttcttgagcagttttcatgaaactcaaaacgaaatttaacataatgtgggaccaatttcaggatcacatctatatatatgtatatatattcaggcaagacatatcgtacaagttgaagtctcagtgccatacaataatatcaacatcttcgtagtctctctaatg

SEQ ID NO: 30965 - DNA, 3003 bp, Unknown
  misc_feature (1)..( 3003): 2750-1469P.txt file - cDNA_ID_3037528; gDNA_ID_2213666; Annot_ID_182117
tgtatattttatagtttaaatcaaataaaatgaagataacggaatttgagttagtatgggcaaaaacggttaatggttgtgtcttgtatttaaagatggagactttggaccaattgggacaagttgatggatgtcatatccaagttcattttctcctgatatttttctggtcaggtttagtaatttagcattcgaattccagtcaacaacagattatatatctaaacatagacggtaaaatatactaccgaatatcgaattaggcctttcgactaatactgattttagattttggatgttgttttgacatgttactctgttttctatctaatgctatagagtatacacttactagtgcgcacaacaaaaaacagaataaaattaatctatcatttgttcgtttaagaataatgaaaaaacttaaaacctacacataaaagactgtactttttgaatggaccttctgaatctataatttagatcacaccctttctttttctcatatactaaaatattaatcggaccacacacacccttttgctttgtaaaaatttaaatcgatctcctaattccaaacaacagaacttgttttttttttttttggttttattataaacaacagaacttgttctttttttttggttttattataaacaacagaactttgtggcaacttgtatactaaagtgatgaatatatgtatactacacatacacgacggcaaaatattattatatgaagaacgcaaaactacaaagatgtttccttcgcattatgtggtacataatccaagcacataatagcgtttaaagattaatttatgttttattaaaatgaaatccaaatccagctcaaagactaatgccttggagtctttcctctaaaatccttctagataatttctctaatttcacttgtagaatttcccttttttttgacaaaaatttatttgattcttatttggcttgttgttgtctgtatgtgtgtgtctatctttggtcggccatatttaaatctgtattgatactcgacatctttaaactattaccgatgaccaaagttatatgtttttataaatatagctacaatatatacagatatttgtcgtaattatatatgatctttattaaacttcttaacgcgtgtgacataaagaaacgaaatgttgtctccgtactcaaaagcgtatactcgttaatcaaagcatttttgcttactaatttaatctgtaacgtatggacatttatgtacaatactctatttttcgtagctgtacaaaattgaatacggaataatacaatatttagggaattagtagcatgttccatgcaggttggactagttctagtgtccgccatatgtataaagctgtaaacatctttaacgcatatatttggtttattaaaacaatagttttgtgattactatgacccattcatgtatttgcatataaatgtagtaacttggagttttggttaattagacaaaagatactccgatctaatattttttaaaataagctaattgaaacttcaacgtgggataaaacgggctgacaaaaaaaggttcaacatgaagaaaataactctaactgataaaacggcacggcgtctgaatgactataactctataaggtgacaaaacgacacggtgtcaacatccttaaaggggggaagaagagtcgtcgtgattcgtcgggtggctggctctttgataaatctaaacaataaacgacggaagcaatccgattcttcgtagataggaatagcccgaatagactggtactgggagtgttggacccacttcatcaatgttcgtgtcgatattttcaattctcatactcttctttggtcgcgttcaattattcaaatctcttaacaagtattttcttcacaagaaaattcgccaagcaaattggaaaaaaacgaagaacacacgaaataactagccaaaagagtttaattacttctttatatatgtgatcgttatttatttgcattttactcgtttttttttccaattatgtcgacacttgattaaattagaagcacaaagcctcgaagcaaaccggcaaagataataacatctgccagagctaagtaataaggtttacagttagatgatcgagagaatatgagctttggcaccgcagaaaacgctggccaattacataggaaaatgttcatttgaaaagatatatagctaaacagtatatatgtctcaaaagatagtttgactcgccgcatctttctattaggcactcgacgtcttcatcatatatgcattattattttgcatattaattaatggtagggatcaaattgttacgaagacatgcaatagatcatttggatattcatgcggtcgacatcaaataaaacagctctcgtacatacagacaggataagctcatgaagtttcctttggtatttatttttacgtccttttccatatccattatgatagttatccggtagctgatgtggacttcgtatcttctactgccagtaattgtatttctttttttataagtgcgcggaatatctattttcattcatcctcatcatcatatactaacatcaacttatctacctttttttttttaagggtttgctcgaggtttcatgtcattttttggaaataaattttgacaacatgatttaatgttgaatggtaatgaaataagaaaatcaagatgattcaatactcttcgatatatataaagtgagcgagagggaaagcacagagtatgataaatcaactgaatttagctaataaaacacatttttttatattgatagcgtcgaacagaccaacgacaacacaacggtcaaattaacatggcttaagtcaagcgaggacagaacgtgccaaagccattgaatatattgaatccttttataagcatatcttatttagtaaccacgtgagtcgtgacgatggcttattattagtacgtactacgtaactttgaagaaaagaagccctgaaatttcggaaatg

SEQ ID NO: 30966 - DNA, 3003 bp, Unknown
  misc_feature (1)..( 3003): 2750-1469P.txt file - cDNA_ID_3037536; gDNA_ID_2213666; Annot_ID_132697
tcgtaaaacaatttaatattttatatacaaaatcaactaaatcttaatcacataaaattagcacaaaaaaaagtattcaacaattaaaaaattatcaaatctctatataagttttgatactatattcgaataaagtgtaatattccttttcaatttgtattctttaactaatttaagcgaactaatatatttgctaatcttatacctatcaaaaccgactatcgtttcttatctttatagtatatttgcaagatcttttttggtggatttggataaaagtgcatatcgtcctactatattatttgggaagtacattttaaatgtaaccttaatttttgtaattaattacatgacaatgccattagaaaaatttaatcaaaaacaaaatcttttaatgacatcattaagattaccaaaatcatttaacgacaatattcatctcttaattatagggtttattggatttaaagacgggtcatcaaagatttcctaaactgaagcaaaatatattgaatattaaaatatctatctgttaccaaattataaacaaataagttcgtaaaacaatttaatattttatatacgaaatcaattaaatcttaatcacataaaaattagcacaaaaaaatgtggtacattcgggtctatagtagttttgcaagacttttttggtggatttgggtaaaagtgcattcgggtcatgtagtacattcccctattaaataaatatggtgcactcctatgttattagctaaaatatttagattataatttagagtcatatcataaataaaattaatattaataaaataaatggctttttggcaagacggatttggagggacgtgtttttgaatcaacattaataaaaagtaaaatataattaatccactgtttcaatacgggttaaattattaatttattattttttaataacaattaatatatataaatacttaataataattataaactgtaaaaatataaatattttataaaaataaaatttacaagttttaatatatattacttttaaaaaataaatcatcccgcggtataccgcgggttaaaatctagtttcatttaaacttgttaagatttaaaagtatttgattatttattttgaaatatatgaaaagaaaataaaatataattccttacagtccagacatggaaacaaataaactttgataatctcttcaaattataaattataaatagaaacgttttcatcataactcattcagaaaataaaaaataaaaaataaagaaaagataggggtgaaggaattagcatgattttgattatgatgatacattaagttaattacccaattagatttgaaagtataattttcttgaagcttcaaaatgggtgagtaatataataaaattatgaagcctcgggaaaatgtaaatgaaattaagtagatatgggccagaccaacgatattaactgaataataattgtggactaaatattggactccgtaaaagcccaaaacaaaatataaaacgaacccacacgacacgagttattatcagaaacattactgttacaatgcaaacgcgcaccagtagagcgtatagcgcgtgtgtcgaaaatgcctagtctatatacccaccaaaaacgctgtttttagcctaaatactttattttaaaagaaatcagcgcgtgggagaacccatgaacatttgggtttgtttatccattgttttgatatttatttatttcggttaattccaaaacaaaggattgcttcttcttggtatttttgactaacaaatacttttttttggcgacacacttatgtatagcaaaactaaaaagtatgaattcaaacaaacaaacaccggtataatatgtttacactaaactaaactaggagaagatgtttaatttatgaatgaaaccaaaattggaattattcactaaatgacgatttcgtaaactcagcttaacatttattgacgataacatcataaagagctcaaaatgatattgtactacataaaagaaaattctcttccatactagctataaaagatatttcaaatgaaacaatagtattattggttacaagtaaatcatagtgtacctcttaacaagtcaaataacttaaaaagatcaaaatatgcacaatcattttattaacaatccatatatataactgggaaaattaaagtggcgtaaatttgatcaatttatgtagctagccggtgattataattgaatatacgatgatgttccgagacaagttagttgatcaaaatattaattcatacatatccatccaacatatgttgctattacaatttacatatgataatcttagggcaggcctcataatatatacattaattggtaaaatctggtcaccaaatttacgagcagtagtaatcaatattagtagtagataacccagtttttgtttttttggtctgaagtagataaccccatttctatccataatatctttgtatttaagatacgttttcacgagggccagccgtaaaattgaattaaaatcccatttgtttataagtttatagtaaaatatagtagcttcagacaagtagtactaggaaaataaatcaacttaatagaagaaccagatctgtgaacggagaaagggacatatgagtttgtcaaagtcaacgatagaaacggttacaagaatatccaatgaaagagagccacgtgggagatgcagctgaatttaagtaagaatgatctcataatcttgaccatccaccaataaaaagcttaattaatacatcatcatccaatccggtggagtaaatgcgtagatggatagagaacggtgaagtttccaacaaaatctctgactctgattcagctttctatattcaatcgttcccattatctcattttgtagtttagttttatcctcaacaaccatcttcttcgttatattccttgagataacaacaaagcatcgttcttcacctttaccaaaaagataaaaaaaaagaaaaatg

SEQ ID NO: 30967 - DNA, 3003 bp, Unknown; identical to SEQ ID NO: 30966
  misc_feature (1)..( 3003): 2750-1469P.txt file - cDNA_ID_3037536; gDNA_ID_2213666; Annot_ID_182114

SEQ ID NO: 30968 - DNA, 3000 bp, Unknown; identical to SEQ ID NO: 10714
  misc_feature (1)..( 3000): 2750-1469P.txt file - cDNA_ID_3037536; gDNA_ID_2213669; Annot_ID_182230

SEQ ID NO: 30969 - DNA, 3003 bp, Unknown; identical to SEQ ID NO: 26813
  misc_feature (1)..( 3003): 2750-1469P.txt file - cDNA_ID_3037540; gDNA_ID_2213666; Annot_ID_182111

SEQ ID NO: 30970 - DNA, 3000 bp, Unknown
  misc_feature (1)..( 3000): 2750-1469P.txt file - cDNA_ID_3037540; gDNA_ID_2213669; Annot_ID_182233
attattagaaaaatcaatgccttctttggaaaaaaaaaatcggtatgtggctctattaattgaaaacatattttatatttgactttgttttttttattgaaagtgatttgatagcatcgttgaatgatttagtaatatctcccgtaagaatttaattatcccgttagactttttaacagaccagccagatgggaccaacgtgcactgttttttggccggagaatgtataaaaaatattgaagatgcagtgaacactgaccaccattcacttctccacaacttttaatgaccggtttacaaaataaaacatagtactatataattttcaacgtgttagtctgatttttatatttctaaagagaagtactcatctatttttgagctattaatctattacaatttgtgttctgatctggagagtggagagttatttcaaagtaaagtatgtagattgtagaggatctatcgagaatctactcatttaaaatagtttgacgttgtagcaaacaatttttttgtcattgatgatttgtattgtttgtaaatattatttagaaaccaaatcgaatttttagttgaaaattataatctgtttaataagtgataattacatcatgcacatgtacctagtgactcataatgaaacgtatcataatggattgacgagtagttgtctgatattgacatcttaatttataacttcccttttcattgttaatgttccttactgtcttctgattgataataaagacgttgacatgtcaaaccacataattatttgaaaaatatatattatttcttcagattttcatcatttgttataagtctcgataagacagtttttgtttttttaacaattttttacaaaaaacttacgaccataatttagttcaggcgaaaatcagtgaatcattaatcatatttattagtttggatttttatgtgtttttctttttatgtatttgaggatttttcagtttgtgaaaacaaatctaatatgcttatttgatttcttctttatttgctgtattcttaatatatcttgcagagctaaggtaatactcaaattttttttttccacacgtaaaaactcatatttatcagtttggaattactgtattctttttagtagtcctctcactcgccatggcaagaagaaggtttttttttcctttttcttgcattccatgttaatcagtatttgaataaaaaagcaagctaaatcggcaaatgaacttatatccaaataatcaagatatcaatctgtgtaagcattactagaaaagtagagatactcgtgttaccgtgtaaattaaaagaataaaaatgtgcttttcaaaagttatatacttttcttgtgcacccataactttagcaaaagcaaccatcatcattcttgagcaattaaaacaaataatattgatcttcatttggtgccaaaatactttacggtaatgacgtcaaactcgatgtttcttgtcaaagtctgaaagaccaatataaaataacactagacacattataaaattaacatattggttcattgtaattaaaccgtcgaatatatataacgaaaataccaattacgctgtgaataaacaaacaaaatcattttattagtcatcgagtaaataaattcgattataatcctcaatagtcaatatatatatagctcacatcacattatgcgattaacaaaaacaatccaaaacagttaaatgattagaaattaaacgagtctcactaaattattaacgactccaaatcacgagaaggcttaagagttatcatgtcgggagaatttaactgataacctcttccattatctctcaatcacgtgatttttgttcaacgagtaccgcatctcaagaataaaaatggcaatttaggtaaatatttgtcattttcaagggcaatggaacttaaagatgcatttcagaaggaaaagctttgtcgtgttatgagggaaatgtggggacgcagctacttcgctttcaaaccgttggatgaatatcctttaaggttcatcgtacaagatcgacggcactcaccgagggtgtactcatgttgtgacacagaggatcatgtctacttggagtacagctagcagctagagattctgagccgataacgtcgagaattgtagccggctaagtcgtatatgctggtttaaactttaatctgtacttatatataagtcaacgtgcttatcaaaatcagctcccttatcgtgtgataggtgcattgtcttattagactccgttatccgtcaccttcgcatattaaaatcactttttattttttggttttaaattaaagtctccatttctgcaagattttaatgttcgtataaataagcctgaagagagagagagagagagagagaaaacttgttttttttttttccattagtttttttcttactttctggtcgagagaggagagtccaaaaaacccaaatccttggcctctttcaatatcaggagagagaaactgaagctctggcctttgtttctgaaatcgatcgtcttcttcttcttcatggcaagtaacgtatctaggtctttcatttttggtttaatatctaaatcgtagcttttctgggtttttgatttttgtttttgtctcatggaagtgaaaaagatggccattttaagctttatatttaattcggtggacaataataatactaggaagacctaatttttgtgtagcccaattaaacactaattaaatccgccggaatagagacttttggagaattttccggaggatagttgtaaagatctagttatatactgtgtaattaagaggctgtgtctattttcattttttaaaaataataattaaatggaggaatatctgaaacccagtaaattgggatgatttgatggttttgtaaggttatcatcgtcgccattatattgatatgcagatctggtgggtttttctgcatctgacttgatagctttatcggactgagtggcaaaatcaatcatg

SEQ ID NO: 30971 - DNA, 3000 bp, Unknown
  misc_feature (1)..( 3000): 2750-1469P.txt file - cDNA_ID_3037544; gDNA_ID_2213666; Annot_ID_182104
tttcttaaatttttatcagaagccattttttaatcaaatttgtataattgtatccaaaagaaaaaaggggtttctctggtttaaaagaaacaaaacttttaccttgaaatgaggtagaggatggacgatgatgacaagaagacgaaactgcatgagaaaaagaaaccaaactcgacgtgatcagaagcccaacggtgatcaggaggagacgccggcgactatgatatgacggcgtttcgctattaaccattattctccctatttttcttgtctaattctctctctttttttgtttttttgggggaggtttggtttctaatttctgaaactctaaaaaagggtttatcaatcaaacgtatgaataagaatcttttacttcttcaggaaatcaaggacaaagaagatgaaacgaaactgttccctttatttagattttcaccatccattgttgttattctgttttgttttaagttttcacctcattttcttagtttttaaaatccttaattaattactcttttaactcttattggctgtgtgacctaaaacttaaattaatgaatcacatttttttctataaaaccgattatacaataaaattgaaatgaaattggtaaaaatactttatactcagggtcgactcggagattagaaaaagaaacggagaatggcattaattaccaccaatactgacatgagagctactctaattttgtaacggaaaattgcatttatgatcatctggtaccaacttttcctgcttttgctctgtcatggcattttctaaagaaaaatgttgtaactaagattttttttagaaaattgttacgtcatgtctgcataatctttacaaaagtaagctaagattaaaagtcgtattctttagttgaatttttttcaaattacaataataacgccatattctccaatggttttaagaatgtgatccatgatggatcatccatcgtttctgtagggtgttttattgagcttaacgatcttacaaaatagccacaaaatgcctgtggttgtcacagagtggaacaacaacaaaaaaaaattaagttagagagtgaattacaaatggtacgtatatgtagtagaacacatataggaggcgacaaaccatctttcaaaaccaaatcttcggaatttggcttaagacacacaactcaaccagatttctcaatgaacctcagtgttttctcctcggttttgagttgaaacaaagccactttatggcaaagatgatataccttggggagatttctccatccaaaaggacgcttctctattgcttcatgtctgttttgaacacataaccaaagagtttcttcatatctagttatctattctctacagacaagcgtttcgtccaaggacttttctaccaactcaggccttctccttggagatagccctctttcgatcatttcctcctcatattccctagccatatccaacattcctttctgaatcaacgcatcaatcacagcattatacgccgctgaatcaggagtatccccagactctttcattgtcttccacacatataataccggctgaagaaatccccatctctcaaacttcctcattagcatcacataagtatccatctttggcctcactccactccttatcatcctaccaaacagacttaggatctcactcggtttctccaaacgggaaaagagacacatgtaagtaatcgaatcgggttgacaacctctcttaggcatctcatcaagcatccgatacgcgtctctcatcctcccgtcttcacatagaagcttaatgattgtgttatgagtcgcaacattaggttcacaacctctttccctcatctcccgaaataccctgataccgaattcaacaccttgcgacgctccaatggctcgaatcacagtgttataagcaaccacatcgagtttcatccttctactcttcatttccttatacaacttcacagctttccacggtttcccgctcttgcacatgatatccatgtaaatggaatacgaaaaaagatccttagtaacaccttcagtatccatcttcttccaatactccttgcatttaccccaccatcccaatttcgaccacccacgaagaatcagattatgaatcttagtattactcacactaaaaccattaccaatgacattcttcccaaaacaaagctcttcagcttcaaccacatgtttatgctcgcaaagcgcatcgaccagattataaaatgatgtttcatctctcaaattgaaatcatccaatttatcatacgcatcaatagcctcctgaacaagatgagccgtcacataacgcttaaagactatacgaaacgtgacgtgattcggcacagattccgtgtttccgatcatgcggttaatcaaagcccaagaaatttcaaactcgaaatacttacccagaatatcgatcacccgattgaatgtctcggtggtatgtctgaatccggattctctctcgacccagttgaaaaactccaacgccttttgccaatcgttgctgtaacatgtgagagcttcgcatactgttttctgatcgtaactggactgatcttcttcttcctgagatcgaaacttcgcatcatcgacatttgaaataggttttactgacagaagccgaacggagtaaggggaagcaatccgaactcgattgagtcgccgcaacaagagcattctcttgtttcccctctccgctccctgtacacacgaaattagggttcatcatctaacgggcgaattttgacccgaatacccattttaaaatctgacccgaataccatttatgggcccaaagcccgctggacttgtgttaatatttggaacatttgggccgatctatcttctacgaatctttcttaggcccatcataattgagccatccagaggtgaaaataaataatcgaacggttaatattggtttgattataaacacaaaagttctttccaggtctccttgtagtctttgttgtagtaaatg

SEQ ID NO: 30972 - DNA, 3003 bp, Unknown
  misc_feature (1)..( 3003): 2750-1469P.txt file - cDNA_ID_3037544; gDNA_ID_2213669; Annot_ID_182240
cattttcttaaatttttatcagaagccattttttaatcaaatttgtataattgtatccaaaagaaaaaaggggtttctctggtttaaaagaaacaaaacttttaccttgaaatgaggtagaggatggacgatgatgacaagaagacgaaactgcatgagaaaaagaaaccaaactcgacgtgatcagaagcccaacggtgatcaggaggagacgccggcgactatgatatgacggcgtttcgctattaaccattattctccctatttttcttgtctaattctctctctttttttgtttttttgggggaggtttggtttctaatttctgaaactctaaaaaagggtttatcaatcaaacgtatgaataagaatcttttacttcttcaggaaatcaaggacaaagaagatgaaacgaaactgttccctttatttagattttcaccatccattgttgttattctgttttgttttaagttttcacctcattttcttagtttttaaaatccttaattaattactcttttaactcttattggctgtgtgacctaaaacttaaattaatgaatcacatttttttctataaaaccgattatacaataaaattgaaatgaaattggtaaaaatactttatactcagggtcgactcggagattagaaaaagaaacggagaatggcattaattaccaccaatactgacatgagagctactctaattttgtaacggaaaattgcatttatgatcatctggtaccaacttttcctgcttttgctctgtcatggcattttctaaagaaaaatgttgtaactaagattttttttagaaaattgttacgtcatgtctgcataatctttacaaaagtaagctaagattaaaagtcgtattctttagttgaatttttttcaaattacaataataacgccatattctccaatggttttaagaatgtgatccatgatggatcatccatcgtttctgtagggtgttttattgagcttaacgatcttacaaaatagccacaaaatgcctgtggttgtcacagagtggaacaacaacaaaaaaaaattaagttagagagtgaattacaaatggtacgtatatgtagtagaacacatataggaggcgacaaaccatctttcaaaaccaaatcttcggaatttggcttaagacacacaactcaaccagatttctcaatgaacctcagtgttttctcctcggttttgagttgaaacaaagccactttatggcaaagatgatataccttggggagatttctccatccaaaaggacgcttctctattgcttcatgtctgttttgaacacataaccaaagagtttcttcatatctagttatctattctctacagacaagcgtttcgtccaaggacttttctaccaactcaggccttctccttggagatagccctctttcgatcatttcctcctcatattccctagccatatccaacattcctttctgaatcaacgcatcaatcacagcattatacgccgctgaatcaggagtatccccagactctttcattgtcttccacacatataataccggctgaagaaatccccatctctcaaacttcctcattagcatcacataagtatccatctttggcctcactccactccttatcatcctaccaaacagacttaggatctcactcggtttctccaaacgggaaaagagacacatgtaagtaatcgaatcgggttgacaacctctcttaggcatctcatcaagcatccgatacgcgtctctcatcctcccgtcttcacatagaagcttaatgattgtgttatgagtcgcaacattaggttcacaacctctttccctcatctcccgaaataccctgataccgaattcaacaccttgcgacgctccaatggctcgaatcacagtgttataagcaaccacatcgagtttcatccttctactcttcatttccttatacaacttcacagctttccacggtttcccgctcttgcacatgatatccatgtaaatggaatacgaaaaaagatccttagtaacaccttcagtatccatcttcttccaatactccttgcatttaccccaccatcccaatttcgaccacccacgaagaatcagattatgaatcttagtattactcacactaaaaccattaccaatgacattcttcccaaaacaaagctcttcagcttcaaccacatgtttatgctcgcaaagcgcatcgaccagattataaaatgatgtttcatctctcaaattgaaatcatccaatttatcatacgcatcaatagcctcctgaacaagatgagccgtcacataacgcttaaagactatacgaaacgtgacgtgattcggcacagattccgtgtttccgatcatgcggttaatcaaagcccaagaaatttcaaactcgaaatacttacccagaatatcgatcacccgattgaatgtctcggtggtatgtctgaatccggattctctctcgacccagttgaaaaactccaacgccttttgccaatcgttgctgtaacatgtgagagcttcgcatactgttttctgatcgtaactggactgatcttcttcttcctgagatcgaaacttcgcatcatcgacatttgaaataggttttactgacagaagccgaacggagtaaggggaagcaatccgaactcgattgagtcgccgcaacaagagcattctcttgtttcccctctccgctccctgtacacacgaaattagggttcatcatctaacgggcgaattttgacccgaatacccattttaaaatctgacccgaataccatttatgggcccaaagcccgctggacttgtgttaatatttggaacatttgggccgatctatcttctacgaatctttcttaggcccatcataattgagccatccagaggtgaaaataaataatcgaacggttaatattggtttgattataaacacaaaagttctttccaggtctccttgtagtctttgttgtagtaaatg

SEQ ID NO: 30973 - DNA, 3000 bp, Unknown; identical to SEQ ID NO: 10646
  misc_feature (1)..( 3000): 2750-1469P.txt file - cDNA_ID_3037547; gDNA_ID_2213666; Annot_ID_182102

SEQ ID NO: 30974 - DNA, 3000 bp, Unknown
  misc_feature (1)..( 3000): 2750-1469P.txt file - cDNA_ID_3037585; gDNA_ID_2213667; Annot_ID_182148
tcagagcagccagaggttagactcagttacctccaccagatgactgaatgaattatccttcatcgactctaaaatttctttggcaacattagtctctatatgaaacccttctacttttttattagtagagttgcagcgcagaataagcggaatgatttcaagcaactgctcatcttgtttcagcattagtctgagagccgtctgtcaagagaagattagttagaatcaccgtgaatcagggagagagactaaataacagtcaatactaaagaaattgcttgaaaatgacataaacgattagacagggacataaaacctacctgtaagaccaaactgctatactgatcgacttgaagatacttcatgtcctctctgctacaacttaatagcccagataaaaggtacgtgagcatacctggaaacccttgatgagggatttctaaattattgtcatctagctgagacatcttcagattcaaacgtttggccagagcttttgatgattttgcgccataaagctcaggggaatctaaagagactcctttgcaaagacaaagaagccttcgtagtacatgcgaaccatagcagttgcacatcatatcaagaggattatccacaatcacctgaccaggggaaatatttcaccatcaaaattgaggtcaattactagactagaagcaataatctggataccttaatatgattgtcaaagccagtaaaaattgtataaagtaccttgcatatagaatgcaaagcctcctcaataacagaataggcgtctggattttctagatgtgtggccaaggatttgagagcagactctgcgacatgagaaccagatctatccattgcaatggctgggaacacactagcagaatttcgtatgaaactgcagagttggtcaagttcacatccctcaagtagagtttgcaagacatgacttatgatatagtctgtagcaatttcatactccctccctcttgtttcttcaagggcatttccacatattactgaacgttcctctaattcaacttcattactatcaaagagattggcaatctcagagaaatactttgaagtctctggatcaatctctttcctgaaaaagatacacccaaatcactaccacttctcacaacaacaaaatttcgactataaattagagcaaaggcccttggttaaaaatctcctttacctgacaaattgattctgatgttcgaattcggagtgtttctttgatgctggctttacattgggggcaccaccggattggttcttcttgctgctatctacatcaaatccacggttacccttatggtccttcctacgcattcccttattcctttcactgtgattgttactagactttcctcgttcacccatcaagctatcttcctcaatggtcctgtgcctcctagatggcaatgatttagaaccaacagaaaccatgaaaattcctagccccaactatgttaaaccctacaaaatttacacacaaaaaaactcagcttcgaagaactattagtcccaaattacacaatataacaaaaaagggaaaggttcaattttttctccaaatttacagaccccaaaaattagggtttctacctctacttcaaaacgataccataactgggttgaataacctaaaacataacaataaattccgagtcccaattctaagactttacactaatccatgtgaagcttgtacaaaagaacagaaacaataaggtgtatcacaaacctttgaggatgcaaaaacacagttgacgttagaggagaaacgaacaagcgtgagctcagactaagaacgcggcgcagagacaaaacgacgtcgtctccgaaactcttggtatacgttggatcaaaatcttcgatgttttgacgttgtacaaattttctaattcctagggttttattctcgtccaacctaatacgatatcgttttgttgacgtggatataaacaaataatgggctttaaatcacgattttaccgacctttttagggcccaattatgtagcccaaaaaaaacctcatcgttagcaatgtgctgctacatgttgttgtgatttatttaaatttagagatttctaaaaatttataactttcaaattagctgtaggttttataagtatctatttatccccaaattagattacgactgtgattggattattcaattttggtccttttggataattaagtcaacggaagatagacttcagacatctttttttgataaaagacatgtctttttttgggattagtcgtgtgtttaacagataaatcaacaaaattagccgcctaaaaaaaacccctacaaatatcttcatcaattagattttcgaaaagaaaaaacgaaaaagcaatttctgagcgtggaggacaaggcaaaattcggtgtgcaaggcactggatattgggacccttgtttcctcgtgagagaattttcaatcctagggcttaaagagcacgttcctagtataaagctgattcacagatgcggagattcttgattaaccaagctaaaggtctcgtcgaccattctcgtcgtcaacatcaccacaaaagtccaagctttctctctcctcaacctcgtccccttgcttcttctcctcctgctctgtctcgtttcttctcttctacttcggagatgtctgcttctgattccacttcttctcttcccgttactcttgactccatcaatcccaaggtcggtttctaattctctagctggtttattgcgtttttgaattgtgggtttcagggttgatctggatttgtttctaatttagtaaaaaagtttcaattttttactgtggttgtctgatttaacgccaaaggtttatcctttgcttctcgttgtgattcccaacgatgaaatcgacaagctttgcataacttctttgtactttatattacagagaagttggttttattgttaactaagagttttttttcttttccggggaacaggttctgaaatgtgagtatg

SEQ ID NO: 30975 - DNA, 3000 bp, Unknown; identical to SEQ ID NO: 10661
  misc_feature (1)..( 3000): 2750-1469P.txt file - cDNA_ID_3037589; gDNA_ID_2213667; Annot_ID_182143

SEQ ID NO: 30976 - DNA, 3003 bp, Unknown
  misc_feature (1)..( 3003): 2750-1469P.txt file - cDNA_ID_3037593; gDNA_ID_2213667; Annot_ID_182142
actattgttgtataagttctagtaaggtatttagttttatactctttctgcttgattttttttccttttcttataacttctttgtggttctatatatgtatataacaaaaataaacttttgaaatgaaaatgtatgttgtagaatttaattcagaattatcatgaaaccgatgttgaccattgatgttttaataaaaggtaggtggtccatcgacgagattccaagctggcaatagaagatctaagaagtagagcttaaaaagtttttaacattttttgtattttttttttttgtggaacttcatgttgtaaaagttgtcgtggtgaagaaaatatggtggtatgtactattttgtatacaatgtgatcaaacgtctaggtcatttgaatctcatttttgagttatgcacattcttgttaaagtacaaatgcacacaaaaaattagaatattgatattgtatcttccaaataatatatttactattcatatttgacatgatgatcaaatgaaacttcacaaattctcgtatttgattcagttttacataaatatttaatactccacaaatatcaaatgaaactccacaaattctagtatatatatattcctctgtcgtgcaaaaataggatattttggaaacgctgggaagtaggagtagccgagtaggaccaaagagacaaagctagtcacaagttgtcatattttttagttcgtgaagtccaaatcaccactattttcgcagacctgcgacttcgagacttttcttcctttttttaatatatatatatatatatatatatttcctttgacaaaatataatattgttaacttatacaaaataaaataaaatcatgttatccactacatttacttgatatggtaaacaaaattagaagttggatgaaatcagaaataaatgtgtatgtatcaccaagttgataataattagtggcctttacaccgaatctggtccattacttttttttctaatttgacatatagtaggtttctccaacttgtataaacgccgcttattttcaatttaattcgtaattaaacaaatatgttcagtatataattatgataacatttttctatcattcttttctgattctgttttttcttaaactattaaagcattaattatgctgggaattagtgatacacatatatacagaaaaaaaaaatccgtggaagaaaaaataaataaattacgttcttcgttatgaacattttttgtgtgcgaccgaaaagaaaaaacatttttgtagattaagaaaaatataggctaaattgagggcgggaggtctaatatgtccaatctaaagtgggccgttaaggcccattagtgtttctcatgttttatcttcttaaattctttattgctcaatggctgctgattaccggttcgaatcgtacggaatctagttttagttaagaagatgtgctgatctaattactctatgatcaaaatcataaaattggagccaacaaaaatatcataccaaacacatgacgtggccatgtggaattgttggcaaccccaaaacatccaaacattggtttgttgcaaaactaatcagataattaatgagattaggtacagtatttcatatacatttaaggacatttaatgaaaattaatgctacattagaatgttagggttgtttgattggtgaaaattacaattgccagcaattatgttactgtaaaattgccattcacattttcacccaattgatcaataaaacttttcatcgtcattcttttttttttccatttgaaaatctgttttttttttctgtgttggatgtaattttttttctttgaaatatttttattacaaatatttaaccgtaataaaataaaatacagtctactatttttagaacgtttattgcaaagttctaaaattgctaataaagtcttccaagtgaaaaatattttaccgttgaaattatgtttatttattactactagctagagagcctaggcttcgaccaatttttagttacgatattaccctcatcgttataggctttattaggaaagtaaaccggtgttgttaaaaggttttgagggtattatggtaaaacgtagtactgcggctgtatcttttttttctttcctaatcgaagacgacattcgtcggaaaagaagttgtctgaataaggaaactctctctctctctaaacagtctccgcatattttctctctctaaagactctgtcttttttactacggagagagagagagagagagagagtgtgcgtgtgctggtttcgagcgtggatattaagggacagagcaaaatcttctttggtgggagaaataaagaaagattttgcattttgagcaaaaccagtagtgaagtgacaacattaactcctgacattgttagggtttcatcttcttttctctctttctcaacctctcttgccgattgagaacttggattaagtttggaaatactgagaattggaaagttcccagctcaatgctggatcggcaacaggaggatcttggtatgttctttatggattttgcatgattttgagttctgagctttggttttttttttccggattatattaaagttgggatttttatggttgggtctttacttagagtagtggaatcagatctgagaagcatcgtgttccgatgaattagatcctcgatttctatgtctggccatttatatggttcatgacctgtttttgtcttccttttcatttcccgagattctttgtttctcatcaaagttatattccgtgattgtcctacttatttcgtgagaatgactctggtttcattcatcttttgctttcaacattgttagcaagttggcttttttttttgtaatctctgagtaacagtttctattattgttttctcaggtttcttggcattaatttgagtttgttcagttgaattctgttaatctcagtgatacttctgctggttggttagcattagcaatctggtcttgtgagaatg

SEQ ID NO: 30977 - DNA, 3003 bp, Unknown
  misc_feature (1)..( 3003): 2750-1469P.txt file - cDNA_ID_3037597; gDNA_ID_2213667; Annot_ID_182141
catgttcaacactttcttgtaacttagtgaatttcttgctataggtgtgctatacttattcttgtttgtaatcataatcaagtgcgtttgattggaaagtaacgattttgtttcaagactaatctctatggggatgaaattttctcacctttctactttgcatactttttagctagtctctaacatattttcacaatgtacatactgtatatagctctaacgtgggaactcgaagaatgggtaccccctgtagagaagtgtatattcaagttcaattcaaaagaagaccttaagacatggcacctatactctgattctgaatatggaggtacttaaatcacacaagttcaggcatctgcccataatcatgttacagaacctattattgcctgtttacatagtttcttttactttcattccttgttggttcatgttatgaaataatatttctgatatgcagtgcataacaattcttcatgtgatatgctcattatagtgtggatattttactttataggattatcttcggcttcgttggaaattaaagatggaggaaatcgatcagattgcaatggttagtatattgtggaacaagtgtgccttgctttttctttctgttactttttcgcttgggtctgatacaattagtttgtgcaagccagattttcgaattaggctgggaaagttaggccatcgatgcttctttgacttaaatatactgtgatgattttctcatatctagaggcatagaaacgttattgagcatgctctaacgtctaagccaataaattataaaatgatttctcttgaaatttctggaactacagttttcctggtttagctgtttaggctctcttaatcgagcctcaggcgaaagtatgaagtttcttgcttctcataccatttacctctcttcatcatgtttttttctgcaattgggtggtgaccgttttcaccttatgtctcctttaggtgttttctctgggaacctctctacggatatgagggaaggttcaaaatggaatatcaatcggagtggtttctgtggaatgcggtcaaagaaggttaaaatcataggttttgtttttctttactaatcatcacatcatcaatcaaaaccaaagatttgcatgagtttatgcacaacttacttaactaaaaccccctcccatttttgtagtttgatggctttattgatctcgaagggtatgattccatagccctgaggctcaaaggagatggaaggtgctatatttctactgtgagtctcatgctcaacattcatgtctttttgctccagatgaaacacaaggttcaaggagcataacttttttactaaaaactaaaccgcagttccaattcagatatatactgagaactgggtgaactcgccaggacaagcagaagacaactcatggcaggcttttgtttttgctccaaagggaaactggtatacagctaaggcaagtctcgtacttctacaaagcaactagtgttaaaaggggttttgctgtaacttgttaactcaagtgtgacatctttcttcttcaggttcctcttactcgctacttaccaacatggaaaggaaacgtgatagatgcagaaatggagatgaatccaggtcatgttgttggtatgtctctatccgttaacgcacaaggaggtggtttcattggagctaaatcaggcgcaggcgatttccaagtcgaaattgactggatcaaagcagtgaggatgccatgaacgatgatgaaaaaagctttctgatgaacaaattgagaaccataaaaaagattgttgttctctgggtttaattgtaaaaccgggatttgggttaaccggatccaagttgatgaacaaaaacgcttatgaattgacttaaagcaagttgatggacagcaacttgaaaagaaaaatgggccagaatggcaagttgctcaatttatttaccttaaagtgaccataaagtaaaattatctaattcttgaaaaggtaatattacaagttttttgcttttgaaaaaaaagttttcaagataataaccttattaagtttcgttatacaaatcctttatttgaatttcagcaagactaggttataaaattctgctaaagtagaagcacatataaaaatatgtaaattctatggaaattgacataaatagctctaaaattctacaacgttcctacattatatatcaaaaatgtctatgctgacaaaacaagaagaatgcatccagactattacaaaataaatttgatgctctagagtcgttgctcaaatatttattttttgtattcctgccaaactattttttttcttctaaaacatgagtactcgatcggattttgctatactcgactaattttagggtttagtagatttgttacatatacattttgtaacctacatagaaatcaaatgaccaaaattacaaaaaaattcacggttttgatcttaccagtatacggatcattatttttactcagtaaaaaaataattgataaatgatttcttaacctttttctagaaaagtgagtttaatcttccattcatttaagtcttaaaaagctaaaacatttacaaataaaagatgtagccttgttcaaaattggttgcgtatactcacaattcataaactagaaagaaaaaaaacactaaaattaaagtagtaaaataatacactacttttagttttaaaagatgttgtctaaaaaacgaggataaacataaacaactagttcaagtggctagtttctcgatcattctttgttaccccagtctcgtatatataaatagtattatatacaatacaaaagcacgatacccaaaatatcaaactcttcttcttttcccttctcttctcttcttctcttcttccacgtttacgcgtatacacatctctatacatacattaatcttgatccttctttatctctttgcttccaataaactccaaagaacagctctttctttttctcattcttactatcatcattaatg

SEQ ID NO: 30978 - DNA, 3003 bp, Unknown; identical to SEQ ID NO: 26833
  misc_feature (1)..( 3003): 2750-1469P.txt file - cDNA_ID_3037601; gDNA_ID_2213667; Annot_ID_182138

SEQ ID NO: 30979 - DNA, 3003 bp, Unknown
  misc_feature (1)..( 3003): 2750-1469P.txt file - cDNA_ID_3037605; gDNA_ID_2213667; Annot_ID_182133
atgactggttaagtggtccataatccatctcttgtccttattttcctccctttttataccaaccatttatgtatatcttaattacgctgaaagcatgcgtcttagagtcaagtcgccacgaacactctgatatattaatgcttaaaactaattaatctcgattttgccatagatactgttgataactaattcaatcaaaggagatcaacgaaaggaaggcgatagaagaagttaacgtaagaacaaagttccatggggaccaataagatatgcatgtttcctccaatgatgttagttcatttggtaacatgaatcgctattggactttcataactcccttagattatcttaattgatatattttatatgttgtataattgttttagaaccaacattaatggatgcatatactagaatgtatttattctaattatattaatatatcacacctatatatctaattatatatctatctatctataaatattataataataatatatttgattaacatacgttgttttttaaagtattttatacgtatagcttgtgcataaactatgatatgtacctagacggctagacccgttcagcaccgcgtccattcgaatttggactagacaatcgacccaccctatacataataatttgttggttcaaaaaatctcttggattttggtgcttaatttgctcaaaatagtactttggctacactggctagtgcatgtggaaactgatagtagccgttgaaagtcaacctgacccctttgggaaaaggattacaaacttagacccaccaaacctaacctttttaccttagaatacgtgtctttctcaccataattagtttgtttatctctagtaagaattggaactacaaaagtagtttatgtaattaacaaaaacaatgctcgtttgtttaagcaaagcgggggatgggaaaaatgacgtggagaatgtcgattggacctgagttcacgtgattgggagtggtgcggtgggctcaactctccgatgataaagcgaaactgctttttgttgctttccttttgtctcctttttttttcttccagttctctcaccctattttgttcctcatccttatttatgaattttaagataaaaaaatatatatttaagtaattaaaatgtcgattttttttataagttcatttgaattttttaggtttataagtaaaaatcaattggtcatgaatagattgatttaaaacgaaaagaaaagaaactaaaacgtattaacccttgtttaaatacctagttatatacaagcaaatcttcaaacgatattattaaagggatgatgcattagataaaacaaattactagcactctagcagtatcatcaatagtttatggtaataacccaaaccgttcaaccattaaaaaacgatattggtatatagatgtgcacaaacttggtcaacaaaagttcatgtagtcaattataaatcggggattagtataaattttcatacggctttgtattctatcgtggcaccgtggtgtgtaatgtaaagatgattagataagaaatgtgttacacgcccacaacatatgattcaattatttgatggaaaatatagataaaatgtatagagaaaaagtactagaagatgcgaaatccagaaggtaaggggacaatggcatgagttccttcgtgggatttgctttcttaatttcactctttctttctgtctctttccctcttagatttttctgaaattctctagaattttatattagctttagtgctttacataatttacatattatttagttcttttgtcaattagaattacttgtggatcaaactttaatgagcaaatatttctggtcaataaaacgcttcgcagtaagaggtcacaaattaaacccattttttcatatttatattttttgacgtttgatgtgtacggtaagttgaaacttgaaagctatattacaaacttgatttcccatattccttttcatgcatctactattactaacctagctagcaaataaaatgacatgtagcatattggttggtttataatgcatttgttgttactctcgagatttaaactcatatatacatttgttgacaaaaaagtaactttaaatagattttttagattagcgcttctaagttataactatacactgatttctagtgtaatttatgcattctagttctatatacttaatagtaacttttatacagtatttgtgtaagtagttttcaagtgaatttttttctcaacatatacaatgtatattacatataatttacgtgcaccttttaaaaatgaaaaattcgacgaaaatcacacacaacaaaatgtgtggaagcctctatatcttcgtgtcagcatagtaaccattcaaggacgatacaatttttctagggattcaatataatttccctctcctcttatagatagtcgaaaaatggtagaaaaaggaatatttgagactgtttgatgaaacgaagtgccaatatatgaattgtgatcaaagccgtgacgttatctccaatacaaaaactaatattcttattgtactccattaattaattgagctataatacaaattaaatacgtacagaagaatgtttctttgggcctcgatcgtttgcatggggataggtgcgttaatatgagtgctacgttgtgagctgtataaaagaagagtgtgggaataggttttatctgaacagaacttaaccaaaacccaaacaaattgaaagaaaaaaaaaacttttttccttcttccttgatcctttatctttttcgaagaagtgaatctggacgaagaactaaggccgccaattttggaatttgaaccatcaaattcatcaacaacaaaaaataaagatcttaatctttgaatttctacttgtatttaagcttcttgattcaccttaaacccgagttatttcatttctttttccacctctttctttgtcttcttcttcttcttcttccgggtcactaagacatg

SEQ ID NO: 30980 - DNA, 3003 bp, Unknown; identical to SEQ ID NO: 26841
  misc_feature (1)..( 3003): 2750-1469P.txt file - cDNA_ID_3037608; gDNA_ID_2213667; Annot_ID_182132

SEQ ID NO: 30981 - DNA, 3000 bp, Unknown
  misc_feature (1)..( 3000): 2750-1469P.txt file - cDNA_ID_3037617; gDNA_ID_2213668; Annot_ID_132730
tgatcaacagatccagacacaactttaccagcacagctcgaacaagaaccagcacggcaagagtaaggcaaatcgattccagcttcctcagcagcatcaagaacgtagacgtcgtcgtcacactcaacctctagctcaccttctggtgtgatgaacttgaccttgtatgtagccatggctgtgacacgtccaccacgagcggtgcctgatttgagaccgaagagggattgtgtgttggctgatggaagggaacggagactgattggagctggggaacgacggatgaatgaagttccgacgatggcgcttgagagagcagtggaagccatttttttttgttttgtgttttgggagataaagttgagatttttgaggattatggcttgtggaaatggcgtggagaaagattaaaaggtgagaactttttagtgagaatcctatctaccacgtggcgtctattctgtggatcgatggattatcgtctttgtgttttatgatttgtgtgtgtgtgattgtgtttgacacactttaagaacactatcttgttgaggtgagtattacgtggtcttacttgggacagctcacacttattcggaccttgtttgtatcgtctaaataactcttcgtttgttccactaaaatcataaaagatgtggactggttgtaacatcatatctaggccgggtttaacttccaaaccgtatcaacctgaccgaatcaaaccattttaacccaattactgtaaattactccattataattatataacgtaaataattgaaccttacatagaatgtataccaaatcaacaagtgaatacataatctccaccttcacacttcagtcaacttctaatggcctttcagtacatgaataaattgttgggagaagaggtcatacttgcttgaattgggtggaagtagttttctagtgaagaccagcctcttggcataacgtcggaaagtagaaaaatcctcagaaacttaaacacaatcaacaaagtagagtatgagaccatctacatcggttgattctcaaaaaagagtttctcatgaataaaatattgcttattttaattgaatttagataaagtattaaattttaataaaaagaataaaatcaatcatttctggaaaaacacgtggccataaacatttttcagagtttctgaaaacagagacgattctcacttctctcttcttttcaccactttgtattattttaataataaatatctcttttaaatactgttgatggaagtgtcctgataggtttaaaactttttagttatttttaataaaaagtgactaaattttttattttagttaaagaaaagtggttgagatctcttttaaaaacaatctatctatcatatcgaaatgacaaattagataatcgtattatcaaaagctagatctaactaggaattgcaagagcatattttgcagccccatttcaatctactacatgttgcaaatagacaaatagataatcatatagataaaactcatcaaggagattgacttattgttaacgaaaccaaacccatgacataatttagtaatgatgtaagtgtttttgtacatgaaacagtttgccacaagcaacaactggacttatgccactgaaatcaacgaaattagaaaccatattaaaacctaatccatagtgccacgaacacaagaaacctacaacgcagtcgataaacacttgctagaattacgtttcttaaagttgtgcattagccttacttcatctattgggccttaaaatcataaagcccattacgagaatgcaatcgtaaatgtttttttttctttcttactcaacatctatatgatatatccgttatctgttggggtagcttaagcaaagtcacaactcacaaatctatccatcattcaatgtaacaaatctattgcttttttagttaagaagagaatttatttagtttgcatctcctattattttaacaaaactaataattttttgcaaattttaaaattatatctcaactttatacatataatcaaaatgtgatttcacatagccacattcggaaagtataaaccaaccattctacaaacaaccaacaagtcaatgtttaattacgtttttcaggttaattcagaagttgttccaaatcgaatctttccgtaaaaggcaaaaacatatctagacaatccaacaagataactaagtcatattcagattcgttatataacttatatagctttctactgaccgttagttgcaattatagtttatctaatattaaactaactttcttttttgtaactaaatactctcgggtaaaaaaagtcctaacaatctcattttttgataactggatactttaagataaaatccaaactaatctccagctcttataaagatccactagagaattatagtaaacattcttgagtacaagttgttttcgtattctcttgattctttaaaaaaagcatatccaataaacaaatgatgttctcgtagaatcggcaaattgcaaaaagatgaaaaaataagaaatagacgcaattctgtgacaactaaaatatccttttcacatatagcgacgtctcagtcactaaagaaccgatagaattggaatttgtaggtcccacatttattaatatacctcttaaattaaccaaaaataattcaataagtaaactattacttaaataataaaaaaataagagccatcgtgacttcgagagaagaagccagcaaggaacgatggagattattacggcatcatcatcatcatcatcatcattgtaattcgtaatcatatcttcttttggaatttcttcacggataagaaaaaaggatatcgacaatttcgcttttgctttcaaaatctcattctatcactttgtgccttttttagccatcgcgaaaaacctctgaatcgcatcccttgattttctgggtttgtgactttgtgtagtggaaattaggcttgttgtttgatttcgctacgagaaaatg

SEQ ID NO: 30982 - DNA, 3000 bp, Unknown; identical to SEQ ID NO: 30981
  misc_feature (1)..( 3000): 2750-1469P.txt file - cDNA_ID_3037617; gDNA_ID_2213668; Annot_ID_182171

SEQ ID NO: 30983 - DNA, 3000 bp, Unknown; identical to SEQ ID NO: 10683
  misc_feature (1)..( 3000): 2750-1469P.txt file - cDNA_ID_3037642; gDNA_ID_2213668; Annot_ID_132732

SEQ ID NO: 30984 - DNA, 3000 bp, Unknown; identical to SEQ ID NO: 10686
  misc_feature (1)..( 3000): 2750-1469P.txt file - cDNA_ID_3037671; gDNA_ID_2213668; Annot_ID_182189

SEQ ID NO: 30985 - DNA, 3000 bp, Unknown; identical to SEQ ID NO: 10688
  misc_feature (1)..( 3000): 2750-1469P.txt file - cDNA_ID_3037686; gDNA_ID_2213668; Annot_ID_182181

SEQ ID NO: 30986 - DNA, 3000 bp, Unknown; identical to SEQ ID NO: 10690
  misc_feature (1)..( 3000): 2750-1469P.txt file - cDNA_ID_3037708; gDNA_ID_2213668; Annot_ID_182173

SEQ ID NO: 30987 - DNA, 3003 bp, Unknown
  misc_feature (1)..( 3003): 2750-1469P.txt file - cDNA_ID_3037716; gDNA_ID_2213668; Annot_ID_182168
aatatctatcttcataattcacactccacatgaatctattcctagtaaccctaagtgttttaataataggatctagagatgttcgaagatataattgcattttacttttcgtcgtacttatgacgaagcaagccttggacatctccgttttaaaacagggatctcatgatcttgaaaaggattcttcaagaagcacagaaaaagacaaattcgtatgaattattgactcatatcaaagttatttcatataaacaaaatcctatgaattattgacactagtcaaaactcaatgaacagattgattggccgtgaatgctacggtccatgaagggatcgagtgtggaccagtctctgcaatatatgttgttaggttgacttgttttcactagaatcgtatgtttttccaatccatcagtacgtttaacttcaaaccaccgtcaaatgaaagctaatttaaacttcttctttttttgtaatattttgtgtcaacaattgaatttgatccatggtgagagaaacctctaaacgccggagatatttgtgatgttttaacgtggtctttcatcttcaattgctagttacgcctagaaacatatgtgactttaaactatcagataaagacttataaaacacacttttaaaaagtcataaacaaagacatctaataataatcaacccttaattacacaaaaaataataatgtaaaacaatattagaatgatcaatttttaaaatatttagtttttttttttttttggtgatagaaactaaaaatttagactataagccgataaagctgataagcccattaagtataatgagaccctagttttcaaatttggactagacaagcccatttacggttttggtgtaacaccaaaaaatactgttcaatttacaataatacccatatatcacttcatcttcctcgaagaatcttcataatttttaattcatcctccattagaatccctagggttttcttccatacacaatcagactcaacgataagtaccaatcggagaagagatcacaagtggatgatgagttacgaaggcaacggagatggtgtcgctatctccaccgaaaaccacaacgagaactacatatctctagagagctcgccttttcatgaagactccaagtctcgagtatgttacactttcttctttacatatcttgcgttcgattctgtagcttttaggtttctctcgtgaattagactggtaatcataatttgttctccacttgtattgtaatttggtacaattctcggattctgcttgttgaatttatgtttttgatagtttgatttgaaggattcactggatttagagtatatattatcatgttaagttcatatgttctctttagaaatctggggatagtatatgagagaagccttttgacatttgtttcctgcaggaatctcatgatcttaaaaaggattcttcgaaaatcagtgagaaagacaatgaaaatggacgtgataaagacggaaacaaagatcgtgatcgtgagaaggatcgtgatagggagaagagcagagacagagatagggagaaaagcagagatagagatagggatagggagagaagtaaggataggcaacgagaccgtcatcatagagatcgtcatagggaccgtagcagagaacgtagtgagaaaagagatgatttggatgatgatcatcatcgcagaagtcgagaccgtgataggtactcattagtgtgttgcaattgtttttgtagttttagattgttttattcttaaaattgaaggtgtagtcatttctcgacaggaggaggtctcgcgatcgagacagagaggtgagacacaggcgacggtcacgctctcggtcaaggagccgctctgaacgtaggtcaaggtcagaacatagacataagtctgaacatagatcacgctcacggtcgcgatcaaggtcaaagaggtacctgggctctcctgctatttttatcttttctaactagttctttccgtggccacattgcaatgtgttatgatattgatgtcaaatcaaataaaaccattattgtttagtatttgatgtctttgttttgttgacacaatatgattatcatggtcttctactgggttgaacggtccctccttatatgattaccaatattttagtctgatctgggtcattgatgtttatgtgtgtttcatacgtttacttggcattattttttcgaactcgtctctactgatgtctaaccaattatattttgctctttcagcaagaggagaagtggatttgatatggcgcctcctgatatgttagctgctactgctgttgctgcagcaggtatttgcttcatcatctactcagggttattatatttcttaactgcttgttgtttttgattttacgtagtttggaaagatcatagtcaattacacggtgtgactttggtaagctgcaattttattgtttactcgtgaacaaagaggactttgaagtcttgctttcttcataggatgtcttgttatttttgtttgactggtggttctggaactgagaaattttttgtttgtgtttttttggtggtgtttgtttgtttctgtgtcttgtctttttgtagtaagaaggctatgttgggttagttgccccactgtgctgacaatgagccgacctctctagctttaattgtacaaggaggaatcagtgcaacggttgtcatgggtatttttcatcttcgactggcaactatatgcctgttttcgagccttacaatctctgacaactaaaacgaatattacatcacaacttttcattttaatattcataagttgttggtatactttctacttgtgggttttgtaagtagcaaggtgttatctgtagctttgtacttgttggtaggtctgctcctccgggaaacataataatgtatctaacaaacatttttatgacgcatactactttacctagcaggccaggttcctagtgtgccaactactgctactattccagggatg

SEQ ID NO: 30988 - DNA, 3003 bp, Unknown
  misc_feature (1)..( 3003): 2750-1469P.txt file - cDNA_ID_3037739; gDNA_ID_2213669; Annot_ID_182223
tacagttttcaagtttttgtcaacaagtaaattgtaattcacaaagacttgttctttcaacttgaatctgacttgaaactttggaacttgattcgacgaacttaaacaacaagtacgtgttgcaattatttgtctagtcatgaatgatcagataaacaatcctcgtttagaataaacaatttctccaaacatcttatatgcattggactctgcatagataaatatatatctctctgttttgtttaatcttcatgccattgatcttcgatttctcttgacttcaaattcacagatcgagagttaatgtggtgctaagtcccaaacgttagaaaagggttggatcgtgtcaaagggtttcaatcatggggaaggagaatgctgtttctggaaactctataccaatccatggtcgccctgtaactcgtgctcttgcctctgctctgcgtgcttcttctaagctgataacatcttctgaagtggctgctacaacacagaaccagggacgggttcttagagcaaagagtaaaagaacagccttggatgagaagaaagccaatgcacctaagaagcgagctgttcttaaggatatcactaatgttacctgcgagaattcttacacaagttgcttcagtgttgcggttgttaactacacaatgcagcattttagaattgctaagtttatatgacaagaagtatgtttttgctgacaattgttgcttcttctttttacttaggtggagaatatcaagcagataaagaagggacgacagagttcttcttcttccaaggtggcatcttcttcggctacttcacaagttacagatgcaaaggtagaagttgtgtcaaattcagcaggagcaagcttgtctgtttttacagatacaagcttaggcacaaacgaaacatcctatagcattatcgcaaagccaagctccagatcgcctccaagaccctttgggacaggtgaattttataaatggtcatttactgaagcttgagtgggcaatgtataacatttctgatgcatctttattcttgcaaatggtttacagttgagagaagttgtggtggagcaagtagcccgaaattcgttgacattgattcagatgacaaagatcctctactctgtagcctttatgcacctgacatctactacaacctgcgtgttgctgaggtatttatcccttggattttgatatcttacgatgatgcatttgaggcatttgaatccttacgacttgtctacttatcagcttaaacgaagaccatttcctgattttatggagaaaacacaaagagatgtgactgagacaatgcggggaattcttgttgattggcttgtagaggttagttctctacttccagtttgtttgttgcttacttatgaagtctttttgtgtagcttctcacaactcaaaatttcaggtctcagaggaatacacacttgtacctgacactctttacctcacagtgtatctcatagactggtttctccatggaaactatgtggaaagacagagacttcaattgcttggcatcacttgtatgctcattgcttcgtaagttcctcatccacctaaaatcaaataatgctctggtctgaacacaacatctaaaagagttcttgcaggaagtatgaggaaatccatgcgccacgcattgaggagttctgcttcatcacggataacacttatacaagagatcaggtcctggaaatggagagccaagtactcaagcattttagctttcaaatttacacccccacttcaaaaacattcctcaggtaatcttaccagacagtgcaaatgctttatcatgtgttgttgctttttagtctttggtgattcagagtattcattcatttttgcaggagatttcttcgagcagctcaagtttctttcccggtaatgtgcttttcttttatcagatcagatatatctattgctcataaaacatgtagcagaaagattgaaactttgttggtaatttgtctgcagaatcaaagtctggaaatggagtttctggcgaattacctaacggaattgacgttaatggactaccctttcttgaagttccttccttcgatcatcgctgcttcggctgtttttcttgccaagtggacattaaaccaatcaagccacccttgggtctgtaattgaccaactatcttcttcattaagaaacacagcgaatcttgaatctcactcttgtttactttattttatgaacagaatccaactcttgagcattacacaacgtacaaagcctccgatctcaaagcatctgtccacgccttgcaagatttacagcttaacaccaaaggatgttccttaaactctatacgcatgaagtatagacaggacaaggtattaaaaaattattaatcttagtttggttttcttaaaccgaatgaagaaatctggtctgtttcggtttaacagtttttttttttttttttggcaatttacagttcaaatccgtggcggtattcagttctggagagctaccggacaagctattcatctcctaaccgatatgacacacgaatctgtagtaacatttttctgatggtccacattcatctgtctgtcaaataaaacagtgtcttcccacggtctctcatcattaccaagtaaccggattcggtgttagttcggtttagttgtagacaggtttggttctttcaaaccggacttgttcttgtcggtaacacgagttaattgtagtggaatgtacatttttcccccggtttattcaaggcaatatctggtctgcttcgaatattttatctttttattacagttgacagagagacaaagcattaattacacattatccaacggagaaattgtgactcacatagtatgtggcaagaattgctttttcgttttacgaaaaaccaataataaaaaattatcaagttggtcttcttcttcctcgttgctgatgtgtcgctctgcttgagagagtcagagagtcaagagagaaaaggggtcgagaatg

SEQ ID NO: 30989 - DNA, 3003 bp, Unknown
  misc_feature (1)..( 3003): 2750-1469P.txt file - cDNA_ID_3037762; gDNA_ID_2213669; Annot_ID_182242
ctgaaatggcggcggctctgcagacgaatatccggacggtcaaggttccggctacgttcagagctgtaagtaaacagtcattggcaccctttagagtaagatgtgctgttgcttcccctggtaaaaaacgatacaccatcactctccttcccggagacggcatcggtccggaggttgtctccattgccaaaaatgtgcttcagcaagctggatctttggaaggttctctctctctctcttgttccctttcttatttaatttagttgctgtttcatttcaattggggactactgttttctgcttggaattgaaagatgtgagcattagaaattggcgagattttgaatgggatttacaatcgtgggttgggctcaaaggccacggagattgcctaatacattgcgtctgtgctctgtatcaggagtggaatttaacttccgtgagatgcccattggaggagctgctttggatttggtcggagtgcccttgccggaggagactatctcagctgcaaaagaatcagatgcagtgcttcttggagccattggagggtctgtcttctctcttttcccactaatcttgttggctcttaattattgttttgggaaatacagtttctcatttagtcattttctcatgttggtataataataacttaaggtacaaatgggataacaatgaaaaacatctgaggcctgagaaggggttacttcagattcgtgcagctctcaaagtctttgcaaatctgagacctgctacagtcctcccacaggtgaccatcctcagagatttcttggttgcctgaactttgtttcttgtgtgaaactctaattttgttgtttttatacagttagtggatgcttccaccttaaagagagaggtagcagaaggtgttgatctaatggttgtaagggagcttacaggaggtcagttttattacttattaaaaattgatcgtaattcttgtctttctcgtgtgacaatatcttataaaatgtcatgtctcatggtaacaggtatttactttggagagccaaggggcataaagaccaatgaaaatggcgaggaagttgggtttaatactgaggtttatgctgctcacgaggtactctattgaaaatctcagatgcagatttccgtggactgattgttaagtactagggtcaaatctaataaagcattttgtatgttcgtcagattgatagaattgctcgtgttgccttcgagactgctcggaaacggcgtggcaagctgtgttctgttgacaaagctaatgttttggaagtgcggttgataattatgttttctttgacttgttttcctctctcttgtttcctgtggaacgaacataacactgaatttttttatatgcaggcctcaatcttatggaggaaacgagtaacagcattagcctctgaatatcctgatgttgagctgtcacatatgtatgttgacaatgccgcgatgcagcttgttcgtgacccaaaacaggtacgtgtactttgtatttgccaaactagtcagctttgatgtgcgacaggtgtaaatccttgcaattatttgattgtttgataaatgcagtttgacaccatcgtcacaaacaacatttttggtgatatattatccgatgaagcttcaatgatcacaggaagcataggaatgctgccatctgctagtctcagtgattcggtatgatataaaataatatgatcttttagtatgcaagcagtatgatctagtctgaacataaacccgccatgtgtaatacagggacctggactctttgaacctatacatggttctgcacctgatattgctggacaggttctaactctatccttcaaacaaacacggtttttgttccctgatatcaaaactagtttaatgccaaaatcaaagagcacaacttgttgattctttgaattttcaggataaggcaaacccattggcaaccattctaagcgctgcaatgcttctgaaatacggacttggagaagaaaaggcagccaagagaattgaagacgcagtgttggttgctctgaacaacggattcagaactggagacatatactccgcgggaacagtatgtttcttgaaccactcttataacatgtttccttttccttaaaaacgtcccgagttagtgtttgagaaacgtttaaacaagcaggcaacaacaaacagtagtaatatttttttgtctttttgtatggggtatgatcagaaactggtgggctgcaaggagatgggagaggaggttctgaagtcagtggactcccaagttccagcttctgtttaatatttgtagaaactttgaagagttcatttccaacaacaaatgttgtaccttgtactcaaagagtctcggttttattagcgatttttataatgtgagattattagagggacttatttgatcgaactgaaacgttgatgtttttttctgagaaataaatatccttgtggagataatgacgtgtcagagtatcactcaaaaagccaaaaattagagagacaaaaaagattcaatctcccccgtagtccttatccggcgccgagtgtggtcaaacgtcgcaagagttttcgctctttccggtgagatctttttcctctgatttctgtttcatggcaagcctacttttagagctgagtttaatcgatgaatcaaggatgtgaatttttgttatttcttgattattcattattatgttcaagaaatctaaatctctgcttgggaactaattcacaatttagacatctctgatgagtttttcctctgttttttatttctatcttatcaattttgtttctggaaattttcatggctttttgaatgttcattgggattgcgtatcttggtggtggtaagtaaaaagtcaaacgccttcgtttttctgcataatctctgagttccatcaaagctctgttttgtgttttcaaggtggacttttcacttgacatgttaggctttgatccttttttgttcacacagatagacaaatg

SEQ ID NO: 30990 - DNA, 3003 bp, Unknown; identical to SEQ ID NO: 26817
  misc_feature (1)..( 3003): 2750-1469P.txt file - cDNA_ID_3037765; gDNA_ID_2213666; Annot_ID_182106

SEQ ID NO: 30991 - DNA, 3000 bp, Unknown
  misc_feature (1)..( 3000): 2750-1469P.txt file - cDNA_ID_3037765; gDNA_ID_2213669; Annot_ID_182238
atcaaattaaattaggcaacaggatgagaaagaaggaaccttcaagagacccagctaaacaaagaacgtcaacagcgactgggatcacttcgttaccgacgccatcgccgggaagaaccgcgatggtgtaccgtttctttggagtgttggcggcacatctgatcacagaagctctcctaaagctctgtttggttgcggacataaacgcaaccggaatctgggtactgctgacgtggatgactcccgccatttactacaacaaagactacaaggagacctggaaagaacttttgtgtttataatcaaaccaatattaaccgttcgattatttattttcacctctggatggctcaattatgatgggcctaagaaagattcgtagaagatagatcggcccaaatgttccaaatattaacacaagtccagcgggctttgggcccataaatggtattcgggtcagattttaaaatgggtattcgggtcaaaattcgcccgttagatgatgaaccctaatttcgtgtgtacagggagcggagaggggaaacaagagaatgctcttgttgcggcgactcaatcgagttcggattgcttccccttactccgttcggcttctgtcagtaaaacctatttcaaatgtcgatgatgcgaagtttcgatctcaggaagaagaagatcagtccagttacgatcagaaaacagtatgcgaagctctcacatgttacagcaacgattggcaaaaggcgttggagtttttcaactgggtcgagagagaatccggattcagacataccaccgagacattcaatcgggtgatcgatattctgggtaagtatttcgagtttgaaatttcttgggctttgattaaccgcatgatcggaaacacggaatctgtgccgaatcacgtcacgtttcgtatagtctttaagcgttatgtgacggctcatcttgttcaggaggctattgatgcgtatgataaattggatgatttcaatttgagagatgaaacatcattttataatctggtcgatgcgctttgcgagcataaacatgtggttgaagctgaagagctttgttttgggaagaatgtcattggtaatggttttagtgtgagtaatactaagattcataatctgattcttcgtgggtggtcgaaattgggatggtggggtaaatgcaaggagtattggaagaagatggatactgaaggtgttactaaggatcttttttcgtattccatttacatggatatcatgtgcaagagcgggaaaccgtggaaagctgtgaagttgtataaggaaatgaagagtagaaggatgaaactcgatgtggttgcttataacactgtgattcgagccattggagcgtcgcaaggtgttgaattcggtatcagggtatttcgggagatgagggaaagaggttgtgaacctaatgttgcgactcataacacaatcattaagcttctatgtgaagacgggaggatgagagacgcgtatcggatgcttgatgagatgcctaagagaggttgtcaacccgattcgattacttacatgtgtctcttttcccgtttggagaaaccgagtgagatcctaagtctgtttggtaggatgataaggagtggagtgaggccaaagatggatacttatgtgatgctaatgaggaagtttgagagatggggatttcttcagccggtattatatgtgtggaagacaatgaaagagtctggggatactcctgattcagcggcgtataatgctgtgattgatgcgttgattcagaaaggaatgttggatatggctagggaatatgaggaggaaatgatcgaaagagggctatctccaaggagaaggcctgagttggtagaaaagtccttggacgaaacgcttgtctgtagagaatagataactagatatgaagaaactctttggttatgtgttcaaaacagacatgaagcaatagagaagcgtccttttggatggagaaatctccccaaggtatatcatctttgccataaagtggctttgtttcaactcaaaaccgaggagaaaacactgaggttcattgagaaatctggttgagttgtgtgtcttaagccaaattccgaagatttggttttgaaagatggtttgtcgcctcctatatgtgttctactacatatacgtaccatttgtaattcactctctaacttaatttttttttgttgttgttccactctgtgacaaccacaggcattttgtggctattttgtaagatcgttaagctcaataaaacaccctacagaaacgatggatgatccatcatggatcacattcttaaaaccattggagaatatggcgttattattgtaatttgaaaaaaattcaactaaagaatacgacttttaatcttagcttacttttgtaaagattatgcagacatgacgtaacaattttctaaaaaaaatcttagttacaacatttttctttagaaaatgccatgacagagcaaaagcaggaaaagttggtaccagatgatcataaatgcaattttccgttacaaaattagagtagctctcatgtcagtattggtggtaattaatgccattctccgtttctttttctaatctccgagtcgaccctgagtataaagtatttttaccaatttcatttcaattttattgtataatcggttttatagaaaaaaatgtgattcattaatttaagttttaggtcacacagccaataagagttaaaagagtaattaattaaggattttaaaaactaagaaaatgaggtgaaaacttaaaacaaaacagaataacaacaatggatggtgaaaatctaaataaagggaacagtttcgtttcatcttctttgtccttgatttcctgaagaagtaaaagattcttattcatacgtttgattgataaacccttttttagagtttcagaaattagaaaccaaacctcccccaaaaaaacaaaaaaagagagagaattagacaagaaaaatagggagaataatg

SEQ ID NO: 30992 - DNA, 3000 bp, Unknown; identical to SEQ ID NO: 10643
  misc_feature (1)..( 3000): 2750-1469P.txt file - cDNA_ID_3037769; gDNA_ID_2213666; Annot_ID_182109

SEQ ID NO: 30993 - DNA, 3003 bp, Unknown
  misc_feature (1)..( 3003): 2750-1469P.txt file - cDNA_ID_3037769; gDNA_ID_2213669; Annot_ID_182235
tatttggatataagttcatttgccgatttagcttgcttttttattcaaatactgattaacatggaatgcaagaaaaaggaaaaaaaaaccttcttcttgccatggcgagtgagaggactactaaaaagaatacagtaattccaaactgataaatatgagtttttacgtgtggaaaaaaaaaatttgagtattaccttagctctgcaagatatattaagaatacagcaaataaagaagaaatcaaataagcatattagatttgttttcacaaactgaaaaatcctcaaatacataaaaagaaaaacacataaaaatccaaactaataaatatgattaatgattcactgattttcgcctgaactaaattatggtcgtaagttttttgtaaaaaattgttaaaaaaacaaaaactgtcttatcgagacttataacaaatgatgaaaatctgaagaaataatatatatttttcaaataattatgtggtttgacatgtcaacgtctttattatcaatcagaagacagtaaggaacattaacaatgaaaagggaagttataaattaagatgtcaatatcagacaactactcgtcaatccattatgatacgtttcattatgagtcactaggtacatgtgcatgatgtaattatcacttattaaacagattataattttcaactaaaaattcgatttggtttctaaataatatttacaaacaatacaaatcatcaatgacaaaaaaattgtttgctacaacgtcaaactattttaaatgagtagattctcgatagatcctctacaatctacatactttactttgaaataactctccactctccagatcagaacacaaattgtaatagattaatagctcaaaaatagatgagtacttctctttagaaatataaaaatcagactaacacgttgaaaattatatagtactatgttttattttgtaaaccggtcattaaaagttgtggagaagtgaatggtggtcagtgttcactgcatcttcaatattttttatacattctccggccaaaaaacagtgcacgttggtcccatctggctggtctgttaaaaagtctaacgggataattaaattcttacgggagatattactaaatcattcaacgatgctatcaaatcactttcaataaaaaaaacaaagtcaaatataaaatatgttttcaattaatagagccacataccgattttttttttccaaagaaggcattgatttttctaataattgtatttattttaaatattggaatctacaaaacattattttaggtcagttggtcaatgcaattggttagaaaatctgtaaccaatgaaaggaaaatagtgtcaaattatactagtgagtatgttcataagttactaaagtccactaagtattaataaagcgcactatgtgaaactactacaattattattggctatttttgtttgtactacttgttttgtttaatcatggttagttttttaaattttaaaaccaaactttaagttgattaataaataaataaaaacgtagatgagaagggtgttggctaatggctattggttactttccacttatgtatgtcctctcttcttctcttaaaaagcttaattgctttgctattttgatactagtacagtctattcttcaatttatcagcttcttctcttctctcatatcgcggtaattaaaggcgatatactgattgctttctggggagaagttgtcggttgtcttttgccattataattataatgtgaatttttgtaagccataattatttgcactatttatttatttagcccaaataagcacgtatgtatatatagatagactaatttccacgtatccaagacattgccgctaactattttttgttgggaaaatttgatttttgttatatgacgacgacagcgacaccatcaaatttgtttatttatttcggttctcttgttatcccaacgccgcttggattgatatttgtctactatcaaacttcattatacttttgagcgaattaaccaaaagatttgtaatgacacctttttatttcaaaacgtacggataatattttgtcatagaccaaactatttttttcataaaaattagtctatgtactacatatcaaacttgttggtaattcgttggggttggtttctagtcgtcttcccatctcgttgggactaaaacaacattcttttagccactttcactattatataatggaacgaaatgacaagcccgttaaagacccaatagcccaatattgaatcaaaccgcagatcccctttcttcctccaaaattcaggtcacaaacccaaacttctcacccgtatctaaaaagttctcgtggtgtatagtcctaaactagtacacgacagaatcaaacctgtttgaagtatttagcacggatccaaacacgagagacatcccaaggaatctgattctccaatgtttgtctagacataagatgcgttgatggtaaagaagaaacgatacgcacatcagattcacagggttttacttctttttttggtaagattggatttttctctcacccccatttcttattccatgcttcttagatcgttaattgaatctgcatcccgcagtgatcattctttaatttacgaatttgtttttgttgtcttgttgtcgatttttgtcaattttattgtgtaatttaccaagtgtaaattgtgattgaatcgattgggagggcattgcgaggtaaatccatattgtgattttttgtttagtgtctaactagctgtatcgtactccgcataaatcacaggatttttttggtgagaatttggtaacaagaggaaattgttccattgatgacgaagctcctagtgttccattgagaatttttggtttccgattggattattaaagaatagaagaaaaatgttgaaatctggggtttgattttggtatttcaggagacacaagatctaggatttcctttatttagagacgagggattctatg

SEQ ID NO: 30994 - DNA, 3000 bp, Unknown; identical to SEQ ID NO: 10701
  misc_feature (1)..( 3000): 2750-1469P.txt file - cDNA_ID_3037775; gDNA_ID_2213669; Annot_ID_182227

SEQ ID NO: 30995 - DNA, 3003 bp, Unknown
  misc_feature (1)..( 3003): 2750-1469P.txt file - cDNA_ID_3037779; gDNA_ID_2213669; Annot_ID_132758
ctacctataatgacacgttttcctgtaactggcggtttttatatctccacgaaagcaagtgaacagtttggtgattagcttctacttcgtgtggtgtgggctcatttatagttatagccacttagcatcttctaaactgtcattagtggatgtaattgcatgtgtacggatatcttttcagttttaatttctattagcctggtatcaaaagaagaagaagaagaagaaatcactgtcaactaaaaaagaagaaagaagaagaagaaatcagccctgatctttaagctcccacgtcacgactgatgggttcgattaaggagaaaaatatataatttgattatattatccactagcattcacaaaacgagaaaaatatatattctaaataccattatttactttctaaatagagttgaaaatatcattttaatcgcattcatgttacctttgcttataatcgttggaaaatataataaactttattcccatatatatttgtttgtgtttgtcaacttcagtccaataatttaacattagaccaaaaaaaaaaaacttcagtccaatatattcttcgggagagatcttcaatagtgttccttttgtctacactttgttgtcgctttactcctttaaattatcattccaactaactttttcttggtaaaaaagtttcaccattatatatgtacatcaactttcactgtcgtcggtcgaaaacaaatcatggtctaacaatatattcctaattatctatcatcgtacactacacactaattaggtacaatacttcttcattagtttaatctttcaccgaatatcagaagaaatcccaactaatatgcgtgtggatcttgtaaacaatgaaaagaatgttcccaccaaaaaaacaatgtgaacagaactaaatgttgaaacttctacttcaaaattgaaataaaatctaaaataaaatatataatgaacatcaatcattgtataaaagcgattaaaagtttcatgatttgggataaaaaaagttagagatagataactatcccttttttagtgaacaagtataaagtttttactgaaaagtttttcagtgtccggtattaatttcatattagtcatattatttacatgcaatatgaaatgagatgtcaaaaaagtttagacaaaggaaaagagcagaacattaattacagcagcgtagggtcacatgcgtaagtcacgtgactctgtttttcgttggggaacatagaatcataaatgattttttcgatggttcacgacactattcttagaccaataagggcaataagagttaaaccaggggctaataggtcctactggcgacacatagacgaatttaccggtttcgattacaaacccgtgaccggtaattccggtcagccattgttttctaagtttgttttctttcgttataatgcgcatggaatgaaacagtcgtataattcatttaactcgactcgtaacaaaatatgtgagataataataagaagtacataaatttggtagctagtatttaatgttaattgatactttttgtctcaaataatcgaaactgcttttaggctctagaaaactgatattgatgtcttggacatttacttgggtataataaattgcgataacataatagagcggtccgagacttagagaattacgaaaccagtaaattctatacagattgtttatccaattaagcccaaaccaatccaggtttcctacagtgggtcaagaatacatcatggcagatttgatacatcataatgccattatggtatcaagcccaaaataagcccagttattttttctttcttttgttgtcattccataaaaatctacataacggaatccagaatttgattaagatcttattccgttatgttccagataattagagtgtcatatctctataatgaacttcatattaaatttctttgtcttaacatgcattagaaaaaagggtttaaaactctattaagaactaaatatatcaataacatttacagtataattttaaaatttagaatgacaaaagaaacattatagaattttaagaaatgatttgggaatagacaaatcaataaacctcagactattatgagatttgtttttgtctggaaggaaattgcttaatcaggtaataaactcaacaaagcaccttctaaacaaggagtcatccacgaccgtccgatcagattagtacatagaaacccttaagatccaacggttaaagatttaagacagaaggacgaaatctgtaatcatgagtttagtaaaaaactaataaatcaatcagtcttctccctatttactgcaactctgcgaaagctgcaaaaataaaatcagccgattcctatttttttatttgtcttcctgtgaagaatgaaaaagaagaagagtacaacaagtactaagaagacgaagaaggtttcaacaatagcttattcgcagcttttccaattctggtaaaaaggcttcattaccattttatcgtctactcttcttcttcttcctgttttcgatcttctgtctttttcggtaatttccgaatttgtgtttcaagaccgtatcatcttatgctacgattgaatttgttggaattccagttttgggttcttcaccaagctcagaatttcaaactgtcagaattgtttgaaagagtcaaacttgaactgggattttttttgacttagggttcgtcagatgttggatttgttaatccttgcagagtcgtttaaggggtttacaaaatgctttatttataatcctaaaagctatctactttctgatttttttcccccagttcttggtttgaattctaaagctgtttcctgtgctataacaggtgagtgtttcgcactacattgctcttgctctactggagattgcggttgtgtgttacgagagctagagttgaatttgctttggtcaacacaatggggacttgtggttgctgacttttgtgattttcagttttctacttggatttagatg

SEQ ID NO: 30996 - DNA, 3003 bp, Unknown
  misc_feature (1)..( 3003): 2750-1469P.txt file - cDNA_ID_3037779; gDNA_ID_2213669; Annot_ID_182226
ttattgataatagatgtttccgccatgtaatcaataacaataagatatatacagagtgctagagaaaaatgttacaagaaagaaatccgcttttatattacgatctctaggataatttaatgtcaatctcaagtattcaattccatttttagttcttcgtttattgatattcctgcatgtaatcaataacagtaaggtctacgagtgctagagaaaaatgttacaagacctagcattcttacaaaaaaaaaaatccgcttttatattacgatctctaggatcatttaatgcacaaattcgaatgcataaaaatgaaacgtgtaatttttttaaaaaaaacatattaaaactttgagcatcccgtcttgtcgagtgtcgatgtcgtcatgcccggatcgtggtggtcggcactgatgcttaaaagtggtttgtaattattgaattaaaaaaaaaaaaagtaaaatcatttaaacaatagtagtacattacatacaaaatccacggccaaaaaaggtttgaaattacatatatagcatattgcaattcaaaaatgcaattgtatacatctctacagtatttaatgcatttgtgatcataatcttatatagcctttcgaagatccgatgcgtttacgttgtgggaagcagaatagagacctataatccaatagcatctccggttttcattaacctcatacgtttgcaagattccacaaacatcctacacaaattaaatatcatcaatcccaagaaaatttagtttccttcacagcagaataatacagtaattctagttttgatatgaatgtaagtaacaaaatagtacagaaattctagttttgaataaaaaaggaaaagtacgtaaaagcaacacaaagggtaattccgagaactcacatccacggcacatctccgactaacatcaagtcaccgtccttatcctcgtaagtagcaacaaactctcccttcctctccaactctgtcactctacctaccaccatccaaaaccccaagtgtaagtaaatttaccataatatccttcacttcgtcagtccatccaaacacatcaaaatctttattttttcctacttatctcgatcacttacatattgttattatcccctgaaacatgttttctagagcggtgaaaagctgtccatagcaatcgtacatcccaagatcaacctttctgagataggccgcaccatccaacgccactttcacgtatttccgcctcactgttttcctcgctgtcgctaccggcggccagcccaccaactggtcactaaaaccacaataaattaagaagatcaatcaaacatgcatatgacctatatgaacgataaatgaaattaatataatatatatatgccgtacttagtgaccatgcttgagatataattgttctcgtgtgcttccccgagttttaaatcaacggtctcgaggaatctacgtttgttcccgaacttttttggaccttccgatgcatttgtcggagtgccaggcaaagctagggtcagctcagttcctccaagatcaccggaatccggccaaaccctaacgtattcctccggtgacattaatatcttaatctatttatgaaagttagttaacaacaaaagtgcggaaagtgatgagacaatgtggcactaacttttggcttgagtgtgtgagactctcgaggtttccaactttgtatttatagtcgatctatacttgtcagctaaaaaactagtgaaccctacctataatgacacgttttcctgtaactggcggtttttatatctccacgaaagcaagtgaacagtttggtgattagcttctacttcgtgtggtgtgggctcatttatagttatagccacttagcatcttctaaactgtcattagtggatgtaattgcatgtgtacggatatcttttcagttttaatttctattagcctggtatcaaaagaagaagaagaagaagaaatcactgtcaactaaaaaagaagaaagaagaagaagaaatcagccctgatctttaagctcccacgtcacgactgatgggttcgattaaggagaaaaatatataatttgattatattatccactagcattcacaaaacgagaaaaatatatattctaaataccattatttactttctaaatagagttgaaaatatcattttaatcgcattcatgttacctttgcttataatcgttggaaaatataataaactttattcccatatatatttgtttgtgtttgtcaacttcagtccaataatttaacattagaccaaaaaaaaaaaacttcagtccaatatattcttcgggagagatcttcaatagtgttccttttgtctacactttgttgtcgctttactcctttaaattatcattccaactaactttttcttggtaaaaaagtttcaccattatatatgtacatcaactttcactgtcgtcggtcgaaaacaaatcatggtctaacaatatattcctaattatctatcatcgtacactacacactaattaggtacaatacttcttcattagtttaatctttcaccgaatatcagaagaaatcccaactaatatgcgtgtggatcttgtaaacaatgaaaagaatgttcccaccaaaaaaacaatgtgaacagaactaaatgttgaaacttctacttcaaaattgaaataaaatctaaaataaaatatataatgaacatcaatcattgtataaaagcgattaaaagtttcatgatttgggataaaaaaagttagagatagataactatcccttttttagtgaacaagtataaagtttttactgaaaagtttttcagtgtccggtattaatttcatattagtcatattatttacatgcaatatgaaatgagatgtcaaaaaagtttagacaaaggaaaagagcagaacattaattacagcagcgtagggtcacatgcgtaagtcacgtgactctgtttttcgttggggaacatagaatcataaatgattttttcgatg

SEQ ID NO: 30997 - DNA, 3003 bp, Unknown
  misc_feature (1)..( 3003): 2750-1469P.txt file - cDNA_ID_3037797; gDNA_ID_2213669; Annot_ID_132745
gctccatctgtcagaattcttacctttccaaaagaatagtacacttccttcaagagttctcagctggttgctaaaggcagagccaatggatactcgacttcccgttgtaattatgcaggaatgcttcacaatttacataaggaggcaggtagggtgatgtaatcttcaacattgctgcttgtgcctatggcatgcatactcttgttaccttctgaaagttgtgtatgttttaggtggactacattggcaaagtgattttgtcaaaactaatgaatgactggaaattgatgcacgaacttgctgtattgcgcgccatttacttgctaggttcaggtgcgttttatgtgctcaactgttttggcaatatggttgtatctgaaatcttaataaccccttaaaactttcaggggacctgctgcagcattttctgactgtcattttcgataggctgggcaagggagagtcatcaaatgatgattttgagttgaacataatacttcaggtaaccaggtttggtgtatttttaagagacactgctctcatctttatagttgttatcacttctaaaatgattccgcttgttaattgtttgcttatgtatccgtgttctgttgccgtatatgtgttcatacaccaaacttatttctaaagtgtaatggtcttctacaggaatcaattagaaattcagctgatgccatgctgttaagcagtcctgattcattggtggtatctatttccagagaagacagagacaaagatgataagggtgacataatacccctttcttcaactcgtaaaagccgcgttaacagctttggaatagattgtctcgagtctctcaaattcacatacaaggtctagagaaacaacttagtcttccatccaatccgtactggtatatctcataggccacatctatgtgtatttgaagagctgaactgttttcttttttaaggtgccatggccacttgagcttattgccaatagtgaggccattaagaagtataaccaggtaaccctttctcatccagctatttttgtggtaaacagtttgttgttcctctatgtggtaattatttaattgaaaacaggtgatgggatttttgttgaaggtcaagcgagcaaaatatgtgcttgataaagcacgaaggtggatgtggaaggtctttgatatctctcaaactcatttctttcttcttagactgtatcccgtgacttccaaatccagtttgaaagagcctaatcagtcttttgatctatacatataaatataaagggaatcataagaatgtggttcagtttgataaacttgatgactttggtgtttgtgtatgatagggtaaaggctctgcaacaaaaatccgcaagcaccactggttactagaacaaaagctcctcaactttgtggatgcttttcatcaatacgtaatggacagggtattgtccaatgctaaatgattggttataattacagtatcatttttcgttggagtaatataagtttgtgctagagttgtggcaaaatcgaaagctgatcacatggcttgagtaagatgaaaagcttgccatgcttaactgtattttgtaagcaggtatatcacactgcgtggcgtgaactgtgtgaagcgatggtaaaagcagggtctctggatgaggtcatatatgtacatgaaacctacttgttatcgattcagcggcaatgctttgtggttcaagaaaagctggtaatggaccatgaaggcattaagcgacctcttaaaatgcatagtatatatttgaagttgtaggcttctaaaaacctagtgtttggtggtttttgtatagtgggcaatcatcgcaagtcggatcaacatgattctcggtttagctctagaattctactcaatacaacagacactgagcagcggtggagcagtttcagccatcaaggctagatgcgaaatggaaatagaccgtatagagaaacaatttgaggactgtattgctttccttctcagagtaagtaaatcgaaaactgtgtacttgttgtattgtgaagctatatataattgattaatgcttaatgggggatggaacttgcaggtattatcttcgaagctgaatgtgggacacttccctcatttggctgatttggtgaccagaatcaattacaattatcactacatgtcagatactggaagcttgatgactacttctggagcagagaccaactcatccagaccttggactgccaaatctgatgtatgaatggaccgggaaattatcgcaatgttggattgtcgcaacactatcacacgtaattgttcaagcctcatgcttttcttgtgtctggtatctaatttcctgattatgtattttctgtttataaaagttcactgttttgaattagacattgtacaaaactgctatcaaggtttaaaaaaaaaaaaacattgttaacattcttaacaagaaatcatcaaagtttaaaatctaatcgtgaccctactatgcatagtacatatattaagcattaaccaatacgacaaaagaaaaaaaaaagcattaaccaaaaacaaaaagacgataattaaggttataggttatgagtttattacgaaaagcccatttatggatgcaattaagcaaaccttgttggaggacaaaatggtcaaaagaaagaaaacgtaaaaccctaaaacatttctttaacactcgacttgtctcataaaccctttgtgtttgtagtctctctactctctagatcccatcccatttcttgatcagcctcgcgcattgtgtgcttacacgtaatcctctagcttctttcctcggtattccttgtctaattcgaacttctctctttttttttctgggtccgatcgtttcagtgaaaggcgtaacctttccttcgaatctgatagcattgcaaaatgataatgttagtctgatttttgttgggtgtgtgtcttttgattgaaagagcaggtaatttccagagagattttcaacagaggaagcatg

SEQ ID NO: 30998 - DNA, 2070 bp, Unknown; identical to SEQ ID NO: 10715
  misc_feature (1)..( 2070): 2750-1469P.txt file - cDNA_ID_3037797; gDNA_ID_2213669; Annot_ID_182211

SEQ ID NO: 30999 - DNA, 3003 bp, Unknown
  misc_feature (1)..( 3003): 2750-1469P.txt file - cDNA_ID_3037840; gDNA_ID_2213671; Annot_ID_132799
tcattgcaagaaagttaatatatagttcatatatacacatatgttacgattgatatatgcatttgatatatatatatatatataaacaacctctacggacttgctgatgtaattatctccgagaagaattctctcgccgaaaagagtaacagcctctttaacagaacggaaaggagctccggtttcgatctcggcccgaaccatgatcaagagatgtttgttgctttagttatatgagttggtccatgtcatgacgaaccctcagctttttataaagaaagaacacatatgtttcatgaaagattgcaactgttggttgttgtcacttaaacggatggtgactagattactgactaagatgaaactaaccacgttatgatgattaaatcaatttcaacatatacattgcttagatttttttgctattttttaaacaaacttcattttcatataaataaaacatttataaattggtcttacaaaactaatagtataaatcataatcaagaagatctagttccatagttgatacattactatgtgatggttccaccatattatataatcatttattttaaaatgtaacacattgccgacggaaaattccactaaatgacaaaaatgatgagaagttgttaagtttttcgtggtgcttgttttttagtattgcaaaattagaatttaggaacaagatatagttgaaaatgtcttggcgtttacttcacactaaagaacaagtttgggtaaatatagaacaagtagaaaggttcgttggaacgtccttttgttttctcatgtgttctgttagttttaccaccaaattttattagacaacgacctctctcctatttaaatgggcctttttaggcctgaaaaacacagatcactatctcgtgaccaatattacaaagcaaagcccaataaagattcttattcttcttgagtagcaaacctaaaatgctttcctctcggagttggaatccctttcaaatgcaacacttctttagcctctacgatctcatcgtcttcactgttgtaaagaaatctgttatgtttccctgcaaattcagcttgattcgtctctacattcatcttcttcattccttcacacaacccatcaacctcctcttcttcttcttcttcttcttcttcttcctcataaagctgacttgtcggtgaagtcaaacagtaaagaacgagttatgctcatactcttgtcttctttctcttcagatatctgagaggttctcaagtttccagcaacaatcggagatgcgatcttaatcttgacatcatcatctgaaaagtttggaaattggggagtatttgctggagttggagcgagaagtctcattggagaagtgaccagatggataaaaggacgagtctttattgaatggataagctctgttccttcttcaaccttgtgtaaaagggttttgacttgtcctctcaaaagggcttcaccagatccaggcgtgatcttgattctgctgctttttctcttaaccatgaaccctgaaggaggtgtctgcatcgttagacccacgatcggtgagtcgttggttatgtcgattagtgcagacctgtcttcttcttttctttggtcgatgctcgaatcctctgttttgtctgagccaaaaagcaaagaaaaggattaggttcagaaagatcgagtctatctatgttacttataaataactaattactctgcagatgctttaaggctaaagaaactacaagaacctaaaaaagaagatgggaaagacaaacatacttgatgatgaaaagggaactttgaagtcagaatcagagtcgttgattgcagagatagcctgtgatctagtgacccttttggctgatgatggagtctccatttgaatttcgagttcttgtaaacaacaacgaaaactgaactgaaagagaatttgggaaaaaacaaagtgtgaatgaagctcgtttaggtcgcagtcttataacgttttataactaaactagccgttgtggctcctctcttgcaaagtggaagatgagccgttgccgttaccgttccgttagtaaacccacgaattatttttcttccaaaactagccgttggatccgttctctcatggaaaaagtagacgtctttgttctgtatgggcctttgactaactaaatggcccagcccgttcataacattaatcatttaaaaaatcacattgatggtataacactaattttttttttcacaggtgtataaccaactaatataaatatgcacattcacttaaaattaactaatatcataaagagtattatggcgtctgttttattgtttatccataactacatcaatcaaatccaagttgatatactagttagaacctaatactttacaaatccgatcattaatttatcttgtctgcttaagattttttttttgtgaataaggtttaattatctcatcaatacgatttagtaaaaagtctgtgcaaaaattaatgacgattgggatttttgtaacgcaagcccgtaccagaacatgtctccgccacgtgatttctccacagaccacaagcatttttaagacgtggctttctatcaaccgttaaaaacgtaaatcatattaaccatgtgtctactacctacggtgtaaacgaaactgtataacgtccctatcatataatagtaatgtgatacgttggaatgtagccaaaaagcataaaaaataaatagataattaagtttataatgttttcctacaaaatattattataccgtatgtattttttattttattttctgaagttaaaaacagatgtagttagttgagtaaattgtgttctagaaagagaagagagagcagtagtaccgtggtaggtagctagcgacctcttcgttcgtcagtcatcacaagctttgaaagattttcagctaccactctctcctttatatattcattacacatctcttctttctatatctctcttaatttagtcttttgtcttcgtaattacaatg

SEQ ID NO: 31000 - DNA, 3003 bp, Unknown; identical to SEQ ID NO: 30999
  misc_feature (1)..( 3003): 2750-1469P.txt file - cDNA_ID_3037840; gDNA_ID_2213671; Annot_ID_182312

SEQ ID NO: 31001 - DNA, 3000 bp, Unknown; identical to SEQ ID NO: 10753
  misc_feature (1)..( 3000): 2750-1469P.txt file - cDNA_ID_3037848; gDNA_ID_2684236; Annot_ID_192400

SEQ ID NO: 31002 - DNA, 3000 bp, Unknown; identical to SEQ ID NO: 10753
  misc_feature (1)..( 3000): 2750-1469P.txt file - cDNA_ID_3037848; gDNA_ID_2213671; Annot_ID_182321

SEQ ID NO: 31003 - DNA, 3000 bp, Unknown; identical to SEQ ID NO: 10754
  misc_feature (1)..( 3000): 2750-1469P.txt file - cDNA_ID_3037856; gDNA_ID_2213671; Annot_ID_182319

SEQ ID NO: 31004 - DNA, 3003 bp, Unknown; identical to SEQ ID NO: 26853
  misc_feature (1)..( 3003): 2750-1469P.txt file - cDNA_ID_3037860; gDNA_ID_2213671; Annot_ID_182317

SEQ ID NO: 31005 - DNA, 3003 bp, Unknown; identical to SEQ ID NO: 26854
  misc_feature (1)..( 3003): 2750-1469P.txt file - cDNA_ID_3037864; gDNA_ID_2213671; Annot_ID_182315

SEQ ID NO: 31006 - DNA, 3003 bp, Unknown
  misc_feature (1)..( 3003): 2750-1469P.txt file - cDNA_ID_3037872; gDNA_ID_2213671; Annot_ID_182306
aaacatctccgaagatccggcttggtaatacttgacggtacggccactgtcgatggtgtgagatctgacggcttcaaggagacggagagcaccggttgcgactacatcggctgtgtaatcagggatctcgaaggagacagcgacgtgagattgagcagctaggttataaacttcgtcaggtttgatcacatcgatccaacgacggagagaggaagcgtcggtgagatcggcgtagtggagtttcatcagagctttgttgacattgtgtggatcgatgtagatatggttgattcgctgggtgttgaaattcgatgatcgacggatcagaccatgaacttcgtagccttttccgagaaggaactccgtcaggtatgatccgtcctggccggtgattccggtgatcagagctatcttcctcggttcaacgacggtggaatcagctttgggagcggtgatggattcggaatcggatctggatccgttgttctctgacgccattgttgggttttcggatctgggatttcagagacaaatgctaacgtcagctctgtgttgaaaatccgtgttgaattgggctgttagagttttagctgatttaaatagggtcagagaggttgaagacggaggggtattttagtcaatttcaggataagggtagtttggtaatctttgttggtctttaagttttttttaattgactattgattggatattttccttgtttatgtataacacgttaatgatttacttattttgtggtcaaactcatcaatggtgtactatagaattttcttagatcatttgcaaactttccacaaaaacaaacatattaagattttcaaatcattttatgaactgtccaaacaaaaatagtgaaaagtatttgaaagtttataagacaataattgcaaaaacaattagagtgaaaagtagtcaaacaaagcatttaatatacatttagtgtagtcaaaaattaattaaaaagttacaaatttgatacattaaaaatattagtaattttttgtagaagcaattactattttgtactcaactgaaaaaattgagagaattggattgaaaaaaaagacagaaatgaaactcaccatttactaaaaaaatgaagcaaatgataagagtataacttggctcaatgccgaaacatactaacatatatatttagtctcttgagttgtgttcgagtggtggacaatatgtaatctccacgatttgttttaggaatcttatgcttcaaatcacctttgttgttttccttttacaaatcttcaatcattttcatttatttttcttctttctgtcacaaataattgattggtttgtcaagatatgcttttatatattatttatctttgcctgttattctttcgacaaccaagcaaagtgatcatttgaccacaacaaaaaagcgttgagacttgagacaagtgaaaattataaaccatgcgttggaccatcttatgcatccggaacttaggtataccaacttagtcttaccaagaattatattcgatcagacactaattaaagaagttaattatttcatatgttcgacaagcatcaaaatgtggcccgtattactatccatcgaacgaatattctagcattagtggatttctccaagctaaactacaatctcaatctagaggatgcaacacggaaaccaaaactgaattgctcaacaaccatgattttcaacgttaattatggtgtttggtcacttgactcactttggctacaacttgtgttgaggttgataaacctttgttgtcatctcttataatattggactaatgaacttgaagacagaaagaaaactttagaccaccgtgataaagaggaaaaaacattcctagggtttttttatctatacaaaaaacccgatcaagtggctgatctttttactaaagcattgggtagttccagttttagagtatcttttctccaagttgggtgttttaaatttacacacaccaacttgaggggagtgttatcgagatagatgtgaatatgtcgagctagatagatatgaattttgtttagatgtgtttagtatctctaaagataaggtttagagaatattgatgtacacacataggtatatacatgtatataagggaaacgtatcccaagtaaataacacaactcaattaaaccaaagtctcttcttaagtttacaaaacttgacgaattgtggtgtaaaggcaaagaagattataaaggtcgttcgaagagatgggaatgtgatagttcttcaacttgttcaagtactaggaagagtctattcgggcaatggtgcaataggcaattgagaaaacaattgagggtgtgaaacaaagggttgcaatttggttatacatgctcaagcctcacggtgagcgcaatttgtttttggcaattatcttatttgttggctattctctgaaggaaagaacattaaaaaattgggcttacaaaggtttgaattcaacttagattgcaaagacttagtgatgggccttatggatgagattacttgggcgtccttgagaattgtggcccacgaagttcaagagatactgataggatacattcgacgtattccccatttcgttttacattttaagatgatgatgtgtgaaactagttaagaagggttcttcttagtcctaaaagagttattaaagtttttttaaaactctataaagtttcgggcttcttaataataaacacagaaatgataatggcacttaaaaaaaaaaatcataattctcttaagattttctgaccaattgtccaataatcattgtccaataatggtattatttgcttatttttttactacataatctaaagttaatcaatatcctttaatccaataataatgacaacaaaactgtgtcacttttctagtggggtataaaatatataataatatggctcttctcctaaagtactgcaaagagaagaagatctcgttgacgccccaaaaaataaccagaggtaatg

SEQ ID NO: 31007 - DNA, 3003 bp, Unknown; identical to SEQ ID NO: 26857
  misc_feature (1)..( 3003): 2750-1469P.txt file - cDNA_ID_3037880; gDNA_ID_2213671; Annot_ID_182304

SEQ ID NO: 31008 - DNA, 3003 bp, Unknown
  misc_feature (1)..( 3003): 2750-1469P.txt file - cDNA_ID_3037884; gDNA_ID_2213671; Annot_ID_182303
atttttttggctttggtgtgtagtttactgttgtaacaactgtcttttgcttttacttcaggggtccatcaactctggcaacgtttgtggctgtttatgcactttttggaccaacctttcctgggatttatgataaagaaagagggatttattctctgttctacccggtgagcaagaaatagacagatggtcacattgttttaccattaatgtttgaatttgttctatcaatgtttaatctttttaactattgcaggggctatccttcgagtttccaattccaaaccagtacacggactgctgccatgatggagaaggtttgttcttctccggactccagtgaaattttgtttatattttttgtcttgtccgatatctaacttctcagatttttttttctcctttacaaagcggcactaccgttagagtttccagatggcaccacaccagtaacatgccgggtctctatatatgacaactcaagtgacaaaaaagttggtgtcggaaaattgatggatagagcttctgttcctcctctacctcctggcagtctgtatatggaagaagttcatgtcaaggtttggcttatcttcatttacactcgttcctctttgtgtattttaatatctcgtagcctaacttaattagcagttaaccggttccttactcttcgcatgacttaatttaatatttatgcagcctggcaaggaactatactttactgttggaggccagcatatgccttttggtgcatcaccacaggtaaagtctgtaccttgtcttattttgcttcttctttgatctttggaactaatcatttcgtgcttcgagcaggatgtatggactgaattaggtcgaccttgtgggatccacccaaagcaggtgatctataccgtatctctaaacttgtttgtatatcacgatcagatgcttccattagcttctcttactatgttacctgcgttatctgttacagttcaatactcaactggacatttgtatttctgcttctgaattgtcctttgctttccaggtagatcaaatggttattcattctgcgtcagatcctcgaccaaaaacaactatctgtggtgattacttttacaactattttactcgtggtttggacatcctgtttgatggcgaggtaggaaactcatcaactagagttatatgttccattcgtacgttttctttattcacaactctaccttttctgcagactcacaaagttaaaaagtttgttcttcacaccaactatccgggtcatgctgatttcaactcatacataaagtgcaactttgtgatttcgggtacgtaatacttatgaagcagctcatgtcagtcaatatattcaatactcgatatatgttgtctatttttccaacaaacctacgctttcatgtcacttttcagctggagcggatgcggcagaagcaaacagaagtggaaacaagatcactccaagcactaactgggatcaggtcaaggtaaatcttcagaccaatgtgataaaagcagaacagaaaattgaatgaaaaactagtctatgttagggcttgaccaattgttcgtgagagtttttactgacgtaaaatctctttaccatcccatcattgatggctctaattgcgtaatgggaagaaacttgggatgaagcattaggaaattgatctgaatagttaaatctgggatcagaacagattgaatgagtcatttctcatggaaatgtctttatgcttaggaaatactcggggaatgtgggccagcagctattcagacgcaaggctcaacgagcaacccttttggatctacatatgtgtatggctatcagaatgttgcttttgaggtaatgcatttttgtaataaccctagattcagtaactttgatccttgttatatacttgcagactgttaagtgaaactttatgttgggttaaaatatttgcaggtgatgaagaacggtcatatagccactataaccttgttccagtcatgatgcgtatccaccgctgaggtatatgcccgttactaattcttcgtttatgttgaatttggtcgtaatgaatattcactgtttggttttgtagaaaaaatggctcagattaatgtcttgtgttatatgctacttaacaaagcttcttacatcaatcaatgtctttgtaggggctcaagatgctatcttcaaccagactctgtaaatctaacgtcacaagaagctacgaaaactatcgatgataccaaaaacgacaaatgttgtacagttatacatttgtctagttactatcacccgggttataataacagttattctggttataattcttttcagactttattatgactaattatatatcatttatctgttaaaagttcataaaatagcctcatcatttgagttttttgcggtatcgataaattttaaggttttaaaaaaagaaattgaaaaaacaaaaaaaagctccgtcgccgggactcgaacccgggtctctcgggtgagagccgagtatcctaaccagctagactacgacggaatgttgcctactgatgacttaaattttatatagcacactactggtatagtcgagaaggttgtgcggtatctcttctatccgttgcgtagcaaggttttgtctttcgtgtatggttccgggaaggaaaaggggaagtggattgttttcatcggcgataagtctcttctcctctggtacttcttctttcgattctcttctcttttgtttcgggttccacttagatactctgtagctgctttcatttcagaattggcttttggttcaatccattggtagtgcgagaacttgaattccgaaatagttccgatttctcttcagattttggatgttatcttgctaattgagtttagaatccatagtaatagtgcgattattgatttagcggttgtttagggtttaagcctgtttttcatttgattttagggattgaggttggtggtgtgaggtaaagcttcggtagttagagatg

SEQ ID NO: 31009 - DNA, 3003 bp, Unknown; identical to SEQ ID NO: 26859
  misc_feature (1)..( 3003): 2750-1469P.txt file - cDNA_ID_3037888; gDNA_ID_2213671; Annot_ID_182302

SEQ ID NO: 31010 - DNA, 3000 bp, Unknown; identical to SEQ ID NO: 10738
  misc_feature (1)..( 3000): 2750-1469P.txt file - cDNA_ID_3037892; gDNA_ID_2213671; Annot_ID_182301

SEQ ID NO: 31011 - DNA, 3000 bp, Unknown; identical to SEQ ID NO: 10737
  misc_feature (1)..( 3000): 2750-1469P.txt file - cDNA_ID_3037896; gDNA_ID_2213671; Annot_ID_182298

SEQ ID NO: 31012 - DNA, 3003 bp, Unknown; identical to SEQ ID NO: 26861
  misc_feature (1)..( 3003): 2750-1469P.txt file - cDNA_ID_3037899; gDNA_ID_2213671; Annot_ID_182295

SEQ ID NO: 31013 - DNA, 3003 bp, Unknown; identical to SEQ ID NO: 26862
  misc_feature (1)..( 3003): 2750-1469P.txt file - cDNA_ID_3037903; gDNA_ID_2213671; Annot_ID_182294

SEQ ID NO: 31014 - DNA, 3000 bp, Unknown; identical to SEQ ID NO: 10769
  misc_feature (1)..( 3000): 2750-1469P.txt file - cDNA_ID_3037925; gDNA_ID_2213672; Annot_ID_182380

SEQ ID NO: 31015 - DNA, 3000 bp, Unknown; identical to SEQ ID NO: 10774
  misc_feature (1)..( 3000): 2750-1469P.txt file - cDNA_ID_3037951; gDNA_ID_2213672; Annot_ID_182364

SEQ ID NO: 31016 - DNA, 3003 bp, Unknown; identical to SEQ ID NO: 26872
  misc_feature (1)..( 3003): 2750-1469P.txt file - cDNA_ID_3037955; gDNA_ID_2213672; Annot_ID_182363

SEQ ID NO: 31017 - DNA, 3000 bp, Unknown; identical to SEQ ID NO: 10767
  misc_feature (1)..( 3000): 2750-1469P.txt file - cDNA_ID_3037960; gDNA_ID_2213672; Annot_ID_182356

SEQ ID NO: 31018 - DNA, 3000 bp, Unknown; identical to SEQ ID NO: 10784
  misc_feature (1)..( 3000): 2750-1469P.txt file - cDNA_ID_3037967; gDNA_ID_2213672; Annot_ID_182350

SEQ ID NO: 31019 - DNA, 3000 bp, Unknown; identical to SEQ ID NO: 10764
  misc_feature (1)..( 3000): 2750-1469P.txt file - cDNA_ID_3037971; gDNA_ID_2213672; Annot_ID_182348

SEQ ID NO: 31020 - DNA, 3003 bp, Unknown
  misc_feature (1)..( 3003): 2750-1469P.txt file - cDNA_ID_3037975; gDNA_ID_2213672; Annot_ID_182345
tacttgaacttttatcggaacatctcttactatctcattgacaaaaggttcagtagtctcgacctgagcagtggcaagattggcgttatgtaaagtatctctttcttgatgatttgaatgattgaggaagctttgttgacccgtaaacttatccgtttgttggattctcatgatatcatctggacgagaagcatagaaagctgagctcacatatggcacatacattgtagaaccatcatttccctcccgcataatcggatcagaatgcatatgaggaaaagatgtctggcacatatgacaatcatttaccctttgaaaactttcagccatagttacttgttgatagaaacttccatcggggagaacaacatggttagatggtggaacttgagacccgccataaccatcaaatggtataccaggagaaatcgtaccttgatatgcagtgtttcttggctctgtaggaagcggtactaacttttgagcagcatgatagttccccaacagattttcttgggtttgcattaccgggttaatcaaaactggtgtggaactaatctgagaattcaagggagccattgacatgtgagcagcaggaaggaactggtgggatgagacacttaaaggactatcttgaaaaggttgttgggagaacaaagaagtactacttggcaaaagctggataggtgaatgaacaatatctggttgtcttaaagcttcttggcgagattcaacataggccggtggatgatgttcagatggtgtagtatacccctgttgttgctgctgcatcttaccaactattggtttctctgaaacagtctcaagctgaaaagaatgaggcggatcggcgtggacagtcattggcacaacataagcagaagagcgtggatcaggaggaacaagtcttgatacattactatgataagtctgaggtgaaaaattactcgaggtccaagtagttgcgacaaaatcactctgaccaacgcccaagctatcaacaacatccacgccactaaaatcagaattcggattagaactaccactagctacactttccttactcacaacaacaccattcacagcctctacatatctctgcccaatatcaactccatcaccatactccaatattccgaaagaatcatccacctcagacgaagaagcatcaaacaaaaaaactctcaacttccctgacccatcagaagatctctctaccaacttctcaaactcctccatcatattatcaatatcttcactagatgaaacagaaaccaaagcatcaagatcctcatcaggaagctgatacttaacaacaacagggtgaccataaacctgaatcatcttttgctcaaattcatcaaatctcacattctttttaacactaacgatccttgtttgaccaccaacgtaacgtaacatgccatcacttggtctagggattatctttccattgtagctacataaaaacttcaccttttccaattcttcatcatccatatcacttcttttattgcctaaatttggattgtttctattcgtagcatcaatacttacctgctcactcccaaacccagaaataattccatcagagacacgcttattactcaaatcagagctataatctaacccagaagctgaaagattggccggattagaaacaagattcgaacttgggctactgggttcatgtgccattgtttggagcagggagagggatagggtttatgattactcacctggtcagtatcgtggtcgtcgtattcgaggaagaaacgaagaatcctattttgtagagagaagaagaaaggagaggcaaagcgagtcgttggaactgatacaacgacgacgtttcattgggagtatcaaaacctcaatttggattttctctgtagtctttttagaatttttctaaaagggaaacacgtgagagatgggaagaggcacgtggtcgagcctcatgcaaaagaatggttgcgtttgttttccaaactgcgagagaatcgtgtgtgtaaatgctcccagttccaacactcgacatgttttttttgttttaggttattactgattattcttgaacttttagcaaaataatgaaacaattttgacttttataacacacaaaaaaagcaatacaatttcaaataataaatcgattaagagataaaaattgtgataatttggatattttaattagtttgtgcaatattcttttctcgttgatctctataaattagagaggcaaatgcgactgctaggagtagaaccttaccattggactacaaacgcttttgtgtttaagttgactattaaatttagatatctgattgtttaggatagtttaaaacgctaccgttttggaatctttatacgctaccgtgttattcttctttgaccaaaattctggagaatttgtcttcccttcgtatttctggcaacttttttaatactaaaattctctctaaagccgtcaaagaccaaaaaaaaaaaaaaaatacgaactcgaaatctctctcgtcttgttgttgcttaccattgaagctatcaatttctccgtttgatttctctcttctcaaaacctatttcgacggattattccgattcctgtttccccgaccttcacgcttcgtacttttgttttttgaaaaattcgtgtttcaggtacgttctcgatttctatttcgtttttttctgattcatcaatgaaacaaaatcgtttcttaatatacttgttgttctttgattcgattgatttttgttaggaagagcgcatgtgtagagttggtggtgtaattcagaaaactttccggagattttttggtgatgtgttgttcgtaggtaaattttgaaattttggatttaatggttgaggaagatagatggtgtttcttcaatggatctgtgaagacgagattgttggagattgatacttatcttattcgtctttatggctttgcttgattaagaaattgtgtgattgttttggggaggggtttaaacatg

SEQ ID NO: 31021 - DNA, 3000 bp, Unknown; identical to SEQ ID NO: 10793
  misc_feature (1)..( 3000): 2750-1469P.txt file - cDNA_ID_3037991; gDNA_ID_2214449; Annot_ID_182400

SEQ ID NO: 31022 - DNA, 3003 bp, Unknown
  misc_feature (1)..( 3003): 2750-1469P.txt file - cDNA_ID_3038020; gDNA_ID_2214449; Annot_ID_182404
ttatatgtctacttgtttatatgtttacttgttgttaatattataaactcctggaattttaaaattactatgacaaatagttacaatttaaatacataactaaaaataacttcaaatacaacttttaggttttacaacaattatcaaaagaacattttttggttcataactctctctttagctttagatatttaggataacgacgtctttttacgtatgaaataaattgttgtatggagaataacttcgacgactttcttattttggtacccgtaaatttactattgtttttcgtttatcttcactgcattggttagtctatatagaagtatattcataagcttatctacattttcttttttaatttagaacgagtaacgcatgcatacgtgttttggggaaaagtcgttttggtcttttgatttgaccatttactgtgtatttttgcggtaaattaatattatttaattactttgactaacattaattactaaaatgtgttctattgatcacaagaacaacgagatgtagtattttccagtggtgaagacgccggagataatgtttatccggtgaaaatgaaggtgtttattaacgaggtgcctgtcaaaattgtgaccgtatatttatttttctgaatttgaacttttagtatatatccttatttttaaaagaaatttgagtttgtttacgtttttttaatctaggatctaatttaatttcttgttgataaaaaaaactgaattcatttaaattatattaagggaccaattggttacaattatggttttggttgtagatattctagatgtagaaatattgactgtaaaagttatgaaagttaatttagatatttataagagttttattcgcgatatagttgtatctattatactattaaaaatctagacttctttattggtgaataatatgcattatgtgatatttaaaatcaagttatggtataatgacagatatcgaacaaattactaaactacacgttttgtaaaaattaaatttttaataaactttaaatagtgcaaaaaatatatactaattattttataaataaatattcaaattacttgtttagattttgagttggcaacaattactattatctgatttttatgtcataactcaaaagtaacaatgattattttcattaaaatgctatagatttctctctttattttggaacattaaactcattaataaaaacgggaaattctgtcaaatggccaatacataatatgtcatgtaataacaattggatgacttgtgtttaatttgaaagtaggtaaaacaactttggtaaaacgatatactgtatggattaaaatagagaatttaactattcgtttctataatacaatataaatcttgtaatacgatatgagtgtgttcttgttaggtttagactcactaaatcaagctcaaggtagattgctggccttaactggagaagcaagaaaccgcataagaaggcttacttgagacacacgaaaccatctaatgcttttgtgtgtttgatcttgtgacggaaacaggcggagtttcttgagaagatacctagtagaagcacattcgcacacaagtgaaaggcattgtattctcatctgtccacatggaaaccataaggatactacaaaatcaagaactttagcgaccagaaacgccgtggacaagcttatctacgagtggagaggttttaagcacaccattgactggaaacaaacggtaggctctttagaaatatttatctcccatgagacactatgagcttcaattcacttccccactccactctcctgactatgttattgcatccacaagattgagcttggattctggtactccgttttcgaaaataaagtttgttgagaaaagcaaaaccgattcaacaaaaacatatacagagcaagatatataaattactgagcagccctttttaaaaaaaagtttcatagacaaacaaaaacttatcatcattatcaatttatcatcatcatcatcatcaattcatcataatcatttgttggctttgagccattccagaatccgtttttcagattcactgagctctgcttctgtctttccctttatagatccttcaacaaactcaaagtagtctttataattcctcttgtaaaaactgtccaatctctgtttcattttcccaatatgaacgaaaaaaagatcataagaaaatttcctacaaaagacataaactatgtgcgttatggtatataaatgtcattctctttacctccttatcattcttggctttgttttcctcagtcttcttcaaatactctgaaacaattcttccccaaagaacgacatagtttaggcaaaagaaacattctaaatgtaaagaagaaaaacacaactaagaatttctaattactttggagaagctggtcgctgctggtcaaagcagcggcgatgaaagacgtggaggagaagagaatgtttctgcgtcctaaatcagcgggtggagcagttaaagaatggcgtttggtatcgtttctgcgtacagcttgaacattggaagaagcatatttgttaacagttactgttaaagccatgagaatgctttggcttatggagctcatctctctcttgaccagaagataagattcttgttttatgtctcttatctacattacagagaagaaacaaacatctttttatttattaacaaagagtccctaactatgtaatttacaagaacaaaccctcaaatctattaaaaatagattccaaacccagatagaaatttgtagagacaaaaccggtttaatagacaaatattctcaaagcgattctggttcggtcgggattttgactgtactcagtacttacatcttcttcatctgacgatagcaaaaatgacaagcaatccctaatttcgcctcaaaaaatcccaaaaagcttcgttcttttttagtcatcatcatcttcttcttttcttcttcttcggttgctaaatcgaagatg

SEQ ID NO: 31023 - DNA, 3000 bp, Unknown; identical to SEQ ID NO: 10797
  misc_feature (1)..( 3000): 2750-1469P.txt file - cDNA_ID_3038027; gDNA_ID_2214449; Annot_ID_182402

SEQ ID NO: 31024 - DNA, 3003 bp, Unknown
  misc_feature (1)..( 3003): 2750-1469P.txt file - cDNA_ID_3038031; gDNA_ID_2214449; Annot_ID_182401
gatgaaaatattatcagaaacaaacgaactagaacaaatggctaccgccacaagcaagagatagaaatatggtttttgaaaacacaagtacgactcgtaagagtttcgagcctattcacacaaacacgagataatagaaatcccacataaaaccgacaaccttcttagtactcctctccttcatcatcctcatcgtcaccaccttcagcaccaacctcttcgtaatccttctccaatgctgcaagatcctcacgagcctctgaaaattctccttcttccataccctcacccacataccagtgaacgaaagcacgttttgcgtacataagatcaaacttgtgatcaatacgggagaacacctcagcaacactggtggagtttgagatcatacacacagctctctggactttagcaagatcacctcctggaacaacagttggtggctggtagttgattccacacttgaatccagtaggacaccagtccacaaactgaatagtacgcttggtcttgatggtgccaacagctgcgttcacatccttggggacgacatcaccacggtacatcaaacagcaagccatgtactttccgtgacgagggtcacactttgccatcatggatgctggctcaaaagcactgtttgtgatctcagcaaccgagagctgctcatggaaggccttctctgcggagatgactggggcataggaggaaagcatgaagtggattcttgggtatgggaccaagttggtttggaactcagtcacatcaacattcaaggcaccatcgaacctcagagaagcagtcaaggatgagataacctgaaaccatcaagagagagttaaacataagaaacgaaacagcaaaaagactgactgatgtaaatgattgaagctggctctatacctgagagacgagacggttgaggttggtgtaggtgggtctctcaatgcttagggaacgtctgcagatgtcatagatagcttcattgtcgaggaggatagagacatcagtgtgttccaagagtgagtgagtggagaggacactgttgtaaggctcaacaacagaggtggagacctgtggagatgggtaaactgtgaaacccaacttggactttttcccgtagtcaacagaaagtctctcaaggaggagagatccaagaccagatccagtccctccaccaacagcgttgaagacgaggaatccttggagaccagtacagttatcagcgagctttctgatacggtccaagcacagatcaacaatctctttcccaactgaaataagatttcaaaagtaaatcagtgaatgaacagtaaattcaacaagatatggttgatgatgaagaaacaagggaaggagtaacttactggtgtaatgcccacgggcgaaattgttagctgcgtcttctttaccgctgatgagttgctcagggtggaaaagctgacggtaagtaccagtcctgacctcatcgatcacagttggctcaagatcaacaaagacagcacgtgggacgtgcttccctgcaccggtctcactgaagaaggtgttgaaagcatcgtcacctccgccaacagtcttgtcactcggcatctggccatcaggctgtaacattccacatccaagacaacacatcaatacaaagagacatataaaacgaaaagatctacacatatagaagcaacgatgaaaagagaaaatcacaacgagatgcttcaactatatcgcaaatatcaatcgccatctctttaagcaaataaagcaaagttttccttcacccaatattataaaacaaatacggatatggcatcagcaaaagcaatctgacatgaaatccaattcaaacacagatctatccaggttcatcgaataatttagaaatgagaaacggatttcgcatcaaccacagaaatttcataagacgtcgaaatcaaacacagatctaaacgattacgtaaaatagatctacgaggtcaatgctgcgcaaaaatatctcagatttgatcttttaaaatacgaaaaatatgaagaaaaacacagatcaagatagaagaggaagagacgaacctgaatgccatgttcaagacagtaaagctcccagcaagcatttccgacctggataccggcctgaccaatgtggatcgaaatgcactctctcattttcgtttcgcggaagaaagaaaagatctagaaactagatttgcagggaagaagacgaagaagaagaagggcgtttatgaagacgctcttcttttagatctagatctgattttttcgatttctaggtttttacagagctgtttgatgctatatttataagcgaaagtatccatctgtatgtaacggcacgtatgatacacgtgtagtgatgtaattgggttgtcgttaaaaccacgatttgttgatatcctcgtgagttgcgtattttctaattttgaattttgattccttagattctgtttggcaatcgctttctgaccgtttctctttatttttgaaatagcaaaattccttgaattgcgtggaaatgaaccggaatttaattagaattgaaccggatcagaccaatatttaaagtaaaccgaaacgataagaaactagtattaaccaaaatcttcgaaatggtaaccaaaaattcaaagctttgagtaaatgatgagagcgctagcggcggcttcacggccactgttttccgatttgccgagtctcgttcgttcatggcttccgacttctagcttcaaatcgtttgctactgtatcttcgtctcctccgtcggatttgaatctccggaatcaatctcgcggtggccttcctcgattcttttccgatgatcttccatctcgcaaggcacacaccctatctatctctatctttatctcatataatttttgttccctttaaatctgtgtaagaatccaatcgaaatgagagtgagggtaatcactgagaagtttagaaattactgtaattcactgtaatctctaagaaatttctggtaaaatcatg

SEQ ID NO: 31025 - DNA, 3003 bp, Unknown
  misc_feature (1)..( 3003): 2750-1469P.txt file - cDNA_ID_3038035; gDNA_ID_2214449; Annot_ID_182399
ttcacggaaatgacggtgaggactacgccttcttgttgaagggacatgaagatttaaggcaagatgagcgtgttatgcaggtgattctcaaaaaaatcagttatgcattgttctgatgaattcttgttggagaatacgtaattgaagttttcagtttacacttcacaaatatacagttttcagctacaaaatcacatctatccctttcctcttatttgtgtttcagctttttggtttggtgaacactttgcttgagaattccagaaaaacagccgaaaaagatctttccattcaacgctattctgtaataccactatctcccaatagtggactcatcggatgggttccgaactgcgatacccttcaccatcttattcgagagcacagagatgcaagaaaggtttgtcttgtattcactaaggttttcagtcctgaaactatctgcggtttacgttaattcttacacatgcctgtctgaattcatagatcattcttaatcaagaaaataagcatatgttgagttttgctccagactatgacaatctaccgcttatagcaaaggttgaagtatttgagtatgctctagaaaacacagagggaaatgatctatccagggtactcaattcattctggtaactctatttattttgggtaaagtacctaatctggaatactaagttgcttctattcttctccttcttattaggttctctggttaaaaagtcgctcgtcagaagtttggctagaaagaagaacaaactatactagaagtttagcagttatgagtatggtatgtagttgatctcatcctttgttctccacttgtgtagcatcaaataaaaagtttctggtgtttaactcgccaataaaatgaacttcatgcgttactttgtgtcaggttggttatattcttgggttaggtgatcgacacccaagtaaccttatgcttcatagatacaggtacataaaactgaaataaggtttacattacattttcaaccttgggttctatttctttatcaatggttttaattgtgcagtggaaagatcttgcatattgattttggagattgttttgaggcttctatgaatagagagaagtttcctgaaaaggtattaattttaatgtttccctcgtatatacttgtttgtgggtatcaaagaacaattttgtgaggattgcttaaataatgttaggttccattccgcctgacaagaatgcttgtcaaagcaatggaagtcagtggcattgaaggaaacttccgctcaacctgcgaaaacgttatgcaagttctcagaaccaataaagatagtgtaatggcaatgatggaagcgtttgtacatgatcctttaatcaattggcgtcttttcaatttcaatgaagtcccccaattagcactgctcggtaacaacaaccccaatgctcctgctgatgttgagcctgacgaagaagatgaagatcccgctgatatagatcttcctcagcctcaaaggagtactcgagagaaggagattcttcaggtttcttttgaaaatcttattatgtttttttcttctcaaagggggatttttttatatttaaatttgatttttggattatttcaggctgtaaatatgcttggagatgctaatgaagttttaaatgagcgtgccgtagttgttatggcacgtatgagtcataagcttacagggcgtgatttttcttcgtctgcaattccgagcaatcccattgctgatcataataacttgctcggaggagattctcatgaagtcgaacatggtttgtctgtgaaagttcaggttcaaaaactaatcaatcaagccacttcccatgagaatctctgtcaaaactatgttgggtatgttcctctacacttctacactcctaaaccccgattgctttagttcatttaaaattgaacatgcatatttcttgtgtttgttcttttattacaggtggtgccctttctggtgagatgggtcatctgtacatttttaatgtaaataggctttttaattttcaactaatttgcatttatgtttgactaattcgataataaactatgttctttttaatgtaaataatttattagtttcatagtcatgtattaatacatgatgtagcgtggatgaataaatgggcaggtcaccttttttacttttctgaaatatacattctcatatcctcaaggtattttaatggaattgcgacaaaagaagaagaagaagaagatggtgtacaatgtacatgttttatgaactatataaagcaattggaatatgcatgttctttttaatgaaacatgtttccggagtttaagatggatttcataaaaatcaacataattttgttaatagtccaaataatataatttttttattttttttttgttaaagcaaatttgtcacatttttttatataaaatttgtgatgtcaaaagagaagacaaatgtaaaattgtgttgtgggttgttacagtatgtagttggtatctttattaaacctaccaaaacgagacaatttgtaacattgagggagcatgtgatagtacattgggtattatactattaagctaacatgagtaatgatgtttttttgttttttttttctcttctatgtattttgtttttgtaccaatattattaatacagaatggggacaaaaaggagacgtggagtctcgcgttacgttaccactctctcaaatgcggcaatttggcagccacacacacatggacagcgttagcgtactgtagataaataatccgtactcgtgctaacgtacgcttcaaatagttaaaggtgataactttcaccgttgtctcggcaccacttgctcgaatattgacacctttttcttccccagaaaaaatccaaacaaatagaattttgccgtctgaaattcctaaaactataaaacacagcttccttcttctcctatatattcatcggcgacgccttgatcatgattctttccggaaactgataagaggaacaaaaatg

SEQ ID NO: 31026 - DNA, 291 bp, Unknown; identical to SEQ ID NO: 568
  misc_feature (1)..( 291): 2750-1469P.txt file - cDNA_ID_3038039; gDNA_ID_1592000; Annot_ID_151825

SEQ ID NO: 31027 - DNA, 3003 bp, Unknown
  misc_feature (1)..( 3003): 2750-1469P.txt file - cDNA_ID_3038039; gDNA_ID_2214449; Annot_ID_182398
aatcagcttctcaccggaagcagcgacaaatccacacgacgcactacggcgagagtaaacctcgacggagagaacactccatttagccttcttaagagacgtctcaatctgagacttacttagactaaagcaagcagcgacggttgagacgttaccggaacaacaccgagactctgattccgattcggttcgcaacagaacgggaacagaaacaatctggcgtgggaaactcttgaacttgattttacaatagcaattaccagaggatacatccgaaacagacggtccagatgaagaagaagacgacgatgatgacgacggtgatctcggaaacctaaccgccaaattcccgacgatgatgcgtacgaaagagcaaggatccattgtgaattgaagattgaattatcggtaaatgttaattagtcagagctacgaagaaaggaactttaacactactaaccctaactagtttagggtttaagagagaattggagtggaagaagaagggattttggagaagagctataaaaatggaagattgatgagaattaaacaggctggaatatagctgtgatttttttgttgagaaaaacaaatggaaattaggtgaaagattttgtggggtcaaaactccaaaaaaccaaactatcgcctgtcaatttccagatgtgtaaattgaaataatattattctttcttttattttatttttttattttttggtaaataaaagtttttttttagtttaagtatgtattgattcttaaccttgaaatttctagtgttctaaatagatttatttctttactcctttatatgatttttttagttaaatgtttttgtcttttacaattttgatataatttctggaatcgttattgaggtttatatggtagatttttttcttttatacaggaaacatatcaagagattaaatagtaacgtgtatatatatttttgctggtcttgaattctttttaatgtatgtacattttgttgttgttttattgacatttcacacgttttattaaatatatttctacttagataacgattgaaaataggaatacgtcgtatactgtaatttgtaagattttaatgtagctttttttggcactgatacttgattacttctaaaaactgaaagatcttgtaaaatgcagtttttttaatggaagagagaaataatggaacagtggataaaaaaaagccaaagacctttttgatttgaaatgatttagcttttaaattttgaaataagctgatggaaaatagttagaagtggataatttatctatctgtttatcacttaggttagatgaattggtcccaaaagttggagcacgcatgtatatagttggcatcattatcctttgctaataatataaaacttaagaagctaataaattaatattgacaaaaaagtctaaactaataataaaattcttctttttttttgatgaggttatttatcctatatggaaatgtatatgttattatttaaattctatacgtataatgcgttaatgatataaaaaattgagttattttgtgtcattttaactcttttttaaatagtactcttagttgtagtttattaatttggagagaaaagaacaccaatattttcaccgacattcttgtcacgttatgggattgcgcaacgttaacacttggaccctgtctattcaccatccttgatgtgtacgatgaaaccaagcgatgctatagcctcccacaagccacaactcttttgaaattttatgttggatgtgcttcgtttaattttcgaatgtaatgcttattttgtcatacacaatcattgtgattattttcgttgtaacaacggagaaacacgaactatattttggaggagccatttctttagtttttcctatacatatgaatatgaatactacttaacatacaagcaaaacaaaaatttaccattggagaataaataatgatttctatgatttagaatttttatgaatagaaaaacaaagtttcatcacatctaacaattcaaatccactccataccaaaaaaaagaaaaacaattcaaattaactgaatgatatgattcacatttcatcaatttttcaatatatgatatatcgattaccatacaactattttacaattctactattatttgacattttttattcaaaatttgactaatattcgatatttttttgtatagatattattcctcttatttatttaatttgttgacaaacttaaccatatgcattcaattgaattttttcattttccccattatttttgttcgtaatgactactaattacaacaaaactatagtttattattttcctacaatttaatgatcattttaaaaactccttatctgcttaaaagcataattggaaataataataataaagtgaaatgacaataaaagaaaacttattcaagaaactacaaagttattccttgacaaaaaaagttattctattgtccagtgaacaaatatgagtttttgactattttttttttcacaagtaattttttttctttgacaagtgtatattaaacattctaaacattacatagcccaaacaaagaccctttcagggttttaagtaattaatcagtgacaaaaaaaaatgaaaatattgtatttataagtttttgatagacaaacataagttttacaattttccaaggaaaaagtcatattttcctagtaaaaacctttcgggttttccaatttatttaccaaagataattggtctctgaaagaacaaagcaaaacctaagaaagctaaaaagacactcagcgaattgaatttgtaaaaaaataagagaaaaaatcttgatttcttctgcgatcttcggttctcgacgcatcatgtgttgaagattcttctatcttcctctgtacatactctctctctgcccaagtgttgttgaaccaaaaaggggtcagatttagggtttttggaagatttttgtggctggactggccctgcagcgatg

SEQ ID NO: 31028 - DNA, 3000 bp, Unknown; identical to SEQ ID NO: 10789
  misc_feature (1)..( 3000): 2750-1469P.txt file - cDNA_ID_3038045; gDNA_ID_2214449; Annot_ID_182396

SEQ ID NO: 31029 - DNA, 3000 bp, Unknown; identical to SEQ ID NO: 10788
  misc_feature (1)..( 3000): 2750-1469P.txt file - cDNA_ID_3038049; gDNA_ID_2214449; Annot_ID_182394

SEQ ID NO: 31030 - DNA, 3003 bp, Unknown
  misc_feature (1)..( 3003): 2750-1469P.txt file - cDNA_ID_3038051; gDNA_ID_2214449; Annot_ID_182393
gcgttcaagcaaccaaagtaaccgaaacacaatgttttacacatataacacctacagaaaacacggaaagtcaagtaaactaaccacttcaatgaaatcttgtgttgagtctttgtaaaattgactgttttctaatgccatccatcttccgcataatgtgctcttaatgtagtaaaggtaacgtaaagtagcacctttataagaaggtggtataatctgtgggagtatagctcgaaccattactgtagatgaaaattacaaacaaagaagcctgtcagcttaaaggttgacattgtaaagcctagccgttagtatatgtgccgtcggcatcaagcaagtgtacgttattattgttctttgttcatacagtattagagaaggagttaggcaagattacatgtcatcttagcaccaggggataggatttgatttgaaatcaaagatggtgttgaactgtctaggaagatgtgttcacctgaaaatctccaagagatatatatatggttaacgcacatcaatagaaaattacaagtagatggtaaagtgagcatgacgtgttggaagaaacatgaaaggctgacagaagatatataacagttgcagtaaaaagcttgttaaaatacctcttcgtcctttgcttcctggtgaaggtttttgagtagaaaaccactgaatgtccaatttctctagacctttaacctcaaaactaagcttttcaaccaaaatggagggattagaggcgttgtcatgagaattagcaacctcaatagttacaaaaatggaatctccaggcctatacacatctttatccgtttgaacacttagagatggtttgatcttgcttccagaaacacccacggagtcattgacttcactggaactgccgatccccaaaaaggaaaaccttgatgatagcatcgcttcaatggctgtgtttcttaaccaatacaacaatgccttccatgaatcgcttcaatggtgctaattacaaggacgacgagacttggatggagttgaatcattcaagggttccagagagaggacaaacataaaaaattggcagacagtagctaacgaatggcaatcaattacttcagatccagagagaagacgacgcgaatcgcgcagatcatagaaccaatttgtgagatttcgttccgaacaaaaggcaaatgtttcgttcacagagagtgagcttctaccttggttccttgagaatgacgagcagaaatgtgaagacggtgccgccgggagaagtcttcgtgataagagagccgagatcacaaatgaagagaattgagcaaggattctggaagagagtttagagggagatgaagaaattagggagataagcaattttctgagatccttgtttgatgacttctattctcctctgcaggagaagcttacaattactttagaaagcttagcttaacttaatctctacgtcttatttcagcccaacatgagcccaacatttcttatattctgcaatcatatttttgatccatttgattagttcgtttcgaagttctttaggatcatacaaatcctttctacatgtatctaattcaataaatcattggctcatcatatttttgtacatatgatgattcgttaaaaaacacctaatttacaaagaagtaattatattttcatattcaattttagcatcttttcgacatcttaaaaatgtgtactcggctaattagaaatactatacagtagtagttccttaaacattcaatttagtgtgttttggattatgtatcatggattttaaagtaggctagactttttgtctttctatcttaagtatttacttgcattcactgattgtcttttacatgaacataaaactatctaggtgtcttgattcttagcaaaatgttgttcctattgtcttttgcaaaacattgaaactgtaattgaacaatatagtttgaagttgtctaattttgcgagttagtttatctataatcacacgaaaccaaatcatataaaatccataaaatttggtcatttacatcacggattgctttggtaagagctagttcattatttatggccacctcttctgaatcagtaacaaatgcaaaactaggcaacaatactccttaggattctatcaagattactcaaaacgattttttgctcatgagtagtccatggaagacaaatcatatcagttacgaagcttgtttagaatctaaaacaaacaaaaaaaaaaatgataaagggaaagcaaaacatatttatcgtggtagcaaacatgttgttgacttgagctttgttggcataaatgtgactgtagtaaaaaagcgaatcaactggaactaaatctctgaactttgtcgtcggattaattggtgaaccattgaatttaacaaagtgagtgattgcccaacaattcattgcaacttgaatcttactccattttcacccgataaattttgtaacttcttttttatattttaatttttagtaatagatatattttattattaaaaatgaaataaaaactaaaaatttatcattttggaaaaaaatagtccggttgtaaaggttctgattatcctgattataaagaaaaaaaaaatagtacaatgtatcggtatcaataatatgtaaatgttttcggtactatgaaactgcattgcactatatggtttactctccattcggagtctcggtgcaatgtattggtactaatgaattaaagacaccttttctcaacaaagaacggccactttagcttaataaaaaaagtctttagccatcccatcaaccttcgtataaaaagaaaaatagttgaagattctacaatttattagtatattcccatcaacaaattctttaaaagaaaaaagtggagaaggaatcaaaagggtttgtttgttgtcagtcacactataaaaagacgctcctgaaaccacgtgaccactacacgcctctcttcttctgcttcacttcactactgctttctctatttctccatagatg

SEQ ID NO: 31031 - DNA, 3000 bp, Unknown; identical to SEQ ID NO: 10790
  misc_feature (1)..( 3000): 2750-1469P.txt file - cDNA_ID_3038055; gDNA_ID_2214449; Annot_ID_182392

SEQ ID NO: 31032 - DNA, 258 bp, Unknown; identical to SEQ ID NO: 10787
  misc_feature (1)..( 258): 2750-1469P.txt file - cDNA_ID_3038063; gDNA_ID_2214449; Annot_ID_182389

SEQ ID NO: 31033 - DNA, 3003 bp, Unknown
  misc_feature (1)..( 3003): 2750-1469P.txt file - cDNA_ID_3038094; gDNA_ID_2214451; Annot_ID_182566
cattttctactggatgacttccttcttcaagatttctatcaacaatttccagcatttttgccgaataaggatctggaagacgcaactgcttattcacccagtctcccatagaccttaaaacagcaactaagcatttcatggcttcaagcttcatggctgcttcctgaggtggcaacaaggtagtaactgtaccaggaggcactccttgagcagtcttaaggagaccattgaccatcctaaaaacaaggtcaagaaaaccaatacagaaatgaatgctacttcaaatagttcgcactagttaatgatcgcagctctgataccacaaaataaatagattcagggcgtaaagataagccacaacaagatattagatcatacctctcaaatatattggatgagttgacatcgcaatcatagttgatgaagatatctaccaaaatctgtgaatcaacgcagagcttgtccaagaaccgaagcactatcatcttctgttggaaatcaggttgagcaacattctctaatactcttagaacaatcatagggaagaacaccccaatctctgccttcagcccagcacgaaacctcgaaaccaagctaagtaaaatcgagcaggaaagctggaaaatgatcataagatttgaagcactgttcttcagcaaggagagacacagatactgcttgatggcgcctaagaacctgttccataatgagttgatgccaaattttcagaagaaacaccaaaagctaaattacattctgtccaagcaactatcaagcagaatgttgaaagctgagggaaaaaagactgaatctagagatatgatagtttaatctacctaacgtgggttataataatgcaagaagataaacaaaacaaacctatcgctggttctaaagacagcaccggcattctcaagcagaatcttcaataactcgagagccacaatcttccctctcatcaactctggatcttccttgggaggcgtcttcatggacagcttgcaaagtgccctgaaaaccaagaaggcgtctcttctcagcttattcccaatctgaacttcagaatcatcgtctttctccacttctccatcggccagctctccttttcttccctcgagggccgacttatacatactgatctcccagtacttggcatccaacatatccttatcagtagaatccaacaaatcagtaggattggcagtgccaggcaatgaagtctcgaaggccccgtcatggccgccgaatgtgcccttggcgttagctgaattgaagactccgtcaatgtcctgcataatcttggtaatgaaaccttgaacagactgcgtcgtagatgggtctgattcggatttgtccatgggctccatcagctcggccacgacgatgggctgaatggggacggtggatgaatctgcctccattcttctgaacacgataacagacatctgcacgagcgaggctttagcagtcgcctgattaaccacgtttctgcttcccaagtagataccataacaagtcctgacgatctgtagcaaagaatctccatggatcctcagggaaattgaagttaccgcagtcaagagcgtcttcagcacgagcaactcgagcccttcgtcgtctagctcgtgacatttgcagatggtttcaatgagcttggaaaggagtagcgcctcaggtccgccggtgggatcagcctcaccgcgaacgtagccatgagcaataagcttctggatgcaatcaacggcgggatcgacaatcttgagaacgccggtggaggaggcgttgatgagagggctgaggatgatctcggactcggcgagagagtattcggcggctcctccgtcgtgaagtggtccaggaatggaggatccagattcagagtcggcaacaggagaggaattttcaggggatctaaggcgttcgatgacggatttgcactcgtgggcgagcttggagtgcttacgccaggaggcgttcttaatgaccttgtccaaagcagggataacaactcgacctaagcgggaatcgacttccgtagaagccattccagattggtagccgtgacttcaacgaatcaccaatttagatctataagaggagagtgagtatctatctatgtagcccagagagaacggataacaacaacaagagcaacgcctcctcctctgcgatccaatcaaagcagtattcttatcagggagtcagtgaattacagacatctacgaagatgaagcagacgagacaaaaaaaaaaatggtgagcttgagtgaagtaaccaatataataaaaatccgagagaaccagatttggatcgccgtcctctcctctatatgaaatgacttatatatccttgaatagtggcggtaatgtctccggatttgagggcatagttggtattttcaaaatgacgaattctgtatctgttgaccgtcccggtggactcccccggtcatgagctttctagcttatttatcctaaataaattgcttttggtaatagtagtgatatcgaaaaacacccatgattaattcccaacaaatatgtaaatttgttttgcgagtaaagagaaaaacaccttcaacaatagtttttgaatttcattatcgccattgaatttcatttgcggaataatgggccataattgtaacggaggcccaatattaataaaaggcccatagtgaagtggtctctagtgttgtctaatccgccagacagaagtagagcagagcaaagaaagctaacagagtcatctccaccgctctaaattctaatctatccacaccagctctgtctatgaactttgcttggctcatctcctttatctccagtttctcctgagctctgctttttgtaagtaatcatcagagaagctcaattctgtacttgtatgatcctcaattaggcctttgaattcatgacttgttttctagagattaggttcatgtgaaatcatacggccgccaaatttaggtttttctcttttagttcttgaggtatacaatg

SEQ ID NO: 31034 - DNA, 3000 bp, Unknown; identical to SEQ ID NO: 10831
  misc_feature (1)..( 3000): 2750-1469P.txt file - cDNA_ID_3038098; gDNA_ID_2214451; Annot_ID_182565

SEQ ID NO: 31035 - DNA, 3003 bp, Unknown
  misc_feature (1)..( 3003): 2750-1469P.txt file - cDNA_ID_3038102; gDNA_ID_2214451; Annot_ID_182564
aattgctcgaataatttagtcggaagagagaaatttgtacgttaaggcgatgaatatcggacttgaagtggtagcgttgatcttgaagagacaggaactcaattttacaagtattacaggtccatctgtccaaaatcacgccgtccttggaactcttatcctcctccgcctcctctggatcgaaagttttgggtggtccgaatgccgattgagtctccgaaggattcgacaaccgacacgagtcaaagaaatccgccgtcaagtcaaatatcgatcgaggctgtttatattctggattaccaatctcggtggtggccgccgcgccggtggtcgccattaattatgaattggacggattgattttcctaacaccggtaccgataccgataagtgtggatttgaaagctttgtgagataaacgattccgttttgttattttcttaaatggatccataatgtcattaaagtggcccatataaggcccaataatacaaggcggcgatgcagaaagatctcgaacgaacaaaagcgccaaaagcatcctagacgcgactgagaaaataaatatagaagaaagcctctctgctcgttttgcgtttccgagcaacaatggtgagtcgtttgtccattgttcgttcgtttgtcctttgttcgttctagtcagttttttttttaatatagttctggcgatatttgtatttatatgttcgagtttcctggttttgattattgcagtcggtaactttgcacacgaacctgggtgacatcaagtgcgaaatcttctgtgacgaggttcccaagagtgctgaggttagttattcactcagctcatgtttctcggtttcgatttgagctgttttctttgaattgtttacaaaatcagtccagttgaggcaaataacaaaacaatattcactaggttatctagtgtccaattagctattacctggtgctgggttcttgtattgtatggatgatttttcttctccttctctggattgtttttaatctttaggcgaaattagggttatatgaatgtcatgattggggaaattatttttccctcaacagtgttggtgtataggttcattatttttcaatgcgtattcattggatcactgagctatttctctctgacaattttcgcaagtttttccatgtatgaagcaccttgacctttagctttgatctttcatattggtgcagaactttttggcgttgtgtgctagtggctactacgatggtactatctttcatagaaatatcaaagggttcatgattcaaggaggagaccccaaggggaccggaaaaggaggaactagcatctggggcaagaaattcaatgatgagatccgagactcccttaaggtatctctattctcatctctgcttatactttccctttatccttcaaactgcatcttcaatgtaatgcaactgtctcatggcctgttggtgtgttacctcttattcagtgtcttcataatccatgttagcatccatccataattatagacttcttttagctcagaaccattattagtcttagaaaaccaaagtggctgagtacactatcctgatctgttccttctgactgtaaggtaaggtatcaatgtgttttagccaggtagtcatatgcatgccattaccctactcataaccgctagtgcaatccctcttgcatttaattccagggaagtagatagatttgagtctgttgcgaatggtcttatctatctctctagttgttcttgataatttaccagattccattctcttatgcagcacaatgcaagagggatgctgtcaatggcaaacagcggtccaaacaccaacggaagccagttcttcataacctatgcaaaacaaccacatctcaatggattatacaccatctttggcaaagtcattcatggcttcgaagtgcttgacattatggaaaaggtaaaccaacctcttaccctcttaaatcacctcgtctttctaagaagagtttgaactcttatgttttcttccttactgtgactgttgttagcctaaatcaagtgtgttaaagaagaatgcttgttagttgttggtgatatgaagcctggaacaggatttattgatctgaattttgtttttagaaaactcatctaatgatatgattgtggcctgttgcagactcaaacaggaccaggagataggccgcttgctgagataaggctaaaccgtgtgacgatccacgccaatccacttgctggttaagtctaatgtggcagaaccgagccaagccaaaagtgttgttctctttatttgtttcgatagagctgacatgtacactcagaaactgaactaagaccactgtttcacccaattaaaaagtttgtactggaggatttaccaattactgtcttcaaaggtgttttgtattatttaaagacaaaaataattttttttgcccaatacttgacgccgtattgcaatctcgccaacaagatttcaaatacacaataatctatctgctgagtgtgtaataataactaataagattcaacgtgggccatcaaattcgaaccaaatcatgtaaatgggctcagccaaacccgacccggatcgaataaaaacggatcccttccactaagccgacccgttcggcgcaattaaagcggccactacctctggctagtagggaccgaaccacactgcgcagtcagcacaaacctgaataagggtaaaaaggtaaaatacggtactctcttttgacaaaatgggacccgttgtaacgcaacgactgtctctgtcttcattcaaatactaaacgcgtgtgggcccgccaacctcctcctcctccatcactgttttttgtttaaacaaaaaaaaaacacaaaatgttaaaagaaaaaaatataacccaaaaattgacgaaacaaaattgagaaacaatacaacaccactctcttcttcttcgtttgaatttgttcttctcttttttgcatagagaagactattgattagaaaatg

SEQ ID NO: 31036 - DNA, 3000 bp, Unknown; identical to SEQ ID NO: 10829
  misc_feature (1)..( 3000): 2750-1469P.txt file - cDNA_ID_3038106; gDNA_ID_2214451; Annot_ID_182562

SEQ ID NO: 31037 - DNA, 3003 bp, Unknown
  misc_feature (1)..( 3003): 2750-1469P.txt file - cDNA_ID_3038110; gDNA_ID_2214451; Annot_ID_182561
atcatagcattcgcttgtcacagatacccttcaacttaatatataaaaagctgattaagtcgtaaaacaacgatttcttggtagatatgagtctatgtagtcatgattattacaaatataaaaacaaatccaatgcataacaataaaacaacgcaaaagaagattctgcttgatcttctttcctgtcctataaagagttgttgctagatgaagaactagagagaaaaagattcagttttaattttccacctataaattgttcaaaacataaacaacaataaacccaaatgacaacgcagatccagaagacccccatgtagaaagcaagtgagttccaagaatatggcgaggaaagaaacttacaattaaagggaagaacagagccttatctttagccactcttgacccgttcgagttcttcttcagctgtttttaactgcaaacgcaatgtgtgtactttcctctccagctcctctacattgctcctgctagtggtaggatggtacggcgtcaagaacttatgtgaaaacgcctttaaggcttcaacccctgtcacctgtgatccaaacatccacaacaagtgtaaatctcaggatgtatattatataaggctttagtttcattttcgtcttgatcatgttccttctcatctatattgaatgtcatgcgttcttacctcttccggaagcagaggaagctttgtgatattaaagtcatcgtatagcatataaaactgatcaagatacttctgttgcatccgcatccttgctctgagcaacttggactccacatctacagaagacaagtgtagataattcgtcaaatttgtatgtaaaacaagttcaaaacgagaagatagacacgacagcaaataaataggcaccttcgtcgtcgtatagtacttggttgatgataatgttatgcgtgtcaatctcaaacttggcgagttcctgaacaagtctctctgtttcatagagagacaagaactcggggatgcagacacaaacgaacgtagtcatatcctacgtaatggagccaaatgtgtcaatttcttatcttaaaatgcagagtttgttagatatgtatcagaattttcactaatgcaaatgaatgctgtcaaaccgtatgctacagaacaatgtgaagaatctaaaactaaacttcacgaacagagttaagaaaacagtcaatgagtactgaaaatagcaaagaacttaaacaattgaaaaaatgttaccgggtctttgaattgccgatttacttgctcaatcacatctttcaagccctcaagtcttcccagcaaagcatcctctccgaactcatcctccatgccaaacatacggctcatctgcattaccaatcagttccatgaaaaatcagccaaagaagaaaccaaagagcaatatctgttgccaagcaaactgaatttgacaagcttaaagacatgcctgagtcatcaagccaccaaatctactcttcaatgacatcaacttcgaaagtcccttttctagtgtggccggaaactgtaacaggcggagagtatgtccagtaggagcagtgtcaaacacaatagtagcataatccattgtttgcaccaacctaaggaaacataaacatatcaaaatttgactgtgataatacatggataaaggcagatgattactagaagaactaaatggctatttacttcaacatctcagcaaaactcatagcctcatcgattccaggaatcgcatttgccaaatcagagaataaaccatccatcccgtctgtaccagccatgtcatcagtttcaacggtaggatctacctcctgagaaaagcaaacaagattcactcactatcaagagggaaggagtgtgaatcgtaaccatttgcttatagtatgtgtatatatatacatatacacacagacacaactaagagcttcaagcttagaagagtagccataaagtcatcatcaagcctgtctattagaggcgacccagaaccacaaaaaacaacttttttttttttttttgaatttggcataactagccatgaattttaactacaatagacaaaaattcgatttgatttggggacatcaaatcttcttcacaatccccttccgtatcaagaatacaaattggcgtccaaattccaaacctaatccccaaaatcagagtgggcatatgataagaaaggcacaaatcaaccgtatttatgcaagtactaaatctgacttcaaaatcaaaattgatccatcaatctgcggtttgaaattcgtgaatcagagaaccctaattcccaatgagattaaaatccaggagcgaaactaccaaattccctctaaaatctagcacgatctagaacaaaatcggagaaagcttaccatggcaaagagattagagaaaccttgaaccaaagtgggagatttagtgaagcgttgctgaaaggcatcactaagattgtgagcaggatcggtggagatgatgagaacggaggatcgaacactggcgagacaaattgcgagaattgaactgcatgtcgtcttcccaacacctcctttacctccgacgaaaacccatttaagagactcttggtccagaatgttctgtactgtcgcctccggcaaatccgccgccattgctaattccttgctcgtctctcttccactagtctcaatctaaagagctccttgttagatatttggcgtacggaagagtttaactgcggcgagagacttttaacgccgcccggttcaatattttggttctcggttttgggatatcacagcagtcttggtttgatttttttggttatcgtttttcacttgttcaatttttctttttttgttaaaaatttaaatttggtgtgtttaagttcataaacgctaaataagcccatacaaaagcccacatagatgaagccattacgacagcgtattgtgagttacgattgaaaacccctctctactcggttaaacccgtcgccggcatattgatcttcgccggaggatatg

SEQ ID NO: 31038 - DNA, 3000 bp, Unknown
  misc_feature (1)..( 3000): 2750-1469P.txt file - cDNA_ID_3038114; gDNA_ID_2214451; Annot_ID_182560
aaacggtgatcatacctcttcaagcatagctgagaccttgtaaatctcttcttcttgcattgcaatggtccttaagccagtcataaaatcttctgggaaaactagtttgttcatatatgtgggcatcttacgcttcccagaccaactgaaattacaggatctcactgtttccttctcatcactttctctaattactgatgtggttcgtgggaaaaacccatgatttaggaccgattttggcaagagacaccggagttgtgcattctgcaatgatattttttagagttcgacagttacatattacatggaaataaatgtattaaagagctacattgtcttatagggtctataatcaaaacttcgggtaagatagtgcgaagacttgtactgctaacctgagcttcaagcagctgccccttggaatcagaaaaagggatactcggaattgcctcaacaggataatgtacctgaataaatccattgttaaacgtaacaacagatgtgagaacaaaattgacgagcatctccttgatcttgaaagttatgtttctcgtcatcattctcaagacttctataatacatcactggttgaaaaggtagggaactgttgatggatgtaaatattaccatgagataatcatctgggttgttatctatcacaaagccatacaggtaaagaagctcctgcattcagcaagaaggcacatcactcaaacaaagggctagatgtgattttttaccaagagacaagttatatagttgtacaagatagctgcaaaacatcttacctcatttcctttgttaccataactgatcgagatctccttctttgggataggacgttgagcaactgctttacagaattgtagcacttagttttccgcatacagatcaaaaagaagagaggaaaaagaatgttctgtattgtttgattgaaaaattgtagaaagctgagaggtaacacaaacaaatatttggccaaccagagagaaggtacatggagaaaggaaccctagatactgatccgatcccatcaacttcccaagtcgccacaggcttcaaatctatactgccataaccataggtcattatatcacatcacactgggatatactcattaaccatatcaacattatggaacggagaaactgataatagagtctttttgaaacaaagattggcataccatggttgcaaaagtcaatgccaggaacaagcccctcaacccatattgtatctccggatcctacagatggcgcaggttgagcctgaatttctacccatcagaaaatgaagaaacccatgaaattgtcgttacatgatagaataataataattaaaaaagaggcatttcacacagaattcagcagaccgacgttaatgacttgcctttttcctcattagaattaactggagccgtttcaggggactcacttgttgatgtgcattccccggtatcatcttggctttgtggaaacacgaaagaatgtggaagaggaatattcaaggcgcgactccagaatacagagtttgccctggcataattgaaaaaagtcgcaagatcactaagcagccctttacaagacacaaaagtctggttctactaacaaggaataacaccagtaccaaacataccagaggaagtgttcaaaggagaccttgctgcacgaagagagaaaacaaaatatgattatcaatgaacaataatttggtctaaaagtagtgtaaatatgtcaacctttcggaatcgccatccaaaataagaagctttgtcaccaggacctccaccttgtcatggtaaagcgagagcaacttcttcttctgagaatgaatacacgatggttattgggtttaataaatgaaaagagaaaatgtggttgctattttaaggacgatatgataagacaggaataaatgatcaagattgagacctgtaactcggttgcgtgatacaagttagtcccttttagctcaaggatgtcatcatcagaaaaccaaagaggattgccaaatcgagtaggaagcatatcaagatacctatcatatcatttctagacagatgaatacccttaagcttacgtaaatgtgtgctaagagattaaaaaaaaaacttacggcttccaagaagaattgatacgaagacgctccaaagtgaggaacagaatcatgagaaagcggtcatcaacttgtccttgttcgaacattttctgacactcagggcccaggagagggtcctgaagaactctcataggggtaatggccagatcaagcggaacaacaagcaaaacttctgaaaatttccagagctgaatcagaattcaatatcaactttccatacatattccccggaaaaaaacccagcaagaaatggtaagaacaatactataccatcggaagcttgagtggaggtggaagcgaatatgccaaatccttttagggagtcagaatatttgatgttgcagcctcttaattcacctccattcacctgaatgaaattagatcgaaacacaaaatgccatgatatagagcagcagatcaggactgaaaaacaacacttaatccggatctaacctgaagccaatctaggaacctttcgagtttggcttcttcttctgaaatcgccatatcctccggcgaagatcaatatgccggcgacgggtttaaccgagtagagaggggttttcaatcgtaactcacaatacgctgtcgtaatggcttcatctatgtgggcttttgtatgggcttatttagcgtttatgaacttaaacacaccaaatttaaatttttaacaaaaaaagaaaaattgaacaagtgaaaaacgataaccaaaaaaatcaaaccaagactgctgtgatatcccaaaaccgagaaccaaaatattgaaccgggcggcgttaaaagtctctcgccgcagttaaactcttccgtacgccaaatatctaacaaggagctctttagattgagactagtggaagagagacgagcaaggaattagcaatg

SEQ ID NO: 31039 - DNA, 3003 bp, Unknown
  misc_feature (1)..( 3003): 2750-1469P.txt file - cDNA_ID_3038118; gDNA_ID_2214451; Annot_ID_182559
tcacatctaaaccctaatggttttttaatgcaaccactatcacaaccgcagtgctcacaagaggacttaaaatgagttctcttgctgcccaggtgtccacaacgggaacagtgaggagatctttttttcatctctgagcggaattcttcaccatcatccccggatttgattccaccaggaactgcaggttgcaacccatttccaatgtcctgtagtctgcacgaaaatatatatcccaacacattcaagaaaatgacaagtcaccaaaaagcagagacaaaaagcttatggattataacctttcaagtacttggtcttcagaaaactcacgaacaatgcgcagtgctttatccacaccaatcccaagaacaccgcctgaatcataatcgtttcccaccaatagagaaatagcaatcaagtgtttccgcttcaaaccgaggccagactcgatatgtgacatatggtagcattcaaaaggttcctgcacacaaggaaattaagatggtaaagagacgataagtgagtcagggtaatactcagttacaaatgaatacttactcttgaattaggcttgatgtctttgatcacgcacatagcaccaaaaaggaaagcatcactatcaggagtaatgcaagcatccacaaaaccttggctgtttaactgtgcacagagagcttcagcctcaccattagctttcagcaccggaataccgagcaattcgagtagctcctagagaaccaaaaaaagtcataagaaaacaatgtgaaacaaaacaagcataaaggtttgaagggaaagccatcttaccacacattccctaacccattcagaaaacagcttgtttctctcaaccgagacaccatctttaatcacaggtagattacaagtatcaattccagaagaacggaaaaacctggagattctcgcctgagatttcaaaggtgatggtgttccatcaaccacaaaaaccgggtacgctccaaactgcaaaaccctaaaccgcattacaatcatctccatagaaaaaaatcaagatttttcaatcaagcgaaaacctaaaaaattcaaaaaaacccgtaatccacagaaaaaaggaacttttttagccaatgccaaaaaaggattaaaggagacgaaattgggaaattcagtagaagcataacaagagagaagaagcgcgcagcaataaaaaaaaaaaaaatgggacctttgagaagaggttgatagtacggaagaaagtgagtcggaggtgaggtttaaggacgaaacccttaacagcggtttcatgctgaacgatccagaaggagagatcaacagcgactcgtttgtttctgagaaaatcaaagccttgttgctgagcatatggtctcagcaaatcccagaaattgcctcccacacccattcaatcaaaatgccgtaatagcctagcggagcggagcggaagatcacaaaccgaaaagcctaaaccagcaaaaggcgaattaaaagaaaaggaagccgaaggatagaatcaatttctgaccgttatgcgagtcttgttggactcgcttgtgttgtgcctatctatttatggcatcgtcacatcacccgccacggttatgggcccaacaattagcccggatgatatctctgtagcccattaagtctattaagaaaaaataaaataaaaaactatttatacagatcgcccaccgtggggctcgaacccacgaccacaaggttaagagccttgcgctctaccaactgagctagacgggctttgttggttaagtattactctattcaattgtctagtagaaaaccagaaaagcattatccaaaaatgtgcaagtatggaccttaattggtgtctcgctgaggcctgcgggtaaaatagtgaaacacacgataaaccatttctagactgtagttatccttttttaaaagggtattgaattaaatgagaagatacgatgaatatctccgaatttcataggagtgaggacatcaaagaaaaaaaaaaaaaaatgtaagtcgtcggcttacgtgttcatacttggcttgaaagccagtacacaaagggattatgagtgaagtgtgaacaagcaatgatttgaatcataggaaatatagaagaaaacttggttatatggtatgagtaatatattaagtcacgccccaattattgttgcgtttgtcccctccctctccatttaatgtccacctacccctaccggcggtggaagctgcctgcattcctcgtccttcttctaaactactacccgttttcttttctttttttcctatttaaaactttcacggcttttttttctttttctttgtatagagtaaagattattgcaaaattcccacgtcttagatgaaaatttgcacctcataagactagacttgttcattacgtgttccatattctggtaggcaaatatttttatcattcaaactcttctataagtgatattaataaaaagcttgtatttgtttgtttttattggtaaatatataaatgaacccacgtcccctaaaggctaaagcaacattcagtaacagacggtcccgcacaagaacctcacaacagcgacagttacaaaacatatcatatatttcatttaaccttttcgtatatattactctttctagtcacattttcctcagctcccactgctcacagtattcacacgtcacatatatatatcttttatgtgttatatacccacagagaccagtcctaagaatcacatgtagatgcatcgctttcttttaatgctcttatttccctttagcgacaaccgtcccatgatgttcttcagatcattcatcgttttcttctttcttatctttttcgcatcaaatgtttcttcccgtaaacaaacctacgtgatccacactgtcacaaccagtaccaaacacatcgtaacttcactttttaattcactccaaacagagaatatcaacgacgatgatttttctctcccggagattcactatatttacgagaatgccatg

SEQ ID NO: 31040 - DNA, 3000 bp, Unknown; identical to SEQ ID NO: 10840
  misc_feature (1)..( 3000): 2750-1469P.txt file - cDNA_ID_3038148; gDNA_ID_2214452; Annot_ID_182598

SEQ ID NO: 31041 - DNA, 3003 bp, Unknown
  misc_feature (1)..( 3003): 2750-1469P.txt file - cDNA_ID_3038152; gDNA_ID_2214452; Annot_ID_182597
gtgagagtcctcaagcattgcctcgaagatgtagactcaataagctctttgcctgatgtgatcctccaagaaaacctctccttaattccgaccaaattcgccataagaacatcggtcttgtccaaacgatggaggcatgtttggtccgaaacaccttccctcgacttcgatgattgctataaactagatgttgattttatagacaaaaccctagctctctacagggctcgcaagattatgacttttgacctctggatcaccaacggaatcaatcttccttacattgatggatggatcaagttcgccatgtcccgaaacgtggagaatctgtttctgagtttcgattttcggttatatgatgttcctgattacttgtacatcaattcctctgtcaagcaactcgtccttgggacagaatcttctgaattgaatcccagatgctctgtttcttggagttccctcacgaagctttctttatttctctgatgagtccattgctaagattctttctggttgtccgattatcgaaagcttaacattgcatttttgtgatcaactgatggttcttgatctcaccaaatcaccgagtttgaaaatattggaaatccatggtagcatttggggttcggggccaaagcacattgtggcaccgcatatccattctctcacattgaaaacctctcaattctttatctacttttgttgatatctcgtctttaaccgaagctaaagtagacatttgcttttgctcacttaaagagataaaggctaatttccttctcgacacggtgctcaagtgtctttacaagttgcagaatgtagacaagcttacctttggggcaaactttcttaaggtatgtttttcatgttttcaagtgtcatttttcttattgagatttgtttcaaaaaaaaactaattgtctgtactatttgtaagattttatctctggccgagggccgcggtcttccttttccgatgttcaaggctaaagctttgactctcgagacaacgatctctaaatacgttattcctggtatattaagagtgctacaaaattcacctgaactaaagaagctaaccctacacacaatggatcgcgaggctagaactatgtcctttcactttgagtttgtagaatctgagatattgacaatctgtttttacattaacgaaattcttttttgttctagtacagggtgagtatgatcccacgtacttgcgttgcatgaagctggatcattgctcgatctttgcaaagatttcccgtcggaatgtagagtcaaagcatgtggcttcgttcatggaacttatgattaaaaccacaaagaaattagagaagatggtcgtaaggttggaaagttatcttgatggaagaggtttcgaagaattgcttgagatggttccaatgctttctcaaaacaacaatgtctccattgtgcttagctcaaccaagccgagacagagtctttagtcttgaattttattggatattttacataatctcattttaaaacaatagtaggtaaaaacattcaggacatttcttggaaaaactttttttgtttgaattattttcttaaagttaattttaaacttaatatgaggaagaggtagttaagtaatattctagttattaatcctaatccatcaaatattaattcataaggtttgttttcaagtttcaacagatagtttgatatagcattaattatcgcttaacaatgaatgccattacaatatttttgataatcttattttgagtaagagtgtctctcaaattttatttgtttaatattctatctcattcttcaccttagttcctcaagacatgaaacttttcatagattttatgaaatatcaatgatattattttttacttaaaatctaacatttacctccggtgtaaatggttatccattagatgaatgttatgaaaataaattggaggaaaaaatagagatgaaaatgctatagagtggatgaaaacttttcttaaatttctcttctttgttcatcttattaaagatgaaagagattaatactaacagattttaaactttcaatccaaatggtaacattttagatgagtctttttttcatccagttttttcctcgtaatatgtctacaatttcaagaaagcttatcaaacgtttagaatttggcaataatataatttaataattattcctaaacttttcataacatttcttaaatgttgtttacagccaacaaagagtaccttttaaaggtgtcttatgttcatgtttcgggtagattgtatcccaacaaagcttcaaaattgatccgacaaagatggcatcaatttgtttctagccaactctccaaactatcacaaaaatttatagttttcacatctttttaccattgattccttttgcatttaaggatcattataacaccaatcacaaattgttttaatgaaaaaaacagtttatgtcacaagttcccctcttcatagaccacaatgcattgaaacatatggattcactagctaaaagtctcatcatcatatgtctctctattggtttcaatatccatttataatcccaagaaatttatttacccgatttgggaacttaaatcattcatcaactgtcaaaagttgatgtcaacccctaaaaatacggtcgaatcagaaccgtcggatctaaaagtacataacatggcttcacttacgtaactgggccccacgttcccaccacttctctctcagacctaaaagcgaaaccaaagaacaaaaaaaaaaaaaagccttaaaccctccgaatctacacaacacaacactactctcttctctctctctccgcctccatattatcctccaaagaaaccataaaccaaatctaatcctctctctctcggtctcctccattacctaaacaaaccctttccaacacatacatatcgagagagagagagaccgaagtttccgagtctcgtaaccagatcggatccgaaagttccatactttaaaaagatg

SEQ ID NO: 31042 - DNA, 3003 bp, Unknown
  misc_feature (1)..( 3003): 2750-1469P.txt file - cDNA_ID_3038163; gDNA_ID_2214452; Annot_ID_182594
gttgcatttgttcacactcttcatctgaaatcatctccgagcatcctccgttcgtcagggtttacaaagacggtcgtatcgaacgtctttccggcaccgaaacagtcccggcttctctaaacccacgaaacgacgtcgtttcaaaagacgttgtctactcaccggggcataacctctccgttcgtctctttctccctcacaaatcaacacaactcgccgccggtaacaaactccctctacttatctacttccacggcggagcttggataaacgaatcccctttctccccaatctaccacaatttcctcacggaggtagttaaatccgctaactgcctcgccgtctcggttcaataccgccgtgcaccggaagatccggttccggctgcctatgaagatacatggtctgctattcaatggattttctcacattcctgtggatctggtgaagaagattggattaacaaatacgctgatttcgaaagagtttttctcgccggagatagtgccggtggtaatatatctcatcacatggctatgagagctggtaaagagaagcttaagcctagaatcaaagggactgtgattgtgcatccagcgatttgggggaaagatccggtcgatgagcacgatgtgcaagatagagagatcagagacggagttgcagaagtttgggagaaaattgtgagtccgaatagtgttgatggagcggatgatccgtggtttaatgtggttggatccgggtcgaatttttccgggatgggatgtgacaaggttttggttgaggtggctgggaaagatgtgttttggcggcaaggattagcttacgcggcgaagctaaagaagagtgggtggaaaggagaggtggaggtgattgaggaagaagatgaagagcattgcttccatctcttaaatccaagttctgaaaatgctcccagcttcatgaagagatttgtggagtttatcactggttaacattgttctttgtgtgacacgaataaattttgatgtaacctttgaatttgatttggttctctatataattatggttaaggaattaaatacaggaatgactcggttgtgactatatgagatttgtggtctaatattttattttattttttgttgctgacaaatagtaacacaatttagtttcaaatacgttttatgcatatacatgtatcataacaaacctcaaattgtcattgaattgggttcaaaggaatagatgtacagtttgacaaaaaaaaaaagaaaaggaatagatgtacaatgttattgatctaatttgtggctattagttattacaggctcagaatcaagaaggtaacgactggtgcatgcatatgtatacaagtactcacaagatggattgaggtcgggttattgtctggatacatttgtaataagagtttttggttatacaccatcgggtccacctctagtctgattaatatccaaatatggaaagcaatattggttaagcaacttgtgattttatcattttgctaaaaataactaatgatttgttagcaaaagtaacttatgatcatatcaaatttaaccaaaccagttcatatcaagctgtgtacttgtcagggtttgattggatgaatcagtgtatactcatacatatagtaaactcacatacatattactctgtttctgttcttcactctcttttccaaagaagatggaatctgatctaaccacagagcatcatctaccattcatccgaattcataagaacggccgagtcgagcggcttagcggcaacgacatcaaaccaacgtctttaaacccacaaaacgatgtcgtttcgaaagacgtcatgtactcatcggaccacaacctctccgtccgtatgtttctccccaacaaatctagaaaactcgacaccgccggtaacaaaatacctctactcatctactttcacggcggagcttacatcatacaatctcctttctctccggtttaccataactacctcacggaggttgttataaccgctaactgcctagccgtgtcggttcagtaccgtcttgcgccagagcatccggttccggcggcttacgacgattcatggtctgcgattcagtggatcttttctcattctgatgattggattaatgaatacgctgatttcgacagagtttttatcgccggagatagtgccggagccaatatatcgcatcacatgggaataagagctggtaaggagaagcttagccctacaatcaaagggattgttatggtgcatccaggtttttgggggaaagaaccgatcgacgaacacgatgtacaagacggagaagtcagaaacaagatcgcatatatttgggaaaatatcgttagcccgaatagtgttgatggagtgaatgatccgtggtttaatgttgttggatccggatcggatgtttccgagatgggatgtgaaaaggttttggttgcggttgccggaaaagatgtgttttggcggcaaggattggcttatgcggcgaagctggagaagagtcagtggaaaggaagtgttgaggtgattgaggaagaagaggaaggacactgcttccatctccataaccataattctcaaaatgcttcgaaattgatgcagaagtttttggagtttatcataagttgaatcttgatgctcaagtatggtattagatgacataatccttttatataatcatattgttaactttaataataatttatgattttaatcgtcaaatttcggagagttgaacatacaaataacttatgattttaatctctaattgctgtgaatttgtgtatcaaactcctgtatattcgataaatcattcgtataagattgttcggccatatcaataaccggttaggtccatacacatagatttcgaaatttgcacctccggtttaaattttcgaaccgaaccgctttaaaactcctcgcggtcggattaaactattcgcatccttaagcacagtctttgccggagaaaatattccggtagccatg

SEQ ID NO: 31043 - DNA, 3003 bp, Unknown
  misc_feature (1)..( 3003): 2750-1469P.txt file - cDNA_ID_3038177; gDNA_ID_2214452; Annot_ID_182590
ggtacattgggtcggatctcaatgggccgggttcggcttgggctctttactggcctgcccattccaagtcgggagttgagatatcttctgagcgaaggttcggagccaatatctctttagagcggaggagaccgcgtgaggctggtttcacagagcagcgtccaccttccgttctcgacggtggaaggataacgggcccgttgtcttccgagcccactatgacccattaggccgactccaactgagccatcacttttttttggatcatcagggctacaaggtacacaatttacttactcttaagaggaaaaaatctataactcttgtatttacatattcgttttttcagcttggaagtcggaactactaggttatttggatatgaaatcagttaaagactcattgatgtactacgccttcaatacattgttaataatgctattagttttcacatatattggtggctcatttgtacgacaatcataagagagcttcaaaacagaggagaagtgggagaagagataagatcaggtaccaattttctttcaattgttgtttttaagattgaaagttttgcttataagggatcaatggttgctagaatctgttacataaacattgaactatcacgcatacgaatcgttaagtaacttgacttatgttatgtctttgagtgattcctttttataatttacatcaatggcagattcggaggatgatgactagggtttgctagaggtcatggtgaaaaatggttttcagatacctcagaattaatgacactttaagcattgctattactcagatatgtcttctcttttgctctaggttaatgagtaatatatagcaaagaaatctatttttattgtaaatgaaaattaaaccccttttgtatgggtaatgggttaatgtaatttagttgagagtccctgaaaaagaagattgtcttctgtgtgcgtgtgtgtgtttaaactcttttgtactttgagaagaagattaaccaaagtctgagtggattgatcaaaaaccatcaaaccacaataaaaaatcgattaaaccaaattgttgcttgagttgagagttacttttatagtgtctcacatatggcaaatctgaaaatggaaaaaaaaaaaaaaaaacaaagaaacgcgccaggtaggggtcgaacctacgaccttctgcttaggaaacagacgctctatccactgagctacaggcgcttttttgaacaatagttattgttgataatatttaatcgtatgcgactttaggcgcagttgagaaaataaagacataatgtgtgtcacacattcttttacactgtaaccaaattagtacaaagaaacgtattctgtagacaaaaaaaatggcgtggtgcgatattcttgtagtttttagtttgaccgtatcttacaagttcatgtagttttagactttaaaattaaggtaataataatttcattagttaaataacagcctagaaaaagaagataatcaaaaaacaaaaagaagaaaagaatcttctattagattttgggttggctgattttcgagtcataaattatttcgattctcagctttcacccccggacttttgggcccttaaatttccaccatcaattttcatattcctcaaaattacatcatctactttcgaattcatgcttaaacatacatttccaattgaaccattcatttaaccgggattaaccacaaatccgcgtttactgtaccgcgattgtgattaacccgactaatacccagacccgttaagaaaacgacgtcgttttcatttcgtttaactcatcaaaaagagaaagaaaacgacgtcgttttcattcttcttctttaactctcaaatcgatttggtagtcctcttcttttgactttcatctctgtctccatcgtcttctagattgacgtctccatcagacgctatgtcaccatcgtcttctctattctcctctccatcagaagctctgtctccatctatcccgacgtcgtctccctcgattctggtggcttcgtcctcctcgactccgctatcaccactatcacttccatcgtcggcttcaatgtcactctctggaggttcgaaatcggggtcatctggatcgctttggtaaatcaatccttcctcccaccaattcttcatttctccctattcgaaacccaaatcgagacccaaaaattcgaaccgaagaagaaaaccccaaatctccttttgtctttctctctcaagaaccctaatttcacagtgtcgagattaaagaagaacgactaaatcgatttgagagttaaagaagaagaatgaaaacgacgtcgttttctttctctttttgatgagttaaacgaaatgaaacgacgtcgttttcttaacgggtctgggtattagtcgggttaatcgcaatcgcggtacagtaaacgcggatttgtggttaatcccggttaaatgaatggttcaattggaaatgtatgtttaagcatgaatccgaaagtagatgatgtaattttgggaatatgaaagttgatggtggaaatttaagggcccaaaagtccgggggtgaaagctgagaatcgaaatagtttatggctcgaaaatcagccaacccttagattttatgtcgtaataaaagcattatttgaagaaaaaaatcatatcttttggtttttaaaccccttatatagttattagtatgcttctaaggtaagaattgattttttcctatccatcctagagtaagagttgatttcttgttcaatagctagccgttccgttaaaaacaatggaatgaccggtttgggtaaggactaaccgggtttggcaaaccaaatgccgtaattattgcagacgtgtcacaatggaacactcagtggcttcttgattatatttttcgagtttcgaggatcaaacaattcaatcatcatcttctacctctgctccaatttctctgaaaacaagaaaaccttaatcaatcgaaatctcagtgtaactaatcaatg

SEQ ID NO: 31044 - DNA, 3003 bp, Unknown
  misc_feature (1)..( 3003): 2750-1469P.txt file - cDNA_ID_3038187; gDNA_ID_2214452; Annot_ID_182587
gaaatatgtttgttattgatgtggcgagcccacattttttctctacatcatttatttatttaattctactactgtctgtattcttaatattctaaaataataaccaaacagagaattaaatcgactaatcataaatatatatttcaaaattttaaatattgtcttatatataaagaagtttatgtataaatgcattgaattcatctattggaatattggtctgtcatcaactagataaaaaagctaaaatttataaaatatatgacttacgcaatttatttaatctttctcctataagtgttctaaaaagcggtttagatgctcggtgctcaagctacacataaaaaaatatctattagtgtattatcccaatttttaaatatgttttattttcatagacatagttataaacatttatttatatttttaatataaattaagtaaatgatttctttagttttggtttacaattttatattgtaatttctaatcgatattttatgtattttttaaaaataaaaaattacaaaaaaatttagacattttagtttatagtgtgtaaaatgttcaaagtatcaattgtatgtatacttgttttattttgaaatttaaaatagaaattacagagaacaaaaaatattttaaaatggccggtaaaaaatctccgttcgaatttaaatgtttcacgaataaaactatttttgaaaaaaacaacaacccgaatctcaaaaatagttttgtcaaaaatcttgagataaacgataagaatcgggtttagaatttgtcaaaaatagttttattcgtgaaagattttaattcgaacggagattgtttaccggccattttaaaatattttttattttctctaaataattttaaaataaaataattataataaaattgaaattttgaaatttttagacaccataaactaaaatgttaatacaattattttttatccaaaattagaaacttaatgtcatataatctaaaaaattaatagttaattgagatgataagagtaaaattggaattttatttttgttgtgagtatgaaaataacaacatttaattgtttgagtatttaaattgtacagttttattatttcatgtatttttcttccaacaaaaaataattagctattaaacgtccaaataaaaattagttgaggtattttttgggtttttacccgttttctaatgttaacaaaaaaaagtttggccgctcattgtttatctttacaaagagttagaacttagaaacatagggaaaaaaaacggaggtaaaatattataataagaaataatacttataaatctttactcaattttgtacgaaaacataaaataaaaagaaataagttgaataacaattttcaaatttcaaatgagttgttaccatagtaacactagtttttgaaaaaaagacatataatccttttgaaactaaaaaataattaaaatgccatttagatttcctaccaaaaatataaaaataaattacaaatataatctaagagaattctcaatatctcagattcacaataattttttatgatcccttttttttgttttttcttttctttgatcatcagaaattacaaaacccttaactatcatcaatatctaccatttgtcgcttttctagattgcctctctagccacatgtatttatttttatgaccacaactgttcatcttgaataaaaaatattcatattttcatattacaaactttttaccaatctcgagtcttcatctatttcatcctacacaatgtattttttcttcgagggagttctttccatacatgattaattatattttaattaatttccaaaaaaaaactttttctaggtctttcactttaaaaataacaatttttctctcatagcaaaaaactttttctttaacctattttcagccgtttttttatccgtccttttctgatcggagattgacggtcagtgtcttccatagcaccaacgtcgatcatcttttagtcttaattttcatgtttacttcgttttttattatgaatttgttgcaagtttcttcttcaaagttttatcgatgattctctcaaccttcaaccaatcgaccaaactaccatcaacaatcgttcttgtagttggtgttacggtaaaggcggcttcttttaagcttcctccattctaatcaacatacatatatgggtgaggtctattgtttttttattccttcaaacttgatgcaatcgatttaatatcgccatcatcggcccaagcacttttcggcagttgcaattccctctataatttggtttcgtcttgtcattcttatgtagctcaagatctttcattttcgaagtctccaaaaaataagtgaagactataaaaccgaaagtttagatgatgtccgttttcggagatgcatgaaatagcttctgattttagaaaaaattggttaactgaagaagaaagaagcaagtgataataattgtagttttgatgtcatttgtaacctgattatttggataatcattttctgttaattagttttgattatttgtcatctcgagcaataccggctttgtgtaatttctgttttcagttataccattaaataaaaaggtcttccactttttaaacactcatactatgggggttcgaacttaagcggaagtgacatactaacataagagtattttaaaacctctagaccatcaacccaactataaatatacgtggccaattcatgggctccgtcgatgaccataaaataacttgtgcattgactttgaagctaagccttaaaaaatcaaaacatatgtgtacattattcacattcctaatctcttacctaaacttaataaagcctcgtactgagagatcaaaacaaaacaaaacaaaacccaaacacttaccaaatcaatcaattatcgagaatcttccttcctttaatcctcaaaaaaaacaaaaacctttcttcacctcctttccttgattcatcctctaggttaatg

SEQ ID NO: 31045 - DNA, 3000 bp, Unknown; identical to SEQ ID NO: 10837
  misc_feature (1)..( 3000): 2750-1469P.txt file - cDNA_ID_3038195; gDNA_ID_2214452; Annot_ID_182585

SEQ ID NO: 31046 - DNA, 3000 bp, Unknown
  misc_feature (1)..( 3000): 2750-1469P.txt file - cDNA_ID_3038203; gDNA_ID_2214452; Annot_ID_182583
tgcattggtgtcccggcgaaaatgggagtctgcagtttcttgaaacatgtccaaatcccggagactgatgcatttgtgtaacagtggttcgaccgtcacagtcatacttaacaaggatcttggttcccaaaccgcagaaactagtggcgtttctcgagactccgtagccctccatggctctagagatggaagcaatgcaggtttcagataaatctgatgtgactccaagattagttgacaagttcgcgtaacgagccacggacaccgcaacaaaagcgttcatgtagcggcaacatttgcctctgttggttatgttggagcacacagtagctactagagtgaaatttgatccactgaaatctaatggacaatctgcaaacacacatgacaatgcagcattagtgtctggtaacctataaagattggtccgcaagtttcaagcttttaactttctaaccacaatagcttgaaaagaacaaacaaagtttgaatttttatggtttctcaagatctgatttcaatttaaaaagagagtatttttgcatgtaagcaactaatgaaccaaaattatgcgaatttccatcgaaactcaaatctagtcaaagaaagcaacaaaatttgcaaaatccagaagctcaaaatccaacattcataatcttatcctgatttaggcaagaacaggattaaataatgaagctttaaaagagaaagaaacagaggaaaatcgataaagagaaacctgcagccattagtgaaggcaattgggtagcaagtaatgcaattaatgccaacaagaaagcttgactattcacaaccatggccaagagcaaccagagagagaaagagagaagagagaacgagattataaaaaaggagtttaacggaaggtccctgtgtgaatatgacatgcgaggctctgtgtattgttttgtatactcactgacaagtgacaaggaaagagacaaattttagacttgtcaactattcaattcgtgatcataaacgaagacaattgtagaaaagcccctaactttctcatttcatctcctttctaacctacaagtttcttttatgcataacataccaacactaaacttgtgaatgttgaaggaaacataaaaaaatttgatattcagaaatttgtattagattagtttctttcctgtgaaatgatttggaccaacacaacaaaaatacatgattagtagtaggattaaaactgaaaacaaattaaaatggaggtcgcatgtttgtatcatgatgtctcatgccatttcgttaattattaacttttgtttgtttttattcgtttttttaagattataaaaacacacaaccgttgtatgattgtaatttgtaacaacaattgttaattcataattagtttctaagcaaatattctactttgtgataaaacgaataattatacctttgtctttatcttggagaagaagaaaggtatatattgcttgttaaaaaataaacaaacaagcatttatgaagtgtttggtgaagcgaaagcgacataaggataaaatggctcgagtgctttgggattgatcctaaatcatcccagttttagttttggatataaattctagaccgaattcaaaaacgagaaaatgagatggaagtagcaatgtgaacccaaatggaaatggtctacataacgttggtagggtcactcacatgtgcaacaccctgtcatatctcagacccctcaactgcaatatttttgtaaaggtttagatttattgtatgcaattttttcctacaacattccagtaatgccatgccatatacaaaacgtttatatggtcggtcttatgtaggcagggtcggcccgaaccttttttctgtatgtaggggttggatacggaatagatatcttataaaaagcaatatttgtgatccgttttgtaattaaggaatgactaataattaggtaattgttactaatcttaagctggttctagatgaatgattgtgtagattgtatgatagtcgaaaaggttacacaagttattgagtttgcaaattcataaaaggcaaaagaatcaaataagaagggatgtaaaaaatgtttcacgagtggttacaaatgtgagtgtgaattagagctgacgatttgggtccctacctacccaataaaaacaagattttgaaaaagaaaaacttcttgaaattctcgtccttgtgccaattttccatgatttgtaatttataacttcgagttggttcagacctatcccagacccaaactatgtgtgaactggtttaaggatattgttggcaaagtgggctatgattgggccggctgaatggatcatcaatggtttgtagaaggaatgtgaaactagttaaatggaaaaattgacgtgagaagctatgttaggaaagaaggtatgcaattgcgtgcaaacttttctaagtgtttgggctattgctatcatgccatatttgccttaacatcgtctaagcttcaaagccgtttcatctttctgtattagtaaaatgaaagaaaaataaaattctgtatatttgtttaagtcttttttttttcttatgtaaaaaacaattacaagataactcacattttattattgttgttgatatgtctttcccttataattgttgttgtgtaagaaagttccaggcagaaaaaggtcttagcattaaaaccaaaaaaaataagagttttgaaaaagagaccatgaaaaacaaaagtggcgaccaaaacaacaacaaacccactaattttgcagcatttattatcatcatgtcttcaccgactcacgcgcacttccgttcactctatttttatccttaaaatcctctcattgtatttactttattttatttgtttcttagaatctttttcacgcaaatgcaaaccaccaacaaatctatattctagcatgatgatgaagtagctacttgcttcttcttcttcttcttcttaaattttggggtttttactttttggtgaagacagccatg

SEQ ID NO: 31047 - DNA, 3003 bp, Unknown
  misc_feature (1)..( 3003): 2750-1469P.txt file - cDNA_ID_3038207; gDNA_ID_2214452; Annot_ID_182582
aaaagttttaagaagtttcgaaatcgttatgttgcaacttcatacctcagtcaaggataatagaggctaaagatagtagataattaaaaatgggccaacaaatcttgtgaaccagtttcttgatgtcttggaaaattatggaccgaaattctagcctgtattgggcccaatcttgcataatttaaaattagtcgatcgaacataactctttttgcctttctaactgtttttagtatctcttcagcgtgaaatgtgtaataacaatatcatctcttctattttcagtcagaagaaattgaaacatggtataccgaaatcagtttatgctaattcagaaggtaaatttttttaacagattggtaacgaccgttatttttggctttagaaggtttgactttaaaaatttgaggtacaaagaatttagctgtaaagactttggctgttaaaatcagattggtaaaacaaagttgtagaagctgtgactgttattttttattagtaacaataaaactttattactgatttttaaaaatatatattattcattcatttttaaaagaccaaacattgcattatttatatttattgtttcatgcacttaatatccaaacacttaatatccaaacacattaataattaaaatactcatcttgaatgattcttatggctaaatttttttctcaaaactgttttgaatgatttttttgacttatcataaaatcaacaaatttattaatgataatgaaatgacatctaactttattagtgttgatgataaaaaataaaattattattagtgaaatggatcttaaaaaaaaattagtaacttgataataattattaatcaaaaacgttttgaaaaaagaaatatgtaatttgtagagaacttttaattatgtttagagaagaaaacgaaaagcttttaatttgttttaaaagcctcatttacgtgactttcaaaaagaaaaataaaggaaaaagaaaaaaaaaagctttaaaaacttccaaaaaaaataaagtgaaaaaagtctgattggcaaaaaaaatactacaaaggctttaaaatccatttgaagccgtgaaagcagtgaagccgtgaccctatgaggttatgtcaatgttgtgataatgttgcctattttctttctctataaagggatagttatcattagttgaagaatgctaggatgttatgtaaataagaaagttaagcaatgttttcagtaaatttcttttagcacaaatttactatttttaagtgatgtctaatccaatttctttccaagttcaattttctttctctgcccatatctttacaaaccattatttttcggggtgaaactagttttgagaacaagttcgaacaaatggttgaaacttgagttgctttacggtatagtcaaatcatttgaaaaaaccatgttattaatttggaattccgactttctagtcatacaaaaaaaacaataaatgaaatacgagaaaagtagtgagtgagaaaagtgaaaatataatattcatacctcttgtttcatataacgttctaccaatcctcttgttcctgcatattaaaagtaactcatatcagaggagacatgttgtatcaaacaacaagcaacaacagataaacatttatctttttttttagtttctttttttaaaaccaagttgactatgttttagagcatcttcaatggtgagtttttaatattaattaatcaaaaataataatagaaaaggcaagagaataagaatggttcttattttaaagtatataaaatcttatttaaaatcccaaataccacatatcttagtataatgtcttaatatgatttgttcatttttatttatcacttaaaatttagttaaataacaaaattatatttaaataatattataatattgataagagacacttggtgaatatttcaccattagagatgctctttcttgtttgttgttacaaaataatacacccatccccaactatccttgaaaaatcactgatgttctctaatgaacgttctcacaaaaaggtaaatcatccgtaaatggccaaaaactccacactgataatcattattgataaacttttgctccgttcaattctcttttctaaatatgttatattatatattagtatttatttattaggaggttttgtcggcaacaaaaaaatagacaactctcgtaaataacaaaaataagttttcttatcaaatttagcacacaatcttcaaacttccaaaaataacatgaaattaatattaaaaagactaatataagcatttgattgataattcacacgatttgtgatttaaaatcataattaattttatatatttagataaaaataaattagttattatgtaaaattactaatgctaattttggaaatttgtgaagtttgtgttataattgtccataataaattttttcatgttattttaaagtatttctctataaaaagtaaaggttgggccaggtaaatgtacttattggactcaataaacaactcaaagatgattaaattcatatattttactatgaaatatgttttactataaaaaacagctcaaaatgctacatttcattattcctttctccatttcatttttaaaattcatactactcataaaagttcatagtatgactataagtttatgactagtttaactttcaactatctagctttcatatgattccctagttcaaagttatactactcataaatttagatactcatactatgaaatttttatatagcaaaaaaaaaattacatctcagtttgatatcaataactaaacatacctatgtaaaaacttacatagtctactacccaaaatatcaataattattgtagctcccactacccaaaagacaatgtccattgacttcacaagcttcttagtcttctctatttctatgctctaaaatctccttatatacatagtccccatacttatcctcaaaactcaccacaaaatctcatcaactcaatg

SEQ ID NO: 31048 - DNA, 3000 bp, Unknown; identical to SEQ ID NO: 10834
  misc_feature (1)..( 3000): 2750-1469P.txt file - cDNA_ID_3038211; gDNA_ID_2214452; Annot_ID_182579

SEQ ID NO: 31049 - DNA, 254 bp, Unknown; identical to SEQ ID NO: 490
  misc_feature (1)..( 254): 2750-1469P.txt file - cDNA_ID_3038249; gDNA_ID_1591418; Annot_ID_150961

SEQ ID NO: 31050 - DNA, 3000 bp, Unknown; identical to SEQ ID NO: 10851
  misc_feature (1)..( 3000): 2750-1469P.txt file - cDNA_ID_3038253; gDNA_ID_2214454; Annot_ID_182628

SEQ ID NO: 31051 - DNA, 3003 bp, Unknown
  misc_feature (1)..( 3003): 2750-1469P.txt file - cDNA_ID_3038268; gDNA_ID_2214454; Annot_ID_182620
ttccatcctcatgaatagtgttcaacccgttctctctggtatgtatattagctagttggcgcgagatggttattattacagtatcgaatataaaccgatatttgaaatattatgtgtcttggatcggttttaaccttaacaggagttgccgtcggagctggatggcaaggatatgttacttacgttaaccttgcttgctattaccttgtcggaattcctattggtattatccttggttatgtcgttggtttgcaagtgaaagtaagttttattttctttataattttctccttctttataacggtcttgaaaacaaaaatgtgtgaaagtaaaaaaattaacataaaaaaagttattctctaaattttcttagggcgtatggatcggaatgctctttggaatattcgttcagacttgtgtgcttaccgtcatgactctgagaacagattgggatcaacaggttataaatcgattactatgttttctaatttgttcctagcaagctatgtttttggtgcttattcttataccgtttgttgccaaatatattaggtgtcaacgtcgttgagacgtttaaatcggtgggttgtaccagaatctagagacgtaaaccaagtatcatcagaggaataaattggattctagattgtctttagcaccgtcacattttattcttaaaagctaaaatgtaacttttaggctatgttccaagattgtgaagacaagaatatgacaaatttgggtcgatttgatgtcctcgcaactaacttgtaataagattctaatgtttaaccaaaaaacgaaaacgagatcctaatttttggattaacactagatagtgttacatttagctatgattcatcaaacacaaaattattttggggtttataaccaaaaaaataaaaataaaaataaaaaatttactatttatgtgaaaagaataacaaaaattaaaatatttgggtgaccttctcaaatagtatagaaaatcacaccaattttattttgtactatttgagatattcatggtaagaaaccatagagcgatgctctaaagtctaaatagtgacagtttggttttaaaacatttaaaacaaatttgttgactaatagaactgaatttttttttgtctcatttaacaactgcaattgtaacatatatatatttttaatagaaataaattaacaaactttttttgatgatttatgaaaactatttaatgatataaatgtttggatactaaacttgaattatttctccgtcggctttgtttgaaaatatatagaaaaaacaattaacgggccatgtgcttgttgcaaataatctatttatttttcattttaggaattttgtttctcggcacgagttgggctgattttgataagcccacatgacattgttttagggtttctgtttttcttctttatactttttaaaacgcggccagtgaataattttctaaggtttatgctttaatcaatgagatcagttagagagagagatagagagttttgtacagaaaaactccatagtggttcatattcacaactttatccttcaagtccaaaaaatacaaaataatcttatgaagtccaaaataatacgcaatataatctttttttcactattgtcaaatttaaattttttgataaataatataccaaatcaaagatctctagataaggagttcaactttatcttcagaattctcaaaaactaatgtatgagatcgtgaaaacattctaatatatgtaaaattaaaaaatggactatattgcgtattattttgtatttttaggacgtataggataaaattataaaaatagacgattttaaggttttttttcataaaaccttttttttaatacaagttaaataatttttttgtaaataattttttgttggaatgtcaaatttattcaacaaaagaaaatgattacaaagagttttgaaagctaaaaaatagagaaaataaacgtgaaaagtagaaacaaaaataatggaattggcgccacttacatcattacagaaagttcaaaaggcctaattctgacacaatattattaacgggccatgggcttaatgacaataataaacttttctcacttttgagttttaataagcccacatttgctttagggtttctgcgtctctacctttaaattgcttccgacgattcataaactagggtttctgcctttagccgtcgtgagagagagagcaaatcgaagagagagcaaagagaaaataatatgttgtttgcgtttggtacggtgactcgatctgtggctaattcagtggtggtttgctacggctttctttcgacaatggtgttttctttcgacctaaacttgatagaccgaaccaaactgaaccaatttttatatatatttactcaattaaatcctaaactcctctatttgatctgaacccgatcaacccgaatacataaatatctaatcttatccatctgaaaggatactaaactctctaattcgaattacccgaatccagaaaaagccgaatagcatgcattctattggtacttgattatattaattggcatatatatgacctgttattgccaataatatattttgggtgtttcctgggcttcagttttattgggctaggaatgggtgtacttttaaacccacttctgattagtctcttagtaaaacccacttttaaacccacttctgacccacttctgacgccgtcatttttcttgagaaggagagagagcaccacttccgtcattccagcccaatatttttaacgggccatgggcttattgtaaataatgtatttttctcatttttggttttctttatgggcacgattttagtgggctgaattttgataaaggcccacatatgaaagatatttagggttttttctcttgataccttttaaaacgccgtcgagaaatctccctctagggtttctttgatcaaaccagagagccgtcagggagagcaaaacaaagatcggagaagatg

SEQ ID NO: 31052 - DNA, 3003 bp, Unknown
  misc_feature (1)..( 3003): 2750-1469P.txt file - cDNA_ID_3038272; gDNA_ID_2214454; Annot_ID_182619
tttttttctacaattatttattaaaatttaaatgccaaattggtatcaaccactaatttgggtttaaaaacaaatacatatctttgttggatcagaagaatagttgtggtattgaaccgttggattgaaccagaatgtaaagattaaacgagacttcacaaacagaacaaataatatttgttcgggagaattctctaatctatataacaatatcttaaataatttaatttcttaagtctttctaccaatttttttttttacaaccatatttcattaagaaagttcaaaggactactacagagggaagcccaattactacaatgaaaatacaacctaagttttaagaaaacctagatgctgacacgtgttgaagtcttctgcttcatcaagccacgcatcagttgatcgagcgctgccgtgtttttctcgccaaacatcaccgccttagatcagccaccgtcgatccgtcgtggagcgatgggtggttgcctcctgtctgacgatctcgaacccaagccgtaaacgccgagaacctccagatctatcatatggtatgcttcaagagttctccgagcaaatccaactcctgggaagttccatcacagacaacacctttactgatgcagtcgaaacattgctccaaattcacgaacaaagaaagataatgaagatattactcctcgagatgattgggaggatcggatgaacctcgaggggcagttggacaagagattagtctcgccgtcgcgagaaaacaaaaaccggactactctagtagactgacatccgactagaagtcgaaaacttatttaaatctaatataaatctatatctactaaatcaacagtcactttatcacaaactgcaacattctcctgtttacacgtaagcaaagtcttaatttattgagttttgatttttctgaagcgtaaaacaataattcttttctcattaacataaattattaaagagatttaatccataatttatttctttctttctcgccatcttcatcactatcttccccattccccatatcttgcaacagttattgctaatttatgttgtttcatcttctatgcaattttctaattacgaatctcaaatttttcacattcggatcagttattttcttttccgcctgctttacaccatgacgccatggcagattaacaatccttacattttttttgctgcttgccattctcaaaccaaaattcatctcactctcccttctcattcgaggtcagttatggctgaagaagaggtcaaccacaacgactgtatattcaattaaggtatcaaatttgtaaaatttctgaattattataattttcagttttccatatattgttttggctttcagttttaacatcattttctttatactttgtgaattattacaattttcatctaatcacatctcattgttggctattaatgttgtcaagagaaagtgtttgagaatctgactttaagacgacatgggtttcgttttcaggatcccgtgtgaaacattttcagaaaaataaaactcttacacgatcatgagtcatgactaacccaatgacatgctaaggttatcaattctcaattagttcttcctttattttttatttaaaaaaatagttgatcttatatttttaaactcaaatatagtgctagacaaattgactttttgattttgtgaaatcacagtaaaacaaaaaacgaagccatacaagcacaagatgtactgatatacactagagaaaaccaaaattttttcagttttaaaatggtgatatagatgaacacaagagtcatatatctgaaaagctgagactatacgacaaaggaaaacagaaacagaagaaaaagatatccataaggttgtaaaacatgttttctcatgcaattgaatcttcaatagaattggattgattacaaatttatggaccattggatttttgttatgctagaatctttagaactttggaaatttcgagttatgaggtttagaagttaggcattattgaaattgtacgacgaatagactatatagagaatatatattttattttttattttttgggcaaaaaagaatatgcttttacctgtttttctaaaaaaaagttatcttacacaggacacactaaagataacgctttcaaacaaaagaatttattttttatcaaattatttttgtcccgaacgtagtccaggcttcatactagtaatatttataagtccgaataaatccgaaaataaacccagacgatatagagcctcttctctctgaaaaattagaagagataaaagaaaagaaactctcttgtattttgcaagattttattttcggtttaacggaaatcgcctgctccccaaaaaaaaaagagtttttttaactgaaataagtctttctaccaatcttgttagcagaaaaatgtgacaatagtagtagttcgatacgctcgtgacttgattcttgtctttttatggtttatggtgtagcaaaattaaataattgttagtttttctattttattatataaaacaatatagaatgatttaattattttatttcttagaatgttttataagtttcaactttcaatacatgactatttgtattttataattggttgaatcaaatatcaaataataaatttgtttactaaaacattattatatattttctatattatgaaacataggtaggtttgttagtcaaaataaatggtctataaaatgcaagatatcttagctaggtgtctataaaccactcactgctacttgctgcttggcgtagacggcttttcgtttcccaataaaaatgacgatttttaagcaaacaaaaaaacattaatctataaagacaacaaaaaaaacagagttgttctcataaaccaattcatacacaaacactctagtctcctctctttttctctgccttctctcttttatttattccctccttccctctggtcctccatcagatacaacaacagagactccaagatg

SEQ ID NO: 31053 - DNA, 3000 bp, Unknown; identical to SEQ ID NO: 10515
  misc_feature (1)..( 3000): 2750-1469P.txt file - cDNA_ID_3038276; gDNA_ID_2214454; Annot_ID_182612

SEQ ID NO: 31054 - DNA, 3000 bp, Unknown; identical to SEQ ID NO: 10515
  misc_feature (1)..( 3000): 2750-1469P.txt file - cDNA_ID_3038276; gDNA_ID_2213656; Annot_ID_181775

SEQ ID NO: 31055 - DNA, 3003 bp, Unknown
  misc_feature (1)..( 3003): 2750-1469P.txt file - cDNA_ID_3038294; gDNA_ID_2214456; Annot_ID_182663
tcttccctttcggaattgcccaaatgaagctgccaacaatgaccttttaaggaggcaaacacacatagttaagcataagaaatctaaattcatctaaggaatttgataacaagcgtaagctcacctggacttggcttgctgctattagaggacctccaattccaccaccaatgacacgaccatcggggctagcaagtgagaccgctagacttccagtgcggtttgggtagtcattgtcagttgtgttcagataagaagttgagagagatatgagctcgaatagaccctataagtttcaaagtatacaccaaaataagtaatgtttttgtcttctaaaagataataaaatgtgagtgatgattcaataaaacctcgtatataatagttccatgagaaggtgctggctgaagaagagttgcagtagagacagcaccacttgcggataagacacatatcgctcgtggaccttgatgcgagaacgatataacctttgaagcaatgtcctgaaagcaacaccgagagtatggttatctcaagaactagaggcaagattacaaagaaaaaaaagaacagatttattcaagaggagacagaagaaacatacttcaccaatggaaactacgattacatgcggtgtgaagctcatcccagttgatgaaggcatcatttcaccttacaaaaaagaatcaaatgtcttcagaaaaatcacagctaattgtaatcagggagaaacagagcaataacaaagtttaagagaaaggccaaggaataataaaagaataaatattgaattcaacaatttgacattataaaattccacagctttaattaatccttaacagttcgaattagcttataataaacttcccaccaatgtcctcatttgaaaaactatatcatcaattaagctcaaaacttcccaccatattcagagccaatgtccttgtcggaaaataaaactcataagttagagattagggatattaccaatggaagatagccgttgcttcttgccggagccaggaggtcttccacggccacgtttgttagagttcggggaaacgttggagatagaaggagacaatgccaacgaaacagaaccaccatcttgtccatattttctaggccgtcctctcttccgcttcacagacgtgtcacctgaaggaggagcaaccaaagctcccgccgccgccgctgacgaatcagccggagaagagtcaacgggtaaaggaggagacacgaatccagtagagacacctccagggtttggatttgggtttgggtttgacccaaaaggagagatggaattggtgaaatgatgaaatccttgtgatccgtgaaacgttggttgagtttgaggaggaggaggaccagaaccggggattcctctttggatatagtaagaacccgacccggataacgccattgcgtctcttcgatccatagcttaaccaaaaagactctgactttaacttagtaaaattcgatggggaccctaaatggctaacttataggaggagggataagaagagaacaaaatcagaatctaaaagggttcgatagacttcaagagcaagataacaacatgcaaccgaaaatctctgaaaacttatcaaaacacacaaactttcatttcacctaattgttttttatgtagctttagtatcaagctatgagaaaatctcaagatgaaattagatccaaaagagaaaaggaaagaactttaattttcttcatctcttcttctctgtttcattctctcaccaaaagcaaagaaatgaagtgtgaataagctttctcatccatcaatcaacaatggtgaagaaaaaaaaaagttttctagggttctctctctttctttcttcagagtgtatgtgatgttgctttttttcttttactgggtgacagagggaaaacagaaacaaacaaaaaaagatcctttctccaagcatttactgtggattacaatacaatgggatgatgaggcaggatttcaaaattcgaaattaaatttgaagtctctgacttttgactgtgatataagctctctctctatctctctaatagacttctttctagcatctagcaatttgtaggagggatccatccatccatcatcatcatcatctttgtgtggctcattctcaacgctatagattaggtgcgtgtatcaaacgaagcattgggaatgagagagtgaatctcacgcttctgatgtcgagagtgagagaatagtgatgtgatctagtcaagactttctttgttcctcactggcttccacttcatcataagctttcaaaatttatgaatcccccaatctatctttagactctattttaccataaatacttgagactaatgattatatattggcattaagagacatataacatgaatataaattcccattttgtggagtaaatattgttcttgtctctgttctgttcactttaaatcttcatttttctctacaaacaataatcattaggacccaagagtttatcaacaatacagaatctgaacgtttagtactcatgtcatgtgaagtgaagtgaagaagatcaacaagaacattaattgtttgctataatcttctatgggccggataggaataattaggcccagtatctaacacatcaaacaaaaacacatcgaagtcgaatcgtcggtgggataattaggcccagtatattcaaacaaaataacatttaacagatccaagtccaatgttgtcgtggaacgaacgtcgtttagaataattaagcccagtatttaacatatcaaagcccaatgttgtcctaaaacgacgacgtttgaatgtggaacgtaaacaatcctggaacaaccgtttcaactacctttttcctatcacttgttttttcacctctcgaagtcctccgatttgctacccttacgcagcctcatgtgtcaaccaccatttctcttcttcatcttcgtctctatcaaaccctaaacctaaaaccccttattttcccgccaatg

SEQ ID NO: 31056 - DNA, 3003 bp, Unknown
  misc_feature (1)..( 3003): 2750-1469P.txt file - cDNA_ID_3038306; gDNA_ID_2214456; Annot_ID_132950
acgcaagcttggacattgtcttccctgattggtccttttggggctggtaagcagcccaataagatgataaaaggcttattgttgttactgatttgttaatatttgggcttctaatgagccagggctgaagtgaacgtaaaaccatgggggaaatcgttggaggcaataaaagaagggaacagtatgacgcaatggaaggaccgcgtggcgtacgcttattggagaggtaatccttatgttgatcctggaagaggagatcttctcaagtgtaatgctacagaacatgaagagtggaatactcgtctctatattcaggtttctcccaaatttcactttccaaaagattatgatataaatataagttttgtgatagattatctgaatttgaataatgttgcttttaaaggattgggataaagaaacaaaagaaggattcaagaactcaaatctagagaaccagtgcactcataggtaaaaagaaagaaagtattactatactttttattttatttttaattactataagtcttcgattcttcttttatggaattaaaacagatacaagatatatatagaaggatgggcatggtcggttagcgagaaatacataatggcatgtgactcaatgacattatatgtaaaaccaagattctacgatttctacatacgaggaatgatgccattacaacattattggccaatcagagacgattccaagtgtacttctctcaaattcgccgtacattggggcaatacacacgaggacaaggtccatatatctaactaaagatttcttacatctttaatctttacgtctgatttgtatcaatttaaccctgtgtttgttgttgtgtataggctcgtgagataggagaggtaggaagtagatttataagagaggaggtgaatatgcagtatgtgtatgactatatgtttcatttactcaaagagtatgcaacactcttgaaatttaagccggagattccgttagatgcagaggagatcacgccggatagtatggggtgtcccgcgacggaaaggtggagagattttaaggcggagtcaatgattatatctcctagtgaagagtctccttgtgagatgcttcctccttatgatcctctagctttaaaagaggttcttgagagaaaagctaatttaactcgtcaggttgagttgtgggaaaaccaatactttcaaaatcttaccaacaaaccttaaattgttttgttttttccttcttcgttgacgagatcaaccgcaaccaaatagttcagtcgtgggaggatcaatactctcttgatttgacttataaaccttgatttttttttctatcatcattaaccatttgtcgaatatacttttcaaagtatactttgtttatggtcttgttatatgctcatctcattgatccttttaaattagattatcagaagagatatgtaagtctttcgaatacatctacattctagctcgtatataaataagaagaagtgaaaaaaatttaaacgatttttggcatgaagtgattttgttgtcaaagtgaattaaatacagaaatttggagggcactattgttatattaagataaggtgggaactagtcctaaacttggcctatcatggcaaacctttttttctaatatcctgccaatctttttgaccaattgaatattctttttctttcttagaaatttcttaatcattcatctcatctcaactagaaagttttttttttcaaaagtaacttataatttctttcattgttggtaattttgtgagatcactcgggctccataagtctgtttcattgacaaaaagaaacaactgtaagaatattttctcccaaaattaataaattaattaacatggaatatatatacgtaggtgggttgacttgacttagttaggctttggctatggttctccttaaagcctttataaaataagccagcactaattaaatatcagtcatgatctttttaaaacacatgctgaaaattgtttttttttaaaaatcaaacatataattgtactaatttagacctccaaacccttaaatcaacccattttctacctcataaaagagatccatgataagtgagctctgcttcatctctttctagttcttgtgttcttgttgtgttttgtccgatgagagagaacacacaagtggctcaattcacagaagatcatcaccagagacatcaaaccccaataacttgtttaagctctaaactagcaaagatatggacattgttcaccaccaaaatcttcatcttcgtcctcttcatcatcctccttagtgcttctgtctcttggatgtatgcggtatatatttttctctttctcttgatccaccagtcatatctatatataaacctctttcttttggcttgatgataaattatacatataacaatatctcatacgacacgttaaagagaattatatattgtaaccagtgtgtgtttgtttgttttctctactctttaacccatttaaataatttcatattttgctacttatatacttgtattccgaagttggatcttaaattattttacgtggtgtcgttaaaaagtttgttttaggtgagaataaattccaagtgacatcaatattcacaagaaacaccaaaaaaagcactcccacaaaaacaacaacaactacagatatccccaagatcgccatcaagatcccattaaactgcacatcactcaacagcaacacaacacaaacatgtccttcaaattacccaaccaagttcgaaccagcgatctcttcctcggagacatgtcctgactacttcaagtggatccaccgagacttaaaggtatggcaaaagacagggatcacaagggaaacactagagagagcaagaccaaatgctcacttcaggatagtgataaagtcagggagattgtacgttcatcaatacgagaaagcatttcagacaagagatgtgttcacaatctggggaatacttcagcttctaaggatg

SEQ ID NO: 31057 - DNA, 3003 bp, Unknown
  misc_feature (1)..( 3003): 2750-1469P.txt file - cDNA_ID_3038306; gDNA_ID_2214456; Annot_ID_182659
ttttttgttatcttcatacttttgtgttgcgtttctgttgattctccttttatgtatcctctcggctctctcgttaatcttttattacataaactcgtgcatcaacataaacacaaaacagaagcatgaagatgaataacaacgacggccaacataataaaacggtgacatttcctcgaaaaagcatcgtgaaggctactgttttcatcgtcgttctattcatttcagctgctatcttagacttactgggctatctcgatttcgtgggttttaatatcaccttacattcttggtttatctttaatataaatcgcagtagttaacgttaatcataatcataatttgtcttattgttttgttttatagaatgcttttgcaggtttaaagctaacaacaaagacaaaagaaccaaatccttacggatgcgacttcgtacagaaccaatcaagtcaaactcctatctcacaaaaccgcaaatcgagattaaaccccaacaacagttcaaaatcatccacgtgtccttcttatttccgttggatccatgaagatctacggccatggaaacaaacggggataactagagggatgatcgaagaagcgagtagaacggcgcattttagattggtgatccgtaacgggaaggcgtacgttaagagatataagaagtcaatacaaacaagagatgaatttactctgtggggaatcttacagttgttacggtggtaccctggtaaattacctgatctcgagctaatgttcgacgctgatgatcgtcccgtcgtccgatcagttgactttattggtcaacagaaggaaccacctccagttttccgttactgttcagatgacgcaagcttggacattgtcttccctgattggtccttttggggctggtaagcagcccaataagatgataaaaggcttattgttgttactgatttgttaatatttgggcttctaatgagccagggctgaagtgaacgtaaaaccatgggggaaatcgttggaggcaataaaagaagggaacagtatgacgcaatggaaggaccgcgtggcgtacgcttattggagaggtaatccttatgttgatcctggaagaggagatcttctcaagtgtaatgctacagaacatgaagagtggaatactcgtctctatattcaggtttctcccaaatttcactttccaaaagattatgatataaatataagttttgtgatagattatctgaatttgaataatgttgcttttaaaggattgggataaagaaacaaaagaaggattcaagaactcaaatctagagaaccagtgcactcataggtaaaaagaaagaaagtattactatactttttattttatttttaattactataagtcttcgattcttcttttatggaattaaaacagatacaagatatatatagaaggatgggcatggtcggttagcgagaaatacataatggcatgtgactcaatgacattatatgtaaaaccaagattctacgatttctacatacgaggaatgatgccattacaacattattggccaatcagagacgattccaagtgtacttctctcaaattcgccgtacattggggcaatacacacgaggacaaggtccatatatctaactaaagatttcttacatctttaatctttacgtctgatttgtatcaatttaaccctgtgtttgttgttgtgtataggctcgtgagataggagaggtaggaagtagatttataagagaggaggtgaatatgcagtatgtgtatgactatatgtttcatttactcaaagagtatgcaacactcttgaaatttaagccggagattccgttagatgcagaggagatcacgccggatagtatggggtgtcccgcgacggaaaggtggagagattttaaggcggagtcaatgattatatctcctagtgaagagtctccttgtgagatgcttcctccttatgatcctctagctttaaaagaggttcttgagagaaaagctaatttaactcgtcaggttgagttgtgggaaaaccaatactttcaaaatcttaccaacaaaccttaaattgttttgttttttccttcttcgttgacgagatcaaccgcaaccaaatagttcagtcgtgggaggatcaatactctcttgatttgacttataaaccttgatttttttttctatcatcattaaccatttgtcgaatatacttttcaaagtatactttgtttatggtcttgttatatgctcatctcattgatccttttaaattagattatcagaagagatatgtaagtctttcgaatacatctacattctagctcgtatataaataagaagaagtgaaaaaaatttaaacgatttttggcatgaagtgattttgttgtcaaagtgaattaaatacagaaatttggagggcactattgttatattaagataaggtgggaactagtcctaaacttggcctatcatggcaaacctttttttctaatatcctgccaatctttttgaccaattgaatattctttttctttcttagaaatttcttaatcattcatctcatctcaactagaaagttttttttttcaaaagtaacttataatttctttcattgttggtaattttgtgagatcactcgggctccataagtctgtttcattgacaaaaagaaacaactgtaagaatattttctcccaaaattaataaattaattaacatggaatatatatacgtaggtgggttgacttgacttagttaggctttggctatggttctccttaaagcctttataaaataagccagcactaattaaatatcagtcatgatctttttaaaacacatgctgaaaattgtttttttttaaaaatcaaacatataattgtactaatttagacctccaaacccttaaatcaacccattttctacctcataaaagagatccatgataagtgagctctgcttcatctctttctagttcttgtgttcttgttgtgttttgtccgatg

SEQ ID NO: 31058 - DNA, 3003 bp, Unknown; identical to SEQ ID NO: 26880
  misc_feature (1)..( 3003): 2750-1469P.txt file - cDNA_ID_3038314; gDNA_ID_2214456; Annot_ID_182654

SEQ ID NO: 31059 - DNA, 3003 bp, Unknown; identical to SEQ ID NO: 26883
  misc_feature (1)..( 3003): 2750-1469P.txt file - cDNA_ID_3038318; gDNA_ID_2214456; Annot_ID_182652

SEQ ID NO: 31060 - DNA, 3000 bp, Unknown
  misc_feature (1)..( 3000): 2750-1469P.txt file - cDNA_ID_3038321; gDNA_ID_2214456; Annot_ID_132943
ttagtatatttacctgtgacgtcgattttcataatttacagtttttttttctttttcttgcattatattgacacatatttgagataactaaagttattatatttgtttggaacaaaacgttaataaaggcaatttgttttcgttaataaaggcaatttgtttggaacaaaacgttactgatgatagttatcatatttgggcgatggttaattacaaacttacaagttattataatttattttagagaatattatattgtgagacacttttaaaaagttatttgtcgatttaggcatttttaagttatgagacacttttgttagacaaaattctcgatttgccctttaactatatctctcctacatttacgctaacaattcttcttattataattctctctctttctcgatacaattcatctctctctctcttccccccctccaattcaatccatctcccccaattcaatccatcggttcacggtaatttcacaacaacaaaacaaaatcttttttcttttctccttcctcactccaaaaacaaaatttcacaatcaatcaattgttgtgaaccaagcttctcgctcaaattgattcttcatatcttctttcttatggcgacatgagttagaacgttatcgaccgcttgatcaacatcaccggcgcttctgacgtcgtcgtcgttcataaactcaaggtgatttgagtttactcatctccattcatgtttacttttgtcttgcttcgtgattcttcgtgtttttgaggtgtcatagtctggttttgatgttattggaagtttctagaatcggtatagtggaaagtttgatgtgacgagatgcaggaagtttcaatgttgcagaaatttgaaaaattgttgtgagattgtggatttgattgattgtggaattgaaattgtttggaattgaaggtataaactaaccttaactcttatgatgaaattagattgatttgaacgatttattcagactttgattttgctagtggagagtattagcgtcaatttacacatatatagtatttgattgagacacatttatctctttaggtttgatatggaggagtgaagtgcatcccttgatttttgtgtggttatttctcctataaaactaaagattaatggtttggtttactaaaagcttccaagtgtttggtgatcttgttcataattctatgataatgttagataacttctctgccccgtttgtttgaaattcagtacttgatgttctctattggactacaacatttggacaatccgtaatggacaaccacgtattttgtttgcagcatatgtgtctataaacaagtgatcaacccacataacgatgagagtgtctataaacaagtgaactagtggtcaacaaaaaatggacgctactcgtgaaattggtgatattcattgatgtatgaacttttgtgtgttggtatgatttgttttgaccaagttgtgattcttgcatcaccaatgatactcttattcattcaaattataattgatgaaagctctaaacatgaatcatttgtgttcaagtgtttgtcatgtttcaccattactccatatggtcaagtttaagtggatgagttatcatggacacaaactatcattatctacttggatttagcgtgttgatgtttgaaagtaatgtctacagattgttcttgtgttttggagacctatatgattattagtttctacataatgaaatcgtgttggaagctttgataataacatgtccacttagacgtgaccatgtggaaataattgattctcgtatgcaaagtaaaatactcttaacttagaagttcaacgatattatcaatttatcgagccaaaatcatatgataccaaacaagctgatcaaatggatataaaattcaatactggaattggccaatttggtttattcacaacctggtggttcatgaaatcgaaaaataaattatttaagagcaaaaacagaaaacgatagaaaaacgaagaggatgtgaatatgtgatgatattaccatggcagttctttaaatccaacagatcctctcttataaaaatcagattcatattctgaagttggtgatctgaaaaattctccttaatcaaagcagacacggagaaatcgggagatccgattaactggaaaaataaagttgaatctgattgttcaatcaatctctctttttgtagaaagctgatgatttgttgaagaaggaagaaagaaagaagttgatgatttcttctttgcaaacgttcaacaacttttttctctctttaatggcgtaaaaaaaatgtaaattttgaagatttgttttcttgattttttatttttgataaagcgagagaaagagagagaatggatacgaaaaagagagagacaaaatctcaagggtaattttgtctattttctcaccaaaaacaagataaagtgcctaaactcttaaaagtgtctaaaacggaaaaacatttcttaaaagtgcctcatagtgtcacattccctttattttattattattctattcgatttctagttacttcaagatttttccagttgttaatctgaactgaaatttacttcaaaaaaagctgtatttatttagtacgtagagtttttcatgtatgattttagtggagtttattatttacggacaaatctgtaacgtagttaacctatgcgataatcgttatttccttcaattcggtgaggaataacaataaaacatgttcttttatagtggattgcggcataaatgcgatgttagacgttatatttctgtaaattcgacatcatctttttctagcatccttatcttcaaagaatataaagacttaagacctaatctagttgagtaaggtatgagattcgagttttttcttttccaaattttcgtgactactataagtaatattaaattatgaagtgaaattgtaatctatcaaccaaaagcaaagaaagagagggggaaaaaacacaaggaaaaaaatg

SEQ ID NO: 31061 - DNA, 3000 bp, Unknown; identical to SEQ ID NO: 31060
  misc_feature (1)..( 3000): 2750-1469P.txt file - cDNA_ID_3038321; gDNA_ID_2214456; Annot_ID_182651

SEQ ID NO: 31062 - DNA, 3000 bp, Unknown; identical to SEQ ID NO: 10859
  misc_feature (1)..( 3000): 2750-1469P.txt file - cDNA_ID_3038325; gDNA_ID_2214456; Annot_ID_182650

SEQ ID NO: 31063 - DNA, 3003 bp, Unknown; identical to SEQ ID NO: 26889
  misc_feature (1)..( 3003): 2750-1469P.txt file - cDNA_ID_3038346; gDNA_ID_2214456; Annot_ID_182641

SEQ ID NO: 31064 - DNA, 3003 bp, Unknown; identical to SEQ ID NO: 18341
  misc_feature (1)..( 3003): 2750-1469P.txt file - cDNA_ID_3038361; gDNA_ID_2214458; Annot_ID_182716

SEQ ID NO: 31065 - DNA, 3000 bp, Unknown; identical to SEQ ID NO: 7186
  misc_feature (1)..( 3000): 2750-1469P.txt file - cDNA_ID_3038365; gDNA_ID_2214458; Annot_ID_182711

SEQ ID NO: 31066 - DNA, 3000 bp, Unknown; identical to SEQ ID NO: 28240
  misc_feature (1)..( 3000): 2750-1469P.txt file - cDNA_ID_3038448; gDNA_ID_2214460; Annot_ID_182729

SEQ ID NO: 31067 - DNA, 3000 bp, Unknown; identical to SEQ ID NO: 26894
  misc_feature (1)..( 3000): 2750-1469P.txt file - cDNA_ID_3038455; gDNA_ID_2214460; Annot_ID_182726

SEQ ID NO: 31068 - DNA, 3000 bp, Unknown; identical to SEQ ID NO: 10906
  misc_feature (1)..( 3000): 2750-1469P.txt file - cDNA_ID_3038487; gDNA_ID_2214461; Annot_ID_182782

SEQ ID NO: 31069 - DNA, 3000 bp, Unknown; identical to SEQ ID NO: 10898
  misc_feature (1)..( 3000): 2750-1469P.txt file - cDNA_ID_3038491; gDNA_ID_2214461; Annot_ID_182779

SEQ ID NO: 31070 - DNA, 3000 bp, Unknown
  misc_feature (1)..( 3000): 2750-1469P.txt file - cDNA_ID_3038501; gDNA_ID_2214461; Annot_ID_182771
tattttaaagttggcgataaaatgatgagagagatttaaatgcgccattatgcattaattaatacaagaatctttatgggatcatgtgcatttccttaatctaatcttttttggtgacagtgtatcagatgccaacatgtatttgaaacaattttttataattatagtataattgtagtgtagctacgaccaaacaaagaattacccgtaaagaagagctggctatgtggccatgtgcttggtgcttcaatttccttataaactactcacttctaatggaaaaatggctcagaagaatatcaactaaaagtagataagatatattgtctttaagctacatacaagttacaacgatccatttattagtgatagcgttatcattttatttttatactattgtaaatttactagtaaactataaatgttatatacggaatgaacgtttagatatctaatatatttcctcaaagataaacactttcaaagagatatatccatggaactgggtattatatttgtatatacgaactttactaataagtaataagtatatttttataatcgatatatacgtaggctatagtgggaaatataaaattctgggcataaatatggctactaaaattttaacattaaacaatgtacacgaaattgtttagaattgttatgtatgctgtaagttccaacgaaaaatacaaaactatgagcaagataatatatataaataaaagaaacgatgatatatcatttgtaagcataagtatacatattacttttctcttttagtgttatattagtgtaaataaaatatagtgagaaaagggaaaagagagaggggatgcatgtgactggcacgacatgaaggatagtggttcgatgtttggactttgtttaagtgttagcaaacgatctttcgttgccatttcacgttgccacatatatttttattaccttttcattatttttaatttattttgtcaacggtcgaattacggtattttatgtacacatatatgaatatatgataataccaaaaactcaagttggactttgggaccgactttcgtgagggatcttcctattgagtgaccacttctaaattgaaatcataaattctattaccaaaaaggtcgagactaatgcttagattggtagatgcatacatatttcccttgatatgacatttaaactctcaatccggcttgattagctcgagtgaaagagtatcaatatatagtttagttatatattttaaaaaatgttcttgattatattttatgaaaaatggatgttttcttatgaaagttttagtttcaaattttgtttgccttatctttgttactcggtatatatattcaaagcgtgtaattacatagattgataccttgatcgtttggataggttaaatatgtgtgtgaatgtgcttagccttgatcgtttggatatgttgttgtatttgcgttaataaagtagttaaaaaaaatctatataacaagagaaaaaatgtaggttctttgagtagatttgtgaaattattttccgattgtattgttcaccaaatgatcctccactttatttgttcaagtaaatgatcattctgctaactataaacaaaaaagaaatgttcatgggataatatctcttgtcgaaaaaacaataaaaaattatatgaaaactattttttttaaaatcctattatgtaaaatattgtttattgtttaaatagaaacgctaatgtcaaacgctaaattagcattcttttaactttgtttcacacaaattaaaagaaaatactgatttttgtgagttcagttttttttttttttaaacattaaagaaacggtaacagtgtttggaccaaaccaaaaattggaacgggacagtttttccaataactttttgtgctactgttcaatgtagatgggcttttaaatgtaaggcactattgagtctggcgttttcaaagcccagtaggagagatgtgtgatactttttagtttttaaagaaaggaaaaagggcttttgagctgctagatagagaaaagtaatcgatataaagacgtttgactcagaaaattgcatataaaagttttgaagctttgcttggaggaaaagcaacaattcgtctttttggagatgagaattgacttcacaacgcatttcattgacttttcgttgtaatttgtaaactaacccttacgcaatttacttgcaacattcttataattaacaaatatcctattcatatcccttcaagccttttctctctttataatttttttgattatttccagaaacttgtgcggaaagtacgttttcaagtttgatatcttcacatactttttttttaaaatatgaatgaagaaccgtacgttgtgatctatatattgtaggttaaattattgtgatccgagtaagttatatcgtcacttatcaagaatttttggtccacataatttgttcaaatggatagaaagttcatctaataatatcgagttaaaccatttacgaaaactgatgttgttcaaatttctatgaatttcggaaatcgttgggtgtcggcatattatcgatttcatatttgaaaatataaatatatcgtcaattataaaatttgaaacattataacggatatgaaaaagatgatctgacataaacttttggaattaattactatgctagaaaattctatgagattagtagatagataacttggaagaagaaaaagggaaaattagaaaatgcagcagaccaaagtagtgataggtggtgcacacgtttttggtgttgacctacgacaacgacaacgacagacaaaaatttatcatcatacaaaacctttctttgtctttatctcattttgttttcttaatatcctctgtttcttcttctaattttctctgtttttattccttctacttctgagatccataaagattcatctcttattacttcatcggaaaagaaacctcgatttcagttttcttgatctctctaatg

SEQ ID NO: 31071 - DNA, 3003 bp, Unknown; identical to SEQ ID NO: 21649
  misc_feature (1)..( 3003): 2750-1469P.txt file - cDNA_ID_3038523; gDNA_ID_2214462; Annot_ID_182816

SEQ ID NO: 31072 - DNA, 3003 bp, Unknown; identical to SEQ ID NO: 26902
  misc_feature (1)..( 3003): 2750-1469P.txt file - cDNA_ID_3038527; gDNA_ID_2214462; Annot_ID_182813

SEQ ID NO: 31073 - DNA, 3000 bp, Unknown
  misc_feature (1)..( 3000): 2750-1469P.txt file - cDNA_ID_3038539; gDNA_ID_2214462; Annot_ID_182810
atgaagctcaagttactatctttggtggtggataatgtgacaggggctagggatcgtttgtcttggggagggtgttccaatggtaaatttacagtcaagtcagcttattcttttttaagcttggactggagttcgaagcagcagatggcgcgttttttctctagaatttggcgtgttgtagctcatgaaagagttcgagtgttcatatggttggctgcaaatcaggtgttgatgacgaatgttgagagacacagacggcacttatgtgattcgagcttatgttcagtatgcaagagtggggaggagacaattctacacattttacgggactgtccggcgatggcgggaatttggacccgcttgttaccagcacggagactctcttctttcttttcgaaatcgctgttagaatggatctatgcaaatttaggagaggagatagagattaatggttgtccatgggcggtcactttttcgcaggccatatggtgggggtggaaatggcgttgcggtaacatctttggcgagaacaggaagtgtcgggatcgggttcgttttattaaggatcgtgcgttggatgtttagaaggcgcatgtgcacaaaatgggagtgacgacgcggacagctagggaggagagattgattgcgtggtctccgccaagggtgggttggtttaagctcaatactgatggggcttcgcgtggtaacccgggactagctacagtaggtggagtagttcgagacggggatggaaattggtgttatgggttttcgttgaatattgggatttgttcggctccgcttgcggaactatggggagcatattacggtttaaatatcgcttgggagcgcggtgtcacacagttggagatggagattgattcggagatggtagtgggttttcttcggacagggattgatgattcgcatccgctgtccttcctggtgcggttgtgccatggcttactttcaaaggactggtcagtccggatttcgcatgtttatagagaagctaatcatctcgcggatgggttagctaactatgcttttcttttaccgttaggttttcatttgtttaattctactccagatagtgttatgtcgattgttcacgacaatgtagcggggtctgcgtacccccggaacgttcaagtgtaattttttttagtttttcagttttaataaaaatgggggttcgcccccctcttctaccaaaaaaaaatacaaagccaggaacagttttggttttgatcatacacaacgagaaacaagacttgtaagaattttccattgtacttaagaggctattactgtgtatcaagagctagatcacgccaagtttcagcatctgcttgctgagtttcctgatctgaaacaatcacaatgtgagggattatattagtcaagctgcttatatgaagattcataggtatcttggaagtgaaagttgttaaatctcagaaaccctctgaaacaaagctcaaatttgagctttactatgtttgaaacatacacaaaaagtgacgtatgtgtctccattactttccttatgacatttcaaggtctcaatatgggtgtttaacatcttggatcagaaatgcatcaccagtgtggattcacagctagcagttttaagaaaagactatattccaaagaatttagaccttaagaatcataaagctatgtaaactgtaaagcaaagcaaagaaaaaaacaaagagccatactggtttcttcagtatcatcagttttaacagcaagcactggaggcaatggaagatctgcaacaataatctcttatgaaatagaaaataggagaaacacaatgatcttgaggtataatgtaggaggaaaaagggttaccatcatcaggcaaagtgtccctcatccactcttcgtccacaatgtctataagcataccaagacttacttccgccatattcgaaaaactggagcttggaaatcccacaaattactgatgaaatcatccaataagtaaacatatatacaaatatcagacaaatggtgaagaaatttggattgttgaagtaaaaagtcaatttctttacaataggaaaacattgaacagaattgggacttctgatatccaaaattttgaattttgagaaagtgacagtatataacagacagaataaagctcaataacctatatatgaatatctaaaacaatctacaggtagtttcgccggagattatgaaaaagagagtagggattcattgagaaattacgtcgagcagttggtgaactatctagtaaagagaccaaatacgaaatcgtaccacaactcaaagccgactctttataaacagatatgattctctaaggaaaaaaacctaatttgaatcgaattagcaagagattcacctggtagaaacaatgcagccgtactccacacagagaactaaaaacctctagcttataaaaaaagctgattttttttctctttggttataaatatacagtaaccttctggtttacctagagtattcaaaaggctgatgaaatttaagttagggtatctctttatacggttcagagcttaagccggccactacagcgaccgacttctctcgccgtcgattaccggatcgtctccgttattgcgtgcttcatttaggtgctttcttcttcttcttctccagtttcagattttcctgttcttgcatttcacctttgagaaattgtgatataaaagttgtttactttacttcaatccagtaaagtaatttggtgattatcgtttcctctaccgcgatcactgtgtaattgatgatgagggttttatacgttcagtacaaatttgagagcttttatgttgacttcaatttgtaaccagtgtatcaattctgggattttaattttcatcattgcattatatattaggtgtatcaagtaagcaatgagttcttcaccgtcgttggagattttaggtacatatctctgaaactcaatttcattcttcgagttatgtttaaatg

SEQ ID NO: 31074 - DNA, 3003 bp, Unknown; identical to SEQ ID NO: 26906
  misc_feature (1)..( 3003): 2750-1469P.txt file - cDNA_ID_3038547; gDNA_ID_2214462; Annot_ID_182804

SEQ ID NO: 31075 - DNA, 3003 bp, Unknown
  misc_feature (1)..( 3003): 2750-1469P.txt file - cDNA_ID_3038551; gDNA_ID_2214462; Annot_ID_182802
gttgggtcgttgctatatggttgacggctatatttgggtttattttgaaaagattatttgtttgtatgtttttatgttagaagatatttttttttctttaagtcgaagggctatttagcaaaaaacctatgaaaaacaaactaacaattatcgagaggtgtttggaaagaaatgatcagaaatttgtctttctctctttcttttgtactttatagatagaaacattttaacaactgcatatataaaagtcaatgatccaaaggcaaaatttctacaaatggtaaaacgtcgtcatttatgcagatatggtaaagtgaaactgttgcagaaaactgagtaaatcaatattagaagaatgttcatgtttatttttgtaatgaagataaatctacgactctatgtcttaagccttttaacaaaaaaaaaaaaaaaaagagagagataagtctatgattttgtgcttttggatctcttgggctactctaatagaaaacagattttttgtaggatcgcattatcgagaaattaaagttggcaatattgagaaagaaattttcatcacttgaagcacatactgacatctactcattaaattaaaagttttataattcccaacaaagatgatcatgcacatggcaaattgaatttatatatgaatatttgcctagagagaaagataaatacatgacatgtaaggattaggatcggatcaaagtctatgatctattacgtgtccattaattaggttggttaagtcaaattgaactgcaatagacactcaaaaagcataaacaaatcttggtttgcattctttgcaaattttctatatctgaaaacgttattgaaaccattgagcgaaacataattgttttaagaaattcgagttgtaatttgtcaggaacggagaaaattgaaaacatgctaaatcaaactagaatagcagcaaattttaatccaaaatccacacgtcaggacacagtgatctcgactcttaagttaatagcttccaccttcagattagtcaaacactttgaaaaaaactgagcttaaccaaaatatataaatcaaagaaacgtgtgtagaatgttcgtagatatgatcatgatcatcttctcaatgtgtagtatgcttaaattcatataaatattgagagtttaaagttcacaagctaagcatacactagctatcaagccgcctcacctactctccaatatccattggaataatcatacttacgtgtttataaataagtattacatcaacccatatcttcttcatccacaaataaccattggctataattatgacaaaaactaccaaaaccatgaatcctaagttttacttggttcttgccttaaccgcggttctggcctcaaacgcatatggtgcggttgtagacatcgatggaaacgccatgttccacgaaagttactacgttctccctgtcatccgtggccgaggcggaggcctgactctagcaggccgcggtgggcagccatgtccttacgatatcgtgcaggaatcttcagaagttgatgagggcattcccgtaaaattctcaaactggaggcttaaggttgcgttcgttcccgaatcacagaacctcaacatcgaaacagacgtcggagccacgatctgcatccagtcaacctactggcgggtcggtgagtttgaccacgagaggaagcagtacttcgtggttgctggtccaaagccagaagggttcggacaagattcgttgaagagtttcttcaagatcgagaaatctggagaggatgcttacaagtttgtgttctgtcctcggacttgcgactctggcaatccaaaatgcagcgatgtcgggatattcatagatgaacttggcgttcgtcgtttggctttaagcgataagccgttcttggttatgttcaaaaaagctaatgtgaccgaagtttcgtccaagactatgtgagaggacaactctcgatcttttactttgactactcataataaaacctctatgttttttttttgataaaacacccgctctctgttttcttgaaaactacaaattgaataaaagctagtgaagcacatgcctatttattaaatcttcatcttctctcaatcttaatgcccgatataaatcaaagggatagagtggacgtccatttaaataaaaccagctaacaatacaagcccctaattattgttgtgtatttaataagaaaaaggaagcttttaaacagtacccgttctctagagaattctgatgatggtagtgatatagaaaatgataaaaataattaatactctagtctctagattgactaataactaatgttttcatttagtctaatgactttagttcagtttctctttacataatctaattgatttttttatatatttaaattctcttattctttaatttgaattttatttttgtttatataatagcaaaagtgactgaatcaatttacaaaatgatatttaggtaatttaaaaaacttttgaaaaattgaatctatgaaaggttagtttgcaaaaattctgcgtagaaatttatagaaaaatattatttttgtcctcaatgcatggaatcagttaagggataattttatgcaaaacaaagaaaggcttatgaaaatgtgtggcgttgcaaaatttttactagaacaaaagcaaagttgtggaaaacattgcgaaacgtgaggaacacactaatgttcaggtacgaaccggaatctttcggtttacctaatatgttatcaaaacagctactcaaagatgggcctgttttgggccaacgagatttgtttcagtcgatatcaacacaaattagtaaattaaagttctacgttttatcggtgaaagtcaacggtttcacagatccctggacctaaacagtttttttaaaaggtataaatttttttgctgaccaatatcgtcttcttcccgatctctcagcttcttccatttacaattctaccctttgcctcttggaacctttgaacgaaaatg

SEQ ID NO: 31076 - DNA, 3003 bp, Unknown; identical to SEQ ID NO: 26909
  misc_feature (1)..( 3003): 2750-1469P.txt file - cDNA_ID_3038554; gDNA_ID_2214462; Annot_ID_182800

SEQ ID NO: 31077 - DNA, 2532 bp, Unknown; identical to SEQ ID NO: 10910
  misc_feature (1)..( 2532): 2750-1469P.txt file - cDNA_ID_3038558; gDNA_ID_2214462; Annot_ID_182798

SEQ ID NO: 31078 - DNA, 3003 bp, Unknown
  misc_feature (1)..( 3003): 2750-1469P.txt file - cDNA_ID_3038599; gDNA_ID_2214477; Annot_ID_183172
gagtctattgttcaccagaccgctagtcttggtgatgtcgaggtaaactgattcatacactgttagtctctcgtgtttctgacggtctatattttatacttaagtcggaatcattgatcgaggttagctcataaactctctgtgcattgatttcctgaaccaaccagggtttgaaagctgccttggcatctggtgggaacaaagatgaagaagactctgaaggaaggactgctttgcattttgcatgtggatacggcgaggtatgtcaacgtctcaacaagccttaacaaaaaaaactgtcgaaatgtcactatcacagaatcatggaaggcagtatatactaccaatatttactagcatcatgcacttgatggataagcagcttcggtttcacttagtagattattacacaattatctgtagcattctttacaaaggaaattgacagttgccattattacatctgcaattagaagttgttataaaagcttaatccgaagtttgaacccagctgacctaggttgagtttgtatgtaggtgagatgtgctcaggttcttctggatgctggagcaaatgcaaatgcgattgacaaaaacaagaacacaccattgcactatgctgctggttatggaaggaaagagtgtgtaagcctcctcctagagaatggtgctgcagtgtaagtttgcaacaacaagaacacaaattcgatttccaaacaacttagtaatggttatataagactcttttaagtgtcgtttcattttctgtttgcagaactcagcaaaacatggacaataaaaatcccattgatgtggccaggctaaacaatcagctagatgtggtgaaactacttgagaaggacgctttcctctgagctgctttgactcttgaaggatatgtttcttctctgtcatgtaatagtgtcacagagtctgattgcaaccttgtcttctgtgggggttttcatcattaaatctggaaaaaaaagatggagaaaatggatgtttattatggttttgtaatgaattattttcttcttgaattggttttttcttttggctcttaaagtcttttttgtccttctttgtgtgccacagggctttagtgttgcaatcacaaagaaaaaacccttaaactgttatattcgagaaggaatagactgtttaatcaaatcggtgataagataatttggagatttttaacatgccaaccgtaaattagaatgaagagtagaaagcccatagaggataacgatactaatagatgagatttgtacataagtaatgtgcagaatggaagtcgatagaatgaaatgcaaaagtgaactcaagaacagcaaagatgataaaacttggacctcaaatcatctttggctctttgctgtttcttttgttttctctcttgaaagtattattgaaaaaacagtaaaaaaaaactcaaaattgaggttacttcaatttaacaatagtaaaatcatcaacacaatttttttttttaaagacatcttaattttctaaaatggatatacaaaatcatatcttgcacctcggaatttggtccaccttagacgtttttagtggcaaaaattcccggatttatgtggattccaatattagtctaggtttcggcatagaattctcctggttaattaaaaatatgtatacaatgttataatttaatcaaaccaacaaaataaaaagagtttgtaaaaatttcaaaatagttctttcaaataaattctgaacagtcttttaaatttatttttagtgtttagtgtgtcatatgtcatatgtatacaaaaacttaatttaaaatttgttattttgagtgagagttttaactgtaaaactaaatatacgattttacaaaaagtaatataaataaattaagcattatttggaaaataatgtaaagctgataattatattcctaattttaaatccatattgtttccttaaagaatatttcaatataattgcaaaaagaaaagaaaggaaatatatcttccgacaatattatctgatgcgcgtgaaatagactatcaggccaagattaggtcaaaaagcccgtgagcccaaaaacctgagaaaacccggttcaaattgcaaaccctcgatttcatttctccaattcgatagacgctgggtaaaaaaattcggaggacgacgaaagagaaaacgagtgtttcagtcactgccccacggagctctcggaaatttgtcttccccttgtcgtcgtctccctatctactgcttcttcttcgttttcgtcttctttatcaaggtgcgctttagcttctcaacgccgtttgatttttagaatttcgatttttttttttttttcttctagttcttgaatcaatccggaatttggcgactatgttgcttcgtttgtaaatcgtattctcctgtttagaaatcttcaattgactgtgttataggaacaatttaaatctcaatttcaatgtctcttttagtcaccttcgtgtagtaatttgcttttgaattactgttaatgaatctcaaaaaatggattttataatttgggaaaaggggcttctgggtttaattaaagaacacgagataaggtctggttttttcttttcatttctttgtgtgtgtttttggtttctttgattttcttctgggttatggtccgtttgagtctggtgatagttagttggcaaccaatttttattgatctattacaatcgagaacacaaaactaaaccctaagaaagaagtacataaagttgttgaaaagatctcgttaactctcccaaagtcctagggctttcacacaaccagtgattaaataacctttgagctgttctccttcccacactttatatgtgtgtttgtggtttgtctaatttgtgaggagcttctatgaaacctctggttattttaattgttttctgcaattcctgattgatatgtttatatatatttcttgtatttgtgaatttgtgtaggaatgctgtttaattggaatcaacaatg

SEQ ID NO: 31079 - DNA, 3003 bp, Unknown
  misc_feature (1)..( 3003): 2750-1469P.txt file - cDNA_ID_3038603; gDNA_ID_2214477; Annot_ID_183171
taaccaacacttttttcctctcgctcttcttcgctactgtttattttcttcttagccgatggcgtgagaagatccgtaactcgacgcctcttcacgtcgttgacttatctgagatctgtgctctaatcggtttcgttgcttcgtttatctacctccttggtttctgtggtattgatctcattttccgatcttcttccgatgatgatgtttgggttaacgatgggatgattccatgtaatcaatccctagattgtcgtgaggttcttccgattaaacctaattccgtcgatcctcctcgggaatcggagcttgattcggtggaagatgaagaaatcgttaaattagtgatcgacggaaccatcccttcgtactcattggagacgaaactcggagattgtaaaagagcagcagcgattagaagagaagcggttcagaggataaccggtaaatccttaaccggtcttccattggaaggtttcgattacaattcaattttggggcaatgctgtgagatgccagttgggtatgttcagatcccagtggggattgcaggacctttgttgcttgatggggttgagtattcagtgccaatggctacaacagaaggttgtttggttgctagtaccaatagaggttttaaagctatacacttgtctggtggtgcttttagtgttcttgtgaaagatgccatgactagagctccagttgttagattcccttctgcaagaagagctgctcttgtcatgttttatcttcaagatccttctaatttcgagagattgtctctcattttcaacaagtgagttttgaaagtttctccttttacttagtgatttgagtgttgttgctgacttgtttgttgttctatatgttatagatcgagtagatttgctaggcttcagagtattacatgcacgattgctgggaggaatctgtatccgaggtttgcgtgtagtactggtgatgctatggggatgaacatggtctcaaaaggtgttcagaatgtcttggactttgtaaagagcgagtttcctgacatggatgttattggcatctctggtaaactcttctttccctctttggtgttgtctcgattttcgaaataaagttgaactctttttgattaatttggtgttatggtgttcagggaactactgttcggacaagaaggcttcggctgtaaactggatcgaaggacgtggtaagcatgttgtatgtgaagcttttattaaggctgagattgtggagaaagtgttgaagactagcgttgaggctcttgtagagcttaacacgctcaagaatcttgttggttcagccatggcgggttctcttggtgggttcaatgctcattcaagcaatattgtcagcgctgtgttcatcgccactggccaagacccagctcaaaacgtggagagctcacactgtatgaccatgattcttcccgatggtgacgaccttcacatctctgtttcaatgccttgcattgaggtataatgcatgttctatcttgaaattaaacccattattgcagagaacacaaagccgttagttttttgaattattgttggatccaactcatgaatgttttgtttattgatgtgactccaggttggtactgttggaggtgggacacaacttgcatcacaagcagcttgtttgaatctactcggtgtgaaaggatcaaacaacgagaaacctggctcgaacgcacagcaattggcaagaatagtggctggttcggttcttgcaggagagctttcactaatgtctgctattgcagctggacagcttgtgaagagtcacatgaaatacaacagatccagcagagacattggcccttcgtctcaagtcaacaggtgatgtttggagcacgatgagacggataataataaaacaacaaaaacccataattagatttgatgtaattctaacttcatttgatttcttcttcatcgatctcttttcttttctatctattttgtactaagtctccaaattttcttaatttatgtaaagtcttttgtccttccatctttatggcttatattaatatcatagcttagcatcaaaatgtgtaattaaattgcggtttaagctttaaagccatgatttttttttctaacattgaatagattattgtggcagtgtttgctttgtgatgattatgtacgtgacagagttaggtactactaataaatgtagaaatgtagttgtgaatattgcagacgatggaggagtgatatggtagtttgacaaatgaagcatttgaggcaatgaagtctctcctcatggcatgtgtgtgtatgggtctttgatgatatcttagaaagtaagcagtagagactgtgcagagagctaaaccaacaatcattattgattttaaaccaaagagagtaagagttttattattattgatttctgattacttctcttacaattgaagtaatgaattttatgttacgacaaatttgatcatttatatagacgtaaaaatgtaaattattatgcatgcatagtgacgctgaggctcatacaagttataatttactctcaatattttcaggttgcacatcaattgttgatattttgtttcctcctttgttctaacttttacaacaataatatctcattttgaaaaattgcctaaaccttttaataaaaagttgtgattttgttgcaatttttaatctgtaaaaatgcaatccgattaagtcggaccgtcagatcagtcctcatcttgtttgtttaacggtccagatttaaaacactaccccagtaaatacaaaaccaactgaagaaaaataaataaaaagtaaatttttaaagagtccgacccgggtccctcaaaaaaaaaaaactccgacccgggacaagatccgtatccaacaaacttatatgtgtatcggacacagaagaatactttccacgatcatcagcttctggagatctcttctgggaatcgagcttcactgttaaagattttccttcaatcggctaaaaatg

SEQ ID NO: 31080 - DNA, 3003 bp, Unknown; identical to SEQ ID NO: 25357
  misc_feature (1)..( 3003): 2750-1469P.txt file - cDNA_ID_3038607; gDNA_ID_2214477; Annot_ID_183170

SEQ ID NO: 31081 - DNA, 3000 bp, Unknown; identical to SEQ ID NO: 11057
  misc_feature (1)..( 3000): 2750-1469P.txt file - cDNA_ID_3038611; gDNA_ID_2214477; Annot_ID_183167

SEQ ID NO: 31082 - DNA, 3000 bp, Unknown; identical to SEQ ID NO: 11056
  misc_feature (1)..( 3000): 2750-1469P.txt file - cDNA_ID_3038615; gDNA_ID_2214477; Annot_ID_183165

SEQ ID NO: 31083 - DNA, 3003 bp, Unknown
  misc_feature (1)..( 3003): 2750-1469P.txt file - cDNA_ID_3038646; gDNA_ID_2214479; Annot_ID_183284
aagataaaactttaatataatggaatacaacctggagaaagtgggtttttgactttttttttagtgaagtggagaggatgatggtaaattttaaatattaaaaactaaaaaatatggtgctactccactaattttttatgtaataatagtatcaaatctcatatgctccataggttaattatagtatagtataagaatagttaatgccttaatgggtcggctattaatcaaccattaatgtatactaatcattttccagttagtttatgttttactttaattcacacccatatatttccatcaccttctatttcatccaattatgttactttttcacaagttgtttggtccatatctctcaaaatatctatagacacaattactacagaaatcatctatatgtagtatgcgaaccaaaatttaatcattacttcatagtttggattacaaagattctcaaagaaattatcaaaaacaaaacaagaaaaaagaaaaaaaaaagattctcaacgatcaaacaacaagtagcaaataggacaacgtcgttcgcagatatatctacatgaactcatcttttagtcatggagcaatcgggacgacgtcgttcagcgatccatttatagttaagttataatgatctccctctttagacaaggagtgaatgggacaacgtcgttcgctgatccatttgcattatcgcaagacgcctgagccggtcgatgaacagagacaagattcacatcgtccattacaataccggtacatggtttctccttactacaatctaacaaaaccgccacttccgtattcgaagtcccgtgtatatcttcatatctcacatttgatactttaactcctgattcctataataatagaaattaatatacagattaaatgagtcaatatatcgagttatgggtgtaaagatatggttaattaataaatattcttacctgtttagggcaaggtttatgaagacagtagtgttggtctataatgattgggttcttgaccatcttcatgttaatatgttggaaaacaatgtttctagcgaaactgttgctatctttcccccatgttttgatcctaactccgttattcgttcccatgaaatccacgttactcacggtcacattatctactccttgttcttcctctgctcgtccaagacttccaatactgttggagagttcacacaaacaaaaaaaacaagagaacattttagaaagtgaaatatcaagaaagatggggagcaagaaatgtatgtgtgtgttacctgatgccgtggcctggaccgcatcgaatggtttgtatgaatacattagtggatcctggaccgatggagatgcaatcatcaccggttccgattcttgagttagtgatatggacggagtgagatgattcgacgtgaatcccatcggtattagggctattctcatcagcagaaaccttaacgccgtcaatgttcacgttattgctattatcgatgactatatggaatttctggctgttgatcgacgttaaaccactgattttgatgttatttgacccactaaacaccaaactctacaaataagattaacaaaaaaaaaaattaaaaacctcatgagagttaaatttgttgtttcttgtgggtcaagcataccttggcaccggtaggacaattatggccaccgttgttcttgcatttccacaaactagtgccttgagcgtcaagtattccaccgtagattgaaacatcagtaacatcctcgaaccagatccaatgttttgagcttgcgataattctaaaatcttccggagcaacgattgagcctgctatacgaatagatattggcgcttgcttacactcgttgccatgaaaaacaaggttcccgaccaagaaccgtccttttggtacgattatagttgtaggattagcggatgcacaagcaacgtcccatgcggctaagaaggctttggttgagtcttttgagccgtctggtttagctccgtaggataagacgttgagtgtgcttggaatcggatgggctaatgatgagattaaggtaaaatcaagaatgatgagagccaaaggaagaataaggcatgaagtgttataaaccattttttggatttttttcagagaaggttagtgttttaaggatgaaggatattgtagaagaaggtacatgagatgggaatttataggatttacgatagtaacgtaatgattagtttatatggaactttcttgattttattaatatctaccattgtgtcaacttgtgtacctagataaccgggtaatttgttatgtaataaaatttggttggtttaatgaaataatagtaattattcgcaagataagtttccttagatgactgcattagtgtacggtaatgtacgaaattagattagtcgttttcgacagagatagttatatggattgatttaattggaaaattttgattatggatcgatttggtggctctcgtttttggattaattaattatggaatgaagaaaacaagaagaagaagatttattacctcttaggattgtggtgtccttttatgtattttttttggtatcactatgatttaatattcactaacttaactactttagtgatttatataaaaaatcatagcgcatgcatgttcaagttctttaactttgccgatcgctagaacagtatccgtactttcgattttctaacattcacctatactcgtttggtaagttaacaaagaatcattagtcattcaaattgcatatcaagataataataacttattggtttttttaagtaagtgtaataagaaattattcgaatgattcgtcaactttttcggatagattccaaaataatggttgataacgagaattgatttacttatagcaaaaacaatctagaaatgtgaatacacattcaaaacaacacatataaggactaagtatattatattttaaaaaacaaaattgtgaaatacagaaaacatgcgcatcaaacaaaggatg

SEQ ID NO: 31084 - DNA, 3000 bp, Unknown; identical to SEQ ID NO: 11129
  misc_feature (1)..( 3000): 2750-1469P.txt file - cDNA_ID_3038648; gDNA_ID_2214479; Annot_ID_183282

SEQ ID NO: 31085 - DNA, 3003 bp, Unknown; identical to SEQ ID NO: 17466
  misc_feature (1)..( 3003): 2750-1469P.txt file - cDNA_ID_3038652; gDNA_ID_2214479; Annot_ID_183281

SEQ ID NO: 31086 - DNA, 3003 bp, Unknown; identical to SEQ ID NO: 25385
  misc_feature (1)..( 3003): 2750-1469P.txt file - cDNA_ID_3038655; gDNA_ID_2214479; Annot_ID_183279

SEQ ID NO: 31087 - DNA, 3000 bp, Unknown; identical to SEQ ID NO: 11124
  misc_feature (1)..( 3000): 2750-1469P.txt file - cDNA_ID_3038668; gDNA_ID_2214479; Annot_ID_183271

SEQ ID NO: 31088 - DNA, 3003 bp, Unknown
  misc_feature (1)..( 3003): 2750-1469P.txt file - cDNA_ID_3038688; gDNA_ID_2214479; Annot_ID_183261
tgtaatatctatattatttctctctctctctctctccctgtatatatagatcggtttaacctagttttatagcaaagctgtagacgagctttcagacgtcaaacatggctaaagcacaaatatgtctttgtttcatcattttcttatacctctggccaggtaatcacaactataatcatgatgttaattagtataatataattggtatgtagcgatgcatacatacgggtttatatatagatcatttaataatcttatattaattgtaatcttttccaagtactgtaacaatttagtttcatttccatgtttctcttacagaaggaaatttcatcaaagtcaccaaggcagatgtaagaacataagtgaaataaccaagttataaaatgttttgtttattctttttctttttttttgtcttttcttgtaatgaactttgggtttgatctttgttacagcgctcggccggagattggtgcgttgctaaaccttctacggataacgaaaggcttcaagaaaacataaacttcgcgtgttcgaaaatcgattgtcagattatctcggaaggaggtgcatgttatttaccagatagtatcattagtcgtgcttctgttgccatgaatctttattaccaagctcaaggaagacatttttggaactgcaattttgaaggctctggtctcatcggcataactgatcctagtgagttttctttttatatttttttcctctaaacaactatggaactattattatgtctgatatcatatcaatttttatttattttccacatttacaggctatggaagttgcatttatcaatttcgtaagtaaaacatatcaaggttcgatcttgttgcaagaagttagaggactgtatctgaaatttcctatttaaaatctaatgtttggatgttttaattggatttctcaacagttaaatgtttgagcctagatatgtgtatgccattgttaaagcaatataatttaatttactgatcaatacttcgcatctattcaatattaatattaactaacatataccagtataaatacattagatgtgaattgtttaatgtttttgcctataaatagatgtatagtactatagtttgattttcttgccaacaacacctaaacattaagttttctacagttttcaacaagagatatggctgtagatcacctaattgtgttgtgtttaattatcagttgagggtagatatagttttctaattgtgtgtaaatatttatatcttagcatcatatcgaccaaagattaatccatattagccacacatagatattgtgtaatataggtagggttaggttaggtcctaatgcggaaaaaagaattattaaatcacacacacgaccaaatgtggcagcatatgaaaacgggttatagtgggaaggaatgtgggaagaatcaattagttgaaatattttattattcttgcttgaatgtattccaaagtataattatatgcgtttttaacactaattagtaaatcatttttccaagtccctaaacgatacattacatttgattcgcatgtcttcctcttagaccaagaacaaggtcgagttttttgtcaacagaaatcttctccccgaaacatgaaacaacttatagagcaaaagataaatattatgaactttaattgcccaagcatctgtgatccagtggtgggagaagatttggggaagggtgaaactttcagagctgggttcgatcctccctggaaacaaaaatcacatttgtttggaaagtctgtcagttgggctttagcccaattggtttacctggtagtcagaaatgcaggcggcctgactaccccctggcattagtcggaaagcatccaaattcgggacagacagtgtggtggtctttcggggagaagtccactctgaagtatttcggtgcatttctactgaggctgaccggatcagccgataaagtttataaaataaaataaataaatgaactttaattaaccagaaaatgtagaaacaaaaaatcttactaaacctatgaccaaaaaaaaaaaaaaaaaaaagttgtggagtaagaagtatgaagcgttttatccaacatatcccagaggagaacagtgattggtcgatgtcacgtgaaataacatttggcaaatagtgcacaaattaatgaaggcaagaaagtgagaccagacgcgagatgtgagcgcgtatgaagaaacatgatgagacaacaaagagaatcaacctcgtctatgaaaatttcttcagattctcttctcattgcgataccaaacaaaaactcgtagtatatttttgttggtcgtttttgtacaaaatatataaaaagcaaactgtcgcaattatggtttgtatattatacaccagataaacaaatcagaatctctccactaaacctaatatattttaaaattttgataagtctatatacttttttggcggggacaaccggatagttcttctttgagacttctggcttttttttctcttgatgataataagaaactgtatgaatatttgaaaatgccttatgacgttttcttaccaaaaaaaaaaggcaaaggaactacaaaagatagcttaaacaaatttagacaattcatgtggccttaccttaagtattttagtgatgatacgattttaaaattattagtgccattctatcatgttctatactatataaaatattcattcaatattgatttcatagttaaagtttacaccaaaaaattgacatcacatcctatcagctacggaaatggttaccaacacaaaatagtatatctatgtcctatatatatataggaatttaagacaaagcaatattagtctacttttggaggagatgaaaagttacaagaagtctccctataaaacactattaatgaaccaaaaacaatctactaatcaaacttatagtctactagaggtactttgttaccgtttggttagggatgagtttcaacgtttgtggtggttacaatg

SEQ ID NO: 31089 - DNA, 3003 bp, Unknown; identical to SEQ ID NO: 25383
  misc_feature (1)..( 3003): 2750-1469P.txt file - cDNA_ID_3038697; gDNA_ID_2214479; Annot_ID_183258

SEQ ID NO: 31090 - DNA, 3003 bp, Unknown
  misc_feature (1)..( 3003): 2750-1469P.txt file - cDNA_ID_3038701; gDNA_ID_2214479; Annot_ID_133201
ccagaaaaaaggttgaaatttagtaaatgcgtttattatggattggctgatagcctgatatacttcattctgtgacaaccgattcaaacaacacattggtacattaggatacaccgcataatcttttttattcgacacctttagttataaactcacacgtgaacgaccacacttatactatgaaaccgtgtcatacgaaccacattttaacatctttagcaactaagatttgctccaggagtgatcccaagcgtcctgcagaactccaagtaatagtttactctgctctgcacggctgcaggacgcctaccgttgcattcaccaccattgatcttcctagtggtggctccaaagccttggtccaagactggacgaacatttaggttccagaaccacatggcacactgaaaggcaacttgggggctacgagccaccatgtctggatcagtcaagagagggagtccgaggaactttccagctgcaccgtaattgtagttccatgtgatttggattggaccgcggccgtagtagtcttttcccggtgtacaagggtacgcagtgctcggtgagcagtatttccctctagctatttcttctttgtagcaaaaaccttgcataacgtaaaagaagatcgttatttataatagagaatgaatatgtatgaattttaatgataaaagaaatgatttgttaacttacccaagaaacattatggtgcttaattagtgtaataatattcttgataataataattcattaatttgcttaattaaataattagtatacatgcattcatgtagtagaactagaagggtttataaagaacttacttccagattcatgagaaaactgagccaacatagcggcaatctcacgcttagcgacggttcctttataggcgtcgaacgattgggcagccgcaatgaaagcctggcgagtgtagaaccctttcgctggacagccatttccgactttgctcatgataccatcaaaaaatgctggtgtgacaacattttcaattgtatcacgaggatcagcgtttagaccgcctgcaccaccgctaggagttggtgggataggtgtggttgaggagctgcaaggtccacttcggcacccggtaccacagtaggcatctgtggtgccacaatatccatatctactgcaacataagttggctgcacatccggttgtaccgcactgttgcgaaaacacggtttttgccatgatggttaaggtgaagagaaaaaggatgaaagcgtttttcaacattgctcttagggtagccattttgtgtatggagggtgttgtgtgaagaaatgaagaaggtgtgttgatgtatttatagtgtaaatttggtctattcaaattgaaatattgatcagtgttagacatctttcacgattattgattggctttttctgagtcaaagtcaatgccactttgtaccacttaacaaaagtcaatgacacagttttttctcttgtcgttatgagaaattccatgtcggtcatagatcagatcaaaaacgaatatgtaatcaaaattttaaagagccaagttacttggatgaaaatcattctcataaaaacttgattgagataatcaagtttagattagttcaaacgtttgagatttttctattgaatagttccaagtttttgttaattagctcaaacgatattgttagctaatatagcattttttttggtcaactaatatagcatttagaacgttcttttaaagtcttactttgatttttaacaaaaattgtatggaattgtgagaaaaatgactagtgaagccaaaatgtttctatttataaatcaaaatcaaccaaaattagaaaaatccaactcaattattgcaatttccaaatagtcatgcgtcaaaattaaaccagcatatcaataaaaagcggtttagtcttaccaaccctggtctagagactctagaaccatcggagctcaagtgaaaaacgacgccgttaagctgcatctttcaagatagataaaaacttttgtcgatcgcttcatctctcacagagtttcggctcctccgttgtgtttcaggacgacgcaaaggggaaaaaaaattgaattctttctctccaagcgaaactagggtttcgaaagtctctgtctcatcaaagcttcgaaaaggtagatttatggtttcttactctcctttctctatgatattccaatttcttgcgagcttgctcagtgttcttaccttatatttaccgaaccagtgcctttatattctatcacattcgaagttattggtttctggttacttatattgcttattgttctatgactacgatataattatcccaaagatttgttcttttctccgaatttggattagaaatggatatactcaaattctgaacatgcccagaagaatccttgttttggtcaatgttgggttctaattggttgtgttcgttgtttgctgttgatttgttttcttttcagaaagtgattgcattaagagaaacattgggataaaagatgagctttactcaggctaattgttttcgaccatcctactatcctgcaaggataacacgaccaaattgcatctccagtgtacctattaggtcttcagtacgctttgatcacttcccgcgtacctcgtttactcttcgagctactgctgcagtgtctactcagttttcgcctcttcttgatcatcgccgtcgtttacctactgggaaatcgaaacaaagttctgctgtgtgcttatttggtgggaaagataaacctgatggtagtgatgaggtcagatgctttttcctcatgttaagttcttctgcctgtaaatgaatttactttgcaactggagagtgatttcttttgtgtttgtttctaagaactttgctgttctgtttgctgatgataagtgtgttcttcttattttttcaattttgttcttagtgattgttgtaatgaattttgttatcagatatcgccatggaaagcaatagagaaagctatg

SEQ ID NO: 31091 - DNA, 3003 bp, Unknown
  misc_feature (1)..( 3003): 2750-1469P.txt file - cDNA_ID_3038701; gDNA_ID_2214479; Annot_ID_183256
tacttctcgtggggaaatagaccgtttttccgtgaatatcctgatccgtatatattgaaaaaagtttgaattacttttccttcattttttaaactgtcaatatcttatttcattcaaatatgcatacattttttaggcctatttatcgatcggtcttagttatggaaattttacaactgttgtcatcatacaaatatacattactcggcagtggttccctcttaatattctcactttctgacacttagaaccatctggttacatttttaattattatatatcatccttacaagtgtctgacgaaatggtgaatcgagaatcactagaaggaaccacttagacaaataatcttttataaaatttaccatttgttcacactttttctttcattcgtaaagaattttctctgaagtttcagcttatgtaatttgttcccagggaaaaaattcaaacactatcctctgtaaaattggataaccattaaccagaaaaaaggttgaaatttagtaaatgcgtttattatggattggctgatagcctgatatacttcattctgtgacaaccgattcaaacaacacattggtacattaggatacaccgcataatcttttttattcgacacctttagttataaactcacacgtgaacgaccacacttatactatgaaaccgtgtcatacgaaccacattttaacatctttagcaactaagatttgctccaggagtgatcccaagcgtcctgcagaactccaagtaatagtttactctgctctgcacggctgcaggacgcctaccgttgcattcaccaccattgatcttcctagtggtggctccaaagccttggtccaagactggacgaacatttaggttccagaaccacatggcacactgaaaggcaacttgggggctacgagccaccatgtctggatcagtcaagagagggagtccgaggaactttccagctgcaccgtaattgtagttccatgtgatttggattggaccgcggccgtagtagtcttttcccggtgtacaagggtacgcagtgctcggtgagcagtatttccctctagctatttcttctttgtagcaaaaaccttgcataacgtaaaagaagatcgttatttataatagagaatgaatatgtatgaattttaatgataaaagaaatgatttgttaacttacccaagaaacattatggtgcttaattagtgtaataatattcttgataataataattcattaatttgcttaattaaataattagtatacatgcattcatgtagtagaactagaagggtttataaagaacttacttccagattcatgagaaaactgagccaacatagcggcaatctcacgcttagcgacggttcctttataggcgtcgaacgattgggcagccgcaatgaaagcctggcgagtgtagaaccctttcgctggacagccatttccgactttgctcatgataccatcaaaaaatgctggtgtgacaacattttcaattgtatcacgaggatcagcgtttagaccgcctgcaccaccgctaggagttggtgggataggtgtggttgaggagctgcaaggtccacttcggcacccggtaccacagtaggcatctgtggtgccacaatatccatatctactgcaacataagttggctgcacatccggttgtaccgcactgttgcgaaaacacggtttttgccatgatggttaaggtgaagagaaaaaggatgaaagcgtttttcaacattgctcttagggtagccattttgtgtatggagggtgttgtgtgaagaaatgaagaaggtgtgttgatgtatttatagtgtaaatttggtctattcaaattgaaatattgatcagtgttagacatctttcacgattattgattggctttttctgagtcaaagtcaatgccactttgtaccacttaacaaaagtcaatgacacagttttttctcttgtcgttatgagaaattccatgtcggtcatagatcagatcaaaaacgaatatgtaatcaaaattttaaagagccaagttacttggatgaaaatcattctcataaaaacttgattgagataatcaagtttagattagttcaaacgtttgagatttttctattgaatagttccaagtttttgttaattagctcaaacgatattgttagctaatatagcattttttttggtcaactaatatagcatttagaacgttcttttaaagtcttactttgatttttaacaaaaattgtatggaattgtgagaaaaatgactagtgaagccaaaatgtttctatttataaatcaaaatcaaccaaaattagaaaaatccaactcaattattgcaatttccaaatagtcatgcgtcaaaattaaaccagcatatcaataaaaagcggtttagtcttaccaaccctggtctagagactctagaaccatcggagctcaagtgaaaaacgacgccgttaagctgcatctttcaagatagataaaaacttttgtcgatcgcttcatctctcacagagtttcggctcctccgttgtgtttcaggacgacgcaaaggggaaaaaaaattgaattctttctctccaagcgaaactagggtttcgaaagtctctgtctcatcaaagcttcgaaaaggtagatttatggtttcttactctcctttctctatgatattccaatttcttgcgagcttgctcagtgttcttaccttatatttaccgaaccagtgcctttatattctatcacattcgaagttattggtttctggttacttatattgcttattgttctatgactacgatataattatcccaaagatttgttcttttctccgaatttggattagaaatggatatactcaaattctgaacatgcccagaagaatccttgttttggtcaatgttgggttctaattggttgtgttcgttgtttgctgttgatttgttttcttttcagaaagtgattgcattaagagaaacattgggataaaagatg

SEQ ID NO: 31092 - DNA, 3003 bp, Unknown; identical to SEQ ID NO: 26916
  misc_feature (1)..( 3003): 2750-1469P.txt file - cDNA_ID_3038736; gDNA_ID_2214466; Annot_ID_182857

SEQ ID NO: 31093 - DNA, 3000 bp, Unknown; identical to SEQ ID NO: 10942
  misc_feature (1)..( 3000): 2750-1469P.txt file - cDNA_ID_3038740; gDNA_ID_2214466; Annot_ID_182855

SEQ ID NO: 31094 - DNA, 3003 bp, Unknown; identical to SEQ ID NO: 26919
  misc_feature (1)..( 3003): 2750-1469P.txt file - cDNA_ID_3038743; gDNA_ID_2214466; Annot_ID_182853

SEQ ID NO: 31095 - DNA, 3000 bp, Unknown; identical to SEQ ID NO: 10951
  misc_feature (1)..( 3000): 2750-1469P.txt file - cDNA_ID_3038747; gDNA_ID_2214466; Annot_ID_182851

SEQ ID NO: 31096 - DNA, 3000 bp, Unknown; identical to SEQ ID NO: 10948
  misc_feature (1)..( 3000): 2750-1469P.txt file - cDNA_ID_3038753; gDNA_ID_2214466; Annot_ID_182845

SEQ ID NO: 31097 - DNA, 3000 bp, Unknown
  misc_feature (1)..( 3000): 2750-1469P.txt file - cDNA_ID_3038757; gDNA_ID_2214466; Annot_ID_182844
ggcttcagctggattttttttttttttttttcctgagaagcttccgatgatttaggggttagtgcgatttaggtctcttcctgtaatttttcgcgattctctgtataatttgtgtggttggtgtgaggagaatcttggaattgggaatggaatctccgatcaaatgttgcgactgtggatgcgattgttgttcttcctcccctggttcatggattcgatctgtgaagaagagaagacacgacgaattacagaccgagaaacgattctcgataccggagctggacgacctagacatgttctctaatcctagagtccaaattgagaacgaatgtgaattactacgcgagactgttagcaatcaacagcaaacgattcaggatttgtatcatgagcttgagcaagagcgtattgcttcatcaactgctgcagatgaaacagtaaagatgattcagacgttggagcgtgaaaaagcaaaaatcgacttggaactgaaacagcttcagcgtagtgttgacgaaacattgaattatgaaaaccaagagattgaggcattggaaaatatggtttatcaaagggatcagacgattcaggctcttacgtttgaaactcaggcttataagcacagaatgatgagttttgggctaaccgaagcagaagctgatggtgagaggagcttgcttagtcgtaacccgagcatgatcgactttagttctgaatatgactgccctacacaagattaccctcctcttaaatgcaatattaatgagaaccaagaccctcttgaggctgatatctatgttgcagatgatgagaactatccaccagctgattctcctcatgggagagtacatttaaagactttggatcgaagactcagccagatggagacgaatcctagctttactcagttgaatagagggagggatgtttcagagaaggggatggttggtgagagtcctaggcgtcaaagacattttaggaggatttcccctactggttcatcaagttcacacttgggagcatctaaagaactaagacctgatgtttttgttgattccccgaggtcccaaagctacagctctaagaaaatggaagatgtctcgtatacagagaataataatgctaaagatgacttgtcggaaataggagatgacatgagtgatagagtttataccattgattctgttcatcacagcagtgtggctcatagtggcggtgtagcggagcagaagattgaggatggtgcttctgatggcaatgttgttttcccgagagaacacacggatcttggtgatcctgatataacgaaactctacatgaggcttcaagcactggaggctgacagggaatcaatgaaacatgcgcttctctctatgaggactgaaaaggctcaaatggtactgttgaaagaaattgctcaacacttgtcaaaggaagttgtccctcaacggagattgcctctacgtaaagcatctattgctgggccattgacttttacgccggtctttaaggtgattgtcatgtttctgtatgatcacaaagcaacttcgtctaaagctgtctcttgttttctactgttctcactctaacttgtttctgtaattttgattcttattcctctgcagtggatcacatcttttgtttcctggaaaagaaaggctcgtcgaagcaagtaagtaacctgtaacaaattttggttactctatgcttcacatacctatcacaagagaaagatctgtgaatctctttgagaaataactattgtcatccattttcaaaccggtgctctcttgcactataatctcgtccttaatattcgaaaaacaaggcaatgtttcacatgatagtttagaaattactgttggattttagggagctgcttatgaaacttatgctggtctctgttccaatgcaaatacgcagatacatgtatgggatgtcaggaaacaacatcggcttgcaaatgcttctagaaaaagtccctcggtcaaggaaatggcgatgtcttaggagcacgcaagtgtgaaacagatccaatcctttcaagccaacaaaatcactctcctgactctagattcgaagcacataatgtcaaatactgatgtgggattggcgaggtaacatttgtcggcctttcttcaacttgaattggattctcgttcttgggttgcagagaaaatgtatttgctgtgcgattttcaatctgttttcctcaatattttaactgttgtataaaagaattgggttgaagaatgatataactcagaggctatacaatctttgtatggtttctaacatgaattgtttcattcatggattcttttttcttttttttatcaatattttggagatggattcatcacataaataagtgaaggaaaatgtaaaatgttcccgtttcaaacctcatttcccacacttgggaaaaggaaaataaaaatatttgttgtcagcattcctcctatatatttgttgaccttaaaatgaaacaaaagaaattttccatgaaatataatagaatgttctgtttgctgaccatgagttgaatagagttaacaaaaagaaaaaaaagtttgtaatcgaccatggacatattttggaaggatcaaaattcagaccatgttctaaagccgagttgctgctgagagtaaaaaacaatatatagatttaacatatttgctctagtctcttgttcaaaaaaagatggtctagaaatcttcgatattgaatttttcgattaccaaaaataaaaataattaggaggggacttacataaaattgttattttattcagtatacgtgaagagtgatttcatttcattgacaaataaacagacacgtgtcatgttttgatagtgaatatttctttgtctaaaaaacatatgttagtggaattcaaaagcgaagaccaattaagtaaacggagccgccatttcttacttccaccacatgtttctcttcttcttcatctttactattattctagatcatcattatatg

SEQ ID NO: 31098 - DNA, 2879 bp, Unknown; identical to SEQ ID NO: 451
  misc_feature (1)..( 2879): 2750-1469P.txt file - cDNA_ID_3038771; gDNA_ID_1591076; Annot_ID_150482
  misc_feature (2)..(3): n is a, c, g, or t
  misc_feature (2524)..(2524): n is a, c, g, or t

SEQ ID NO: 31099 - DNA, 3000 bp, Unknown; identical to SEQ ID NO: 10927
  misc_feature (1)..( 3000): 2750-1469P.txt file - cDNA_ID_3038783; gDNA_ID_2214466; Annot_ID_182827

SEQ ID NO: 31100 - DNA, 3003 bp, Unknown
  misc_feature (1)..( 3003): 2750-1469P.txt file - cDNA_ID_3038800; gDNA_ID_2214467; Annot_ID_182889
ccagatttaacttgtcgttttttgttatgtactcttcaagattactttggtcgttcctgttttattgtctaggaatgtaaataaaacaaaattaatgctagttaagctcagataaacaaagttagaactagaagatgtgtatgttctgtgtcggtagaaaaacaataaaaacaaaatatttgaatttagatatgtttgggcctttacacgtttgtgtgtgtgtgtttgttcacagtttgtttggatggaacattgcctggatatcacttgcaccgtggacatggatctggagctaatagctggctcattcaattggaggtttagtgaattatttgttgtcgatgaaacactagttaaagtcttcattgttgatgtttgatgtttttgtatcagggaggaggatggtgcaacaacatcaggacctgtgtatacaggaagactactcgacgtggttcctctaattatatggagaaacagcttcagtttacaggaatactgagtgacaaagctcaagaaaatcctggtttgtctcaatctttgtttaagttttgttcatgttagtgtaatgttaatattgaaaatcatatattctcattgtcatgtgctttacttctgcagactttttcaactggaatagagttaagcttcgttactgcgatggcgcttctttcagtggagatggccagaatcaggttgaaatcaatcattttttgagttactagagttcataagagacccattgttgtgatttggaacaacttgctagtttctaggcctttggaactctgtagtctataatcgtcaaggctgttattagccacagagaacgcttgatgtgatcttagttctgtagaattgagcagccattggttttgtgtaacatctgtgaactaatgcaaataaaattctttaccttaactttttcaggctgcacaacttcagtttagaggagagcgtatctggagagccgcaatagatgatttgaaggcgaatggaatgcgatacgccaatcaggttttgacacttaaccttctataagagtctgtatctcttccatagcataatatcaagggcaggaatggatttaactatttatattctgtcaggcacttctctccggatgctctgctggtggtttagcagcaatcttgcgctgcgatgagtttaggaacttattccctggatcaaccaaagtcaagtgcttgagtgatgcaggcttgttcttggacacgttagtttatttctcccaagtcaaagattgtattaaagctagttcattttcccttaccttagtaactactactgactcctttgtttctgtaattatagtgccgatgtttcaggcggccgcacaatcaggaacttatacaatggtgtcgtagaattgcaggttggattcctctttcttcacttgaaagtttcttactttacatttaaagagcacaagaaacttaagaaatcttcttcacaatttacagagtgtgaagaacaatcttccacgtatatgcacaaaccatcttgatccaacctcggtatcttatcttttgttctctcattctgatgctgttgcaaaccggtcattcgaagtcttgtgttttgataactcatatatctgtacagtgtttcttcccacaaaatctgatcagtcaaatgaaaactccactttttatcgtcaacgcagcatatgatacatggcaggttatgttttttctccctttgaaaagtgccacattgctactaaagaacagaaagttgatggttaggctgacaagtctctgtaatggtttttaaacagattcaaagcagtatagctccaacatcagctgatcctagtggattttggcatgactgcagactaaaccatggaaaatgtactcctgcacagttgagattcttgcaaggttgttctatagatcataaaaacttgtggacttcaccctttaaagcatcattgtatcactctaatcgtttaatcttttattcgagaacaggattcagggaacagatgcttagagtagtcaagggcttctcaatgtctagacagaatggattgttcatcaattcttgctttgctcactgccaaaccgagagacaagatacttggtttgccgatgattctcctgttatcaggaaaaaggtaaaacctcactcaaatctttcccacacaaacaaagtaacacacaaggaaagcctgtttccactttctagatcttgactttgtctatggaatgtttgtaggcggtggcaatagctgtaggagattggtatttcgatagagcggaagtgaagttagtcgattgcccatacccgtgtgacaagagctgccacaacttggtgttcagatgattgtttgactatgttctttattctctctcatatatacataccttagaaaatttctttctttcaaaaggaaagattttgtatcctttggtagtaaccaatgcctcattggtatatgattaagtgtatcgtggaaaatcataataaaaaaacaaaacaaaacaaagtttgcttaaaaagagttcaatgtaatcaatcacagagaaatgctctttcttttgttttgttttctaattttctttgcaaatgcaagtagttgatcaaatatattagaaatgtcaacattggtaccaaaagaattcaagcctaactaattcttttatgtattataagtgtccaacaaaagcagataatggataagaataataataaaatagtaaaagatagagagaaagtgaaaagagtaagaatatacagagtgtgttgacaacttgacaccctgtttttgtggggggtgtgagtgacagctatctagtgttccccactttgtgtgtgtatatgtgtgagtgttttttttacacctatcatttgctttcaatttctcccagtcaaaatactaacttcttcaacaacttctggaataataatctgaattcttgaagttgaaccctgtccattacttttctccttcttctcctgccttctgaatcttcttccatg

SEQ ID NO: 31101 - DNA, 3000 bp, Unknown; identical to SEQ ID NO: 10255
  misc_feature (1)..( 3000): 2750-1469P.txt file - cDNA_ID_3038800; gDNA_ID_2213639; Annot_ID_181162

SEQ ID NO: 31102 - DNA, 3003 bp, Unknown; identical to SEQ ID NO: 26930
  misc_feature (1)..( 3003): 2750-1469P.txt file - cDNA_ID_3038809; gDNA_ID_2214467; Annot_ID_182879

SEQ ID NO: 31103 - DNA, 3000 bp, Unknown; identical to SEQ ID NO: 10968
  misc_feature (1)..( 3000): 2750-1469P.txt file - cDNA_ID_3038846; gDNA_ID_2214468; Annot_ID_182930

SEQ ID NO: 31104 - DNA, 3000 bp, Unknown; identical to SEQ ID NO: 10966
  misc_feature (1)..( 3000): 2750-1469P.txt file - cDNA_ID_3038861; gDNA_ID_2214468; Annot_ID_182915

SEQ ID NO: 31105 - DNA, 3003 bp, Unknown
  misc_feature (1)..( 3003): 2750-1469P.txt file - cDNA_ID_3038871; gDNA_ID_2214468; Annot_ID_182907
aaaaccttgtgatgtgttgtgtgtttcagtgttttcgaagttgaaaactcgggaccaagaatggtacttcttcagtgcgttagataagaagtacggtaatggtgctaggatgaatcgagcaactaacaaagggtactggaaagcaactggaaaagacagagaaatccgccgggatattcagttgctcggtatgaaaaagacgcttgttttccacagcgggcgtgctccagacggccttcggactaattgggtcatgcacgagtatcgccttgtggaatatgaaactgaaactaacggaagcctgctggtattatgttgtccaaaagagttacttttgaattggggttatctcattttgtaagaatcctatcttatcttacttctttgtctgggtgcagcaggatgcatatgtgttgtgcagagtgtttcacaagaataacattgggccaccaagtgggaacagatatgcgccattcatggaagaagaatgggctgatggtggaggagctctgattccaggaatagacgttagggtcagggtagaggctctaccacaagccaatggaaacaaccagatggaccaggtttgtactttctttatactcaaatgtttcttatatgcataacctctgtgatacatccctctaatgtgaatcatctctcttgattcacaagatattatatttcttattgcaaaagctctttgcttctctaagtgctgtttcagtgggctgatttacttaaactgcacaattccattaagtttgctatcaccttttgtagaactcagctcaaccttacagctttatctaatgaaaggtctctcttgattcacaagatatctaatttttctttatggtcctttttctttgagatttatcctttgattacatgatatttcagacttacaatcttcgtttggcattaaaggtgctcaacaagagaaatatttattgtgttttggttaatctgcaaagtcgatcaacgcgttttggtttgagatattttatgtctgttggggttcacataacttgtaatttgttgtaggaaatgcattcagcaagcaaggatctcattaacatcaacgagctaccgagagatgctactccaatggacatcgaacctaaccaacagaatcatcatgagagtgccttcaagccacaggagagtaacaaccatagtggttatgaagaagatgaggacacactcaaacgcgagcacgcagaagaagatgagcgtcctccttctctatgcattctcaacaaagaagctccactacctctcctgcaatacaaacgtagacgccaaaacgagtccaacaacaactcaagcaggaacacacaggaccattgttcgtccacaataacaaccgtcgacaatacaaccaccttaatctcatcatctgctgctgctgctaccaacactgccatctctgcattgcttgagttctcacttatgggtatctccgacaagaaagaaaaccagcagaaagaggaaacttctcctcctagtccaattgcatctcctgaagagaaggttaatgatctccagaaggaggttcaccagatgtctgttgaaagagaaactttcaagcttgagatgatgagtgcagaggctatgatcagcattctccagtcaagaatcgatgcgctgcgtcaggagaacgaggaacttaagaagaagaacgccagtggacaagctagttaaaccaccgcaacatctctccaggtgtcttcttcttcttcttcttcttctttgcctcttagctgtaatcttcttaatagtatgagctatggatgtagcttcttcagacggatcagaaaccttatgaatctctgttgtaaaattaggataaaacggaacggagccaaccaactaggtctttttattttatccttttttactttggatgtttctgcatcttttgggaacattttcaggctgatccattgtcgtatattatcatctatctatctagtcttttcagacaagaactcgcttttgtttggtttcctctcaagaaatgttcagtctccataaagaaagctttttccttggggtaatcattagtggtcagatatgagggcataatcgtcattgtcatttgaaatgaccttctggtcttccggacaagaaccactctgttgcttgatgtttctgtgtgactgtctccacagtccacagggaagagagcttcttaggtaaagtcgtgattagtggaaatgattgagggtataatcgtcattgactaattcagcgttacgatttaggaatgtggttccgtcaacgacgttagaagacttttgttacacgtaatttgcaattatttgttttttctctaaaagcgaaaagcgcttggtacgattcaagcctggattccatctctctcccattaagttttcaagaagaagttttgatcacagacgtattttcgaaatggtttcatatcttactaggcaatggaatttcgtaggtgttatagagtttggtgtttatattttacttttaactacatcgtcctattatacggaacctgtcttttttttttccacacggaaccctgaatgattgtactttttggtaggtttgttctttattcgagagttgtaaaaaaacattatttacttttaagatgactacgaaagtgtaatttactaaattacttttcattatttactcccaagtataatttactacaaaaagctacgcagtaaaattttgctagggtttattactgcgacataatgaaatgtaaatcgaaaattggtatcgcaatccaaaatacttttttgttgctctctactagcctgcctttctgggaacgcgaaaagaaagacaaaattttcttgcaattgaaggtacctcaaatcttgtgcttatctctttggtttcttcttcgtcaaaccatctgcccaacttgtgtttttgttcttcaggtgaggtttggtgaaagggaaattgagaaaaccctagaacaagtacggtctctattttgctttaatg

SEQ ID NO: 31106 - DNA, 3000 bp, Unknown
  misc_feature (1)..( 3000): 2750-1469P.txt file - cDNA_ID_3038871; gDNA_ID_1972067; Annot_ID_178417
accttgtgatgtgttgtgtgtttcagtgttttcgaagttgaaaactcgggaccaagaatggtacttcttcagtgcgttagataagaagtacggtaatggtgctaggatgaatcgagcaactaacaaagggtactggaaagcaactggaaaagacagagaaatccgccgggatattcagttgctcggtatgaaaaagacgcttgttttccacagcgggcgtgctccagacggccttcggactaattgggtcatgcacgagtatcgccttgtggaatatgaaactgaaactaacggaagcctgctggtattatgttgtccaaaagagttacttttgaattggggttatctcattttgtaagaatcctatcttatcttacttctttgtctgggtgcagcaggatgcatatgtgttgtgcagagtgtttcacaagaataacattgggccaccaagtgggaacagatatgcgccattcatggaagaagaatgggctgatggtggaggagctctgattccaggaatagacgttagggtcagggtagaggctctaccacaagccaatggaaacaaccagatggaccaggtttgtactttctttatactcaaatgtttcttatatgcataacctctgtgatacatccctctaatgtgaatcatctctcttgattcacaagatattatatttcttattgcaaaagctctttgcttctctaagtgctgtttcagtgggctgatttacttaaactgcacaattccattaagtttgctatcaccttttgtagaactcagctcaaccttacagctttatctaatgaaaggtctctcttgattcacaagatatctaatttttctttatggtcctttttctttgagatttatcctttgattacatgatatttcagacttacaatcttcgtttggcattaaaggtgctcaacaagagaaatatttattgtgttttggttaatctgcaaagtcgatcaacgcgttttggtttgagatattttatgtctgttggggttcacataacttgtaatttgttgtaggaaatgcattcagcaagcaaggatctcattaacatcaacgagctaccgagagatgctactccaatggacatcgaacctaaccaacagaatcatcatgagagtgccttcaagccacaggagagtaacaaccatagtggttatgaagaagatgaggacacactcaaacgcgagcacgcagaagaagatgagcgtcctccttctctatgcattctcaacaaagaagctccactacctctcctgcaatacaaacgtagacgccaaaacgagtccaacaacaactcaagcaggaacacacaggaccattgttcgtccacaataacaaccgtcgacaatacaaccaccttaatctcatcatctgctgctgctgctaccaacactgccatctctgcattgcttgagttctcacttatgggtatctccgacaagaaagaaaaccagcagaaagaggaaacttctcctcctagtccaattgcatctcctgaagagaaggttaatgatctccagaaggaggttcaccagatgtctgttgaaagagaaactttcaagcttgagatgatgagtgcagaggctatgatcagcattctccagtcaagaatcgatgcgctgcgtcaggagaacgaggaacttaagaagaagaacgccagtggacaagctagttaaaccaccgcaacatctctccaggtgtcttcttcttcttcttcttcttctttgcctcttagctgtaatcttcttaatagtatgagctatggatgtagcttcttcagacggatcagaaaccttatgaatctctgttgtaaaattaggataaaacggaacggagccaaccaactaggtctttttattttatccttttttactttggatgtttctgcatcttttgggaacattttcaggctgatccattgtcgtatattatcatctatctatctagtcttttcagacaagaactcgcttttgtttggtttcctctcaagaaatgttcagtctccataaagaaagctttttccttggggtaatcattagtggtcagatatgagggcataatcgtcattgtcatttgaaatgaccttctggtcttccggacaagaaccactctgttgcttgatgtttctgtgtgactgtctccacagtccacagggaagagagcttcttaggtaaagtcgtgattagtggaaatgattgagggtataatcgtcattgactaattcagcgttacgatttaggaatgtggttccgtcaacgacgttagaagacttttgttacacgtaatttgcaattatttgttttttctctaaaagcgaaaagcgcttggtacgattcaagcctggattccatctctctcccattaagttttcaagaagaagttttgatcacagacgtattttcgaaatggtttcatatcttactaggcaatggaatttcgtaggtgttatagagtttggtgtttatattttacttttaactacatcgtcctattatacggaacctgtcttttttttttccacacggaaccctgaatgattgtactttttggtaggtttgttctttattcgagagttgtaaaaaaacattatttacttttaagatgactacgaaagtgtaatttactaaattacttttcattatttactcccaagtataatttactacaaaaagctacgcagtaaaattttgctagggtttattactgcgacataatgaaatgtaaatcgaaaattggtatcgcaatccaaaatacttttttgttgctctctactagcctgcctttctgggaacgcgaaaagaaagacaaaattttcttgcaattgaaggtacctcaaatcttgtgcttatctctttggtttcttcttcgtcaaaccatctgcccaacttgtgtttttgttcttcaggtgaggtttggtgaaagggaaattgagaaaaccctagaacaagtacggtctctattttgctttaatg

SEQ ID NO: 31107 - DNA, 3000 bp, Unknown; identical to SEQ ID NO: 10986
  misc_feature (1)..( 3000): 2750-1469P.txt file - cDNA_ID_3038901; gDNA_ID_2214470; Annot_ID_133064

SEQ ID NO: 31108 - DNA, 3000 bp, Unknown; identical to SEQ ID NO: 10986
  misc_feature (1)..( 3000): 2750-1469P.txt file - cDNA_ID_3038901; gDNA_ID_2214470; Annot_ID_182993

SEQ ID NO: 31109 - DNA, 3000 bp, Unknown; identical to SEQ ID NO: 10993
  misc_feature (1)..( 3000): 2750-1469P.txt file - cDNA_ID_3038905; gDNA_ID_2214470; Annot_ID_133062

SEQ ID NO: 31110 - DNA, 3000 bp, Unknown; identical to SEQ ID NO: 10987
  misc_feature (1)..( 3000): 2750-1469P.txt file - cDNA_ID_3038905; gDNA_ID_2214470; Annot_ID_182992

SEQ ID NO: 31111 - DNA, 3003 bp, Unknown; identical to SEQ ID NO: 26937
  misc_feature (1)..( 3003): 2750-1469P.txt file - cDNA_ID_3038912; gDNA_ID_2214470; Annot_ID_182985

SEQ ID NO: 31112 - DNA, 3000 bp, Unknown
  misc_feature (1)..( 3000): 2750-1469P.txt file - cDNA_ID_3038920; gDNA_ID_2214470; Annot_ID_182978
aaagatatgttgttgtcaaaagaaaagttcaaaattgaaaatgcatttacttacgccggctacaccacctccaatgatcacgtacttgtagcttttctcttccgccattaattaataaataaaacttctttctcagtttcgtttttggtatattatgagaagtactgacttggggtttatataaagtggagagacgatgaggatctcgagtcttggttgcctgtatttgactaatctgactcaacttgtatttgacaataattatgtattggtggatgatataatattcatattggaaagacttgactataatataatccacacctttaatgtttctaaatagctattatataatccgaagaaatgatctgctgactaagtaacatgataaacgtacatatcacgttggaattgtctgtcctctcctattacgacgaaaaccattattattttttaactcaaaaaattcaaaaatgtttgtcataaaaacgtgtatactattagctggtacaaacgttaaattaaataattatgtagttaatcatagtttcagagtgtcagataatgaatattaaatttcattggcattattcactcgaatctcaatgatataattaagttacttttatttaaacaattttgttttgggtatgactactttagtgggataacgttcgtgaaaattactagtatatgtcatttgtcaacttaagaacttgcctgatttctacaaagttaaaaaaattgcaagcaacattttcactgttcaaaaccaaagtttaaatgtgtaataagtagtatatatataagaacaaaaaaaaaaaaactgttttactttatgattgttaaaagatactattgttttagaatttgcttcctcagtgatgcttatgaagaagtacaatcacggacaacaatagtggcgagaacgaacggactagtaaagaaattaagggtggagatggagatgaatcatgatgtttatatagtgactttaatgatcttttgttttttctctgtttttctctgttttaacatgagagtcaatctcatttgagtaagttttggatgaaggctttgataccataagaagcggtaaaactatattttattgaacggaaaggttaatatatgcaaaatccaaagccaaacttatatagataacataacataaagagatctaatgaaaactaaagaatatagtagaaatcaaattactaaaaatatactaaaatctttttgtgacatatatatccggtagattgatatcccggtttttgtcatctcttccaatgttgtatctctacaatctccgttactcttaagaaatataaacaagataaatgaaggagatgaaattatgggtgatgaggccatataaaagtgtcgattgcaaaagctcgcttctcatggagagtattgtcatggaaggcaagaagtccgtattccgagagaagcaaatccaatctccactcttccatctcttcataatcctcctttgtgtatcttgggtaatgcaacggcatcttaaacccactgcttggggcctttacggcaccgtttttgtcaagattctccacactttcttgatttttggcatggttcagaaagttaagaagccaaccccccttccccatctctctctctcgttttttttggtttatgatcgattgtgttgcttgtgtgcttatatatagagattacggtgagattacgtgaagaaacggaaatgacacattacatgaattaaagggtacaattttaatccacattaattataccatttatataagccacctcatgagttcgattaaagaagcaacaaggggaatgaattgggttttaatcattgaagatatttatcgtaattaagaacaataccacaaaggggaagagcttttatcaaaagaaaagatgatgtgtgtataaaattggtaagttagtaacgtttggtgaagagcacattattttagccatgaatggaattgcgtgagtaagttaattaagaaggagatgtacgtaattatgaatttataatcacgattcacgaatattattactgcagtctggctgtatatacgtcaccgtctcattcaattataccatgttactttccgtttaagaatgaatattatatttttgcccaaagaaaaagaatgtatattatttacacaaaccagaaaacgtaagagaattaatgaattagggacgtgaagaaactagtaagcatatcaatatatcatgaagaaaaatttctgttggcgttttaaaaaaaaaagttatgcctcaaaagtcagtccaatgttttccacatgctatgctctgggcaagtatatattctttgaaccaccatcgaaataagtaataaaaatttgagataaaatatttaaaaatacttccggtgtcaggaaattgacttatataaattgtagtttataagaatttttaaaatggagttggtttaattaccacatgttgccatggattaattgattcctcctaaaactttatgttaattaccacatgcactacgaaagtacaaattaattgatatcttattacagttaaaaagccagctaatatcatcatcccagttttttccgctataagaaaattaatccgttttatactccacacaacacaacaatatccaaaacatgtttatgtcaaaaagagcaattacagaataataattacacgagagaatcaagaagagcgattgagagaattgaagaattgtatgatgctgtaatagtaatgtgaataataattagtcttttttttcttatgaaataatgaagaaaagtcattgagtacataggaatttgaccgtacgatctgaaatgtttacacgcgaagatttcgacggttgcgatgaagtaccttatgtaatcataaccattgaaacagttgacttttgttgacaaaactatcaaacatcatcgaatcaaataatgcttagaattattgattgcattgcaagaaacaagactaatgatg

SEQ ID NO: 31113 - DNA, 3000 bp, Unknown; identical to SEQ ID NO: 31112
  misc_feature (1)..( 3000): 2750-1469P.txt file - cDNA_ID_3038920; gDNA_ID_1972096; Annot_ID_178601

SEQ ID NO: 31114 - DNA, 3000 bp, Unknown; identical to SEQ ID NO: 11000
  misc_feature (1)..( 3000): 2750-1469P.txt file - cDNA_ID_3038923; gDNA_ID_2214470; Annot_ID_182977

SEQ ID NO: 31115 - DNA, 3000 bp, Unknown; identical to SEQ ID NO: 9337
  misc_feature (1)..( 3000): 2750-1469P.txt file - cDNA_ID_3038923; gDNA_ID_1972096; Annot_ID_178600

SEQ ID NO: 31116 - DNA, 3003 bp, Unknown; identical to SEQ ID NO: 26938
  misc_feature (1)..( 3003): 2750-1469P.txt file - cDNA_ID_3038932; gDNA_ID_2213625; Annot_ID_195824

SEQ ID NO: 31117 - DNA, 3003 bp, Unknown; identical to SEQ ID NO: 26938
  misc_feature (1)..( 3003): 2750-1469P.txt file - cDNA_ID_3038932; gDNA_ID_2214475; Annot_ID_183094

SEQ ID NO: 31118 - DNA, 3003 bp, Unknown
  misc_feature (1)..( 3003): 2750-1469P.txt file - cDNA_ID_3038936; gDNA_ID_2213625; Annot_ID_195823
aactagtgcatctcctgatcgagaacaaaaataaaaagcttgtcgtgtaagttttgtcacaacgtacttatcaaattaagcatccttttacagatagtctaactagtatctcttctgcagattcttcatgacatgtgcttgtgttgattactggggactcgtactttcaaaaattcctaccctcaagtccatttccttcttttccacccatgggaagatggatcagaaaggtagagacacggcattagcttcgtttacagaggcatcaagcggtgtccttctatgcacagatgtcgctgcacgtggacttgacattccaggcatcgattacgttgttcaggttgattgattaatgcttgttatgccatctttgttgcaatggattttgacaggttattgtatgtaactggtgcagtatgatcccccacaagacccagatgtatttatccatagggttggcaggactgcaagaatggaaagacaaggtagggccattgtgtttttaatgcccaaggagacagactatgtagagttcatgcgcattcgaagggtccctcttcaggagagaaaatgctctgagaacgcttctgatgtcatcccgattgtaagaaaacctccacgtatctcttttttctctctttctctctctcgctctcggccacagggtggtttaataataagtgctacaatgtaaaatgcagatacgttcactagccatcaaggaccgggcagtgttggagaagggattacaggcatttgtttcctttgtccgtgcttataaggagcatcactgctcttacattttcaggttcatttttcgccttgtgttgttaaaatatgttagcttttgtaactccattcttttgttccccttaaatttacagttggaaaggacttgaaatcggaaagttagccatgggatatggcatcttgtcttttccttacatatctgaagttaaacaagacagaattggcattgtcggttttacacctgtccaaggcatcacgtttgaggacataaaatacaagaacaaatctcgggagaaacaaagacagcaaaacttactagcaaggaaagacaaactgcaacaagaaaagagagggaaacgcaagaaaagctccaaagaggcggttgatgattctaacaaagcgtcgagaaagagaaagttaacggggaggcaaagacaaactatccaaacagcgcaagatgaagaagaaatgaatttgagattatagcttactggaaaaactgaagaaaggctcaattatagaagatgattttgctaaacttacaggagctcatgattttgtctgataaagaagcaagaaaacatttcaggcttcagcagagatgggaaggtggacgactatttattataactgagatcatgttttgtcttttggttgattctaaacatattggtcagaaagaatttaacaaaaggattctcaaatttaaaaagctctggagtggttttgtttttggtgagaacaagggttggaaaagttctgtaattagaaacgaaagctcaagacacatgtctaaagctattttcaatcctggtgaacataccagccggatttcagagtagagaatatatagccactgttgagagtcacaaaatacctcaacgctctttaagagatgtcaatctaaaatcgccccattatttttccagcttagctttcggcccattatatatttatttgaaaaaaatacccgctcttttattttaaaattttcataatctttcatgatcatgatccactgatccaggattaaaacatggcataaccagcaagtgatccgactaattctagaggtgaaacctacctgataatcataagaaatctattaatccatgtaattagcaagatggattactatataaaatgagatgaacatcaatgtttgtaactttgagaattgtcatttgaaacaaatctcatcttcatgattttatatctcaatctattaatctattataacttggtgatttcattctcccctttttaaaaaactttcttgcacctaataaaattctaatttatgttaataagctcatttgagcataaacctatcttggtttggttacataattgcttttcgttaacaaacatatgaaggttgctggtgtcacttgatttataactttcaaagactttcgtgtacaactccaaataaaaagagtaaaaatgaaagaagaggtcggccaaaggcgaggtcgacgcagatgaaaacgccaggtgtctcagaagaagggagcaatcgaagctggatctctctttacgccacgtcatttttagtcaacatcatgtgggacccatttccttaaccgtcattctccttctctaccgttcactagtttcctaattttgaatttcaattatttattggatttttaatttttatgaagtaatttcacactgacaaatatagtactgtaacttattcaactattcaaacttgctactttggttgctgctatatacgataacactgttatagaaaggtgtatactcattgctcgttggttttaaattggaatacaaacaaatttccagaagataaacaaattattgaaagataacttatgtcctaagtaattggtatgatggtttttactctgataattaaattagtgattttggacaaacggaaaaatcaggaaatcttaaaaatatttgtttattttgtttgatcggtttgttgttgctgaaagtttttgatcgaaaattttgtgattgaatatttagagttactttgtcaaagttggatacctaattaccaaattgcatttccaatctaaatctaacttatacatatgtctgtatgtttgtaactaacataggaacacatatgtcttgttttaacgcatatataattttattttattttgttgtgatgttttgttacaatctaaaatatgtaatagaatttttgaatacttttaatttaaaattttgggatattcctaatgatgatattaatagaccaaaatg

SEQ ID NO: 31119 - DNA, 3003 bp, Unknown; identical to SEQ ID NO: 31118
  misc_feature (1)..( 3003): 2750-1469P.txt file - cDNA_ID_3038936; gDNA_ID_2214475; Annot_ID_183093

SEQ ID NO: 31120 - DNA, 3003 bp, Unknown
  misc_feature (1)..( 3003): 2750-1469P.txt file - cDNA_ID_3038950; gDNA_ID_2684228; Annot_ID_192120
tcacccaacagtggctgatacagaatggaacggaggtggaagcatcaaaagacaaactaatgcagagatgaagtctaggacatctcaaacaggagacttgtctggtgaatcttataggagagatcccaacagagattactcaaccgtaagtctctcctcttgttatatcgtgtaccttaaaccttttggtatgtaattattaagttgctttgggctgtgtcatcagggcaatgcaccaaggaaaaacagaatcaattactcaggaccattgatgcctcctggtggaaatcttgaagatttgcttaaagagcatgagaagcagatccaacaagctgtccgcaaagcacgtgtagaaaagtctgcatcaagaaaaaaccaagctttaacaggacaacaacagcagcaacgttacacaggaagaaatgctcggtagctgaaaaagggaacaagaagccatagaactcataagcgtttttgttgttgtgcctcttctgtgcttgaagccagggattgatacaatgtatagtcgaatttgtttcttaggccaacaagattgactacactataatgtcaagctaccttttgtatatacacaaggtctctctattgagttgagtcaaacaaacaaagatgtatctgcaagggaaagcaaaaaattccaaatttgctacattctatgattctagctcagctcaagtaattaaaacctaccattagctgaaaatctcataccacataacctctgcaacaattccacatatcaagctaaagctactgagcaaaaaactcacgaggaaaaaaaaggctgaattcttgagaaattagcaaacttttttgcataaacaagttcgctctgacctagctactgagtagtgagtactgagcaaacattccacgagaaaaaaaaaaccttaattcttgagaaattcgaaaactttttgcataaacttgaaaagcttaaattagaatcagataatgaattcttcaaaccagaaaaacttcaccgatattcccaaaaccaaatcatatgttttcaatcgaaagactaataaacctaaaccctctgttttctatttcccggcgaagtggccggcgatatcttgcttttttgtaacctctgttttctgtttggcccaaatccagaaaagcccaaagcccatttgggaagatattaataaaaatattttaattaaaaaatagacgggtatgggttcaaagacccgacaacgtacggtattcgggttacatatgaataattcgggtatatatatgtttttaaggattaattagaaacaaagagattacagtaatatactatgtatggtcaaagttgaaactcgtaaattgtgaatttgtgatgttactagatgagctgataattttttccttttttttttgcaaggattgaatccaaatctcttatgatgtttttatttattttccattttataagtacaagactttattatacttttaaaaaaacgtaaagtataataaaattgtaaattttcaatgcgtacttaaggaaagtcgttaaaaaaaatgtaatatttaacaggatgtcaaaaataaaacatatttggtcatacttgcatattttactattgatgatatccttacccacaaaagaaaagtaatttgtctggtttgaaaatcttataatttatgtattttttataaattggtaataaactgtgtaattatatgaaattttcttagtttaaattgttaatgatttgtaggcttattgaagtgcgaaaaagtcgggatgagtaaggctagaaatgttagtaaagaagaaaatatctgaaaacaaaataaaataggcaatgtcttgcttaccgtgaagaggaaagggcattaacccaatgccacacaaaaaaaaactgaatttcgtaggccataattttttcatttttagccttatgtatttaaattgtatagtgcatagtgagtatttgtttgggaagtccacacgctatgtattagaaatttatgcacatgctaatggaagataattttaataacataagtacataactaaaataacgaaaatctcttttggaataatcaacatattaaaagaaaatgaaaattaaaaagaaaaagagaaattgattttgtgttatcaatgggccacttaaaaaaaaaaaattataaacaaaattagtagtaaggttaatctttgtaaccgtgtcttcttctaaatcataaacttctttttttgcttcaattttataagagtatttggctatcatatctatagagagaaaattggtttgataactacgtgagtttgttgaataatttttttaaaggaaagatagataaatagtggtttgaatattttattttctttcatcttatcactatcgaatatgtttttcgttatttggattatttttttaataataaaagccacatttgtttattcgccctaagctatatttagccttagcacgacactgaaaatagaaagagaccagagtcgttagattttacgagtgacttctaacttacgagattaaccgcagactggttcaaaagaccatcctcactttcctaagatccaagtaatcaaaattcactttcactcaaatcacctctctatttaaacaacaacaccactttttcaatcctcattaacaaagttaaaaaaacaaaacaacaccatcttcactttttttttttcttcttattttttgttttctttctctatacatattgtatcaaaaaataaatacattttcctgtattttattttttttgtgagtattaaagaaaacacaagacaagaatgacatacacagcggtaactatgctctctctctgcctaataaatatcttttcatcttatggcaaagagtgtcgagttttggcccgacttgtaatgtagtttcatcaatgagactcttaacattatatcatatcattgcctcactttattacattttttgtaacgttacgcgctgttagttctcttaattcattatattaagcatg

SEQ ID NO: 31121 - DNA, 3000 bp, Unknown; identical to SEQ ID NO: 26943
  misc_feature (1)..( 3000): 2750-1469P.txt file - cDNA_ID_3038950; gDNA_ID_2214475; Annot_ID_183074

SEQ ID NO: 31122 - DNA, 3000 bp, Unknown
  misc_feature (1)..( 3000): 2750-1469P.txt file - cDNA_ID_3038961; gDNA_ID_2214476; Annot_ID_183150
aagtatagaaaatagaaatatgacgtgctaaattgagctatggacaaaatcatatatgagaaaatgaatgtagatggatagagtcgtcccacacttaaggttggtccacaatgaataccgttggaggcttcgcaggcttttgttctgtccttgtctctctctcccctaaaaaaaatttgttaccgaaaaattcatttgaattaattttggtcggtatgtgtataatattatacaattataatatatttctaggtttagacatttttttattttatttttcatgaagtaaagaacacaaacaaaaacccataaaataatgtaagatagataaaacaagaggatgtcgtcataaataaattggaatttggcatttaatgaaaaagggtgaaaggtgcttgacatacacgcgccgtagtttcttacccggaaagggattggtattgatgttaactagaccgggcccggtttaggctggggcggcggccgaaccgaccacctggctactattcttgtttgtattcgctgattctgcaaatctaaactcggatcttttatggacttggattttcgggtgggtggggttctgctaaagagacggcgctcttgtcattttaagtcgggtcactgcaaaacggtgaaccctgtgactgtatttagagtctcgttacgttggatctctctccatgaaccgtccaaagtaggtcaatttttgtgggttcactcacgtatacaacgaagtacggcgctatttaattttccgaaaattttgaaagagacttttataccagaaaagtttgtaatccaaatttttaatatattgcagatttggttcgttttgggcttaaagagcttttattggtgtggtggctcaaatcgtttttgtaggcgtcaggtcaggcccattttcaatgtcgcttgctcatttgatacgctaatatagggctttgcttaagatttgaatgggccgtacccccattttgcttcatgagaatgggatggtaataaagaaaaaaatgacaggaaacaatgaattggtcacgaaaaaatgttgtattactttttccaaaatgcacctttgagaatcttaagattcaatcatacagtgaggtccatgtccacaataagaaatcaaataccaaacaaagtataaacgtgaattgtaagctaggcagtgtatgaagatgcatttgtcttaaagttaccgaatctgataaataatattattcgatcgactttagatcgctttccatgcagatttatgcaattatctggaagaagaacaaaacaatatcttagtttcttcggcctcactattcgacttctatcttcaatatattttcgcgtatttttttatttgaattatttggtttttggttagttaactaaacgagcaacagaaccaagatcgaattgcgtttgccgtttggattcaattattgtagaaaattcgacttttcagacatttgttacgttctttctagtagttatattagttattatatgtggagtggaaagagatgaaagtagatgtaaaacataagtgatttcttcatagtgattttaaaactttttgttgattttcaaaattatataatatccataaaaaatagcctatgcgtgttggatgcttacaaagaagaatttgttttcggcgttagccaaaagtcgatggcatttgctaaaggtgttatttgagtggaaatgatctagaacaaaaacgcattgatataccaccactataatgatttggagacgtatctagttctcatcaacttttcaatagtaaacgcattatcaaggtaaaccgaagagttttgctttatcagtgtaccatacacacattaatagattgatggacgttagtgactttggtattgactttaacgccaaatggacatcaattctgcaaggcaatgcctagttccaaagcaggcgttacttaacatttaactaaaggtagtgcaaactggttaatactttttaacggctttggcaggaagagtctcgactaaaaggagaggaagagatgagatcgacgaagattttcatatcataaaaagtaatataggtttttgaaaatagttagaataattatttttatttttatttttatgggaaagaagttgcacgagtcggtccacagaatgacagaacaaaagcattttagaagtttagaaccaaccaatcactatagttttccacttgtccggtatctcattggttcatcgaatattaacttacatggaaacagtaaaaagcgtggaataagtcggtaaaactgaaatctaaaaatgaaaagatttcgatttcgatataaatacttaatctttataaaataatatcgaaatcttttcatttttagttttcagttttacacttttacttgataaatttaatacatctgttaattttttttcttctaaaattaacatatgatatctattcgggagataaccctaagaaaactgataaaaataaataagttactttttacaaagtcgaataaattatttacccttctgctttaatggcaattatcttaatattgcaaaaaaaaaaagagagaaatattactacaaaacagaagcaagcaagtgaaaccagaccagaagagagaggaagacgaagagagaaacagaacagagtagggatcgatagaccgtggaatctcagaatcacaaacactttgcaaaagggttttcaattcctatttatttacaaagaaatcatcaatagtagtggtctctagggttttgcttgctcttcttcgtgacccctttttacctgcaaacaacaacttcaaaattggcgtgtttcgtacggtctatctaaccctaatctgtcacaaaacactcttcttctctcacccctttttctgggtttattcaattctcgtgcttttggttctgttttcttctctggggatttggttttcttgagtgagtttttctcctctttcttatgttcttgatttgattattatatagaattatggtaatg

SEQ ID NO: 31123 - DNA, 3003 bp, Unknown
  misc_feature (1)..( 3003): 2750-1469P.txt file - cDNA_ID_3038992; gDNA_ID_2214480; Annot_ID_133246
tcctccaatctaaaaacccatatgagtaatctcgacattagtaataaactaataatgcattaatagcctattagtctgatgttcacaagaggtgtacattacctttagtacagcaacaccacccgaaagcttagccaacctttcttgcaacttctccttgtcataatcagaagtgcttgcttcaaccatggatcgtatctgcgtggtttaataaaaattcaaaacatattaaaactaccagttggaaaaaagggcaaaggtatatgacactgaaccactaaatgataaaaaagcgaaaaacacgctaacctgttcacatcgttccccaattgcttgcttgtcaccagccccatcgagaacaacagtatcatctttggataccgttacctgttaacaaatgaaaaccaagttatcagaaggtacaagggagaaagagagaaagcagaaggaattggaccaaacgaaccttcttgcagtttccaaacatactgaggtcaatgttgtctagattcatacccaactcttctgttattacctacaaagtgaaatcaccaaagacacattatggctcatccgattagtgtgggtgtgatggtcttggcagttattataaaaagaaacatgggcatgcctgggctccagtgagggcagctagatcatgtaaattggcctttcggttctctccaaaaccaggggccttcacagcacagacctataaagcaataccatgtacatcaatccaatcaaattaattttttactaagacgttgtaaggaaaaggcaaataacaaaaggctgaaaagaaaaaccttgatattagcacgaagtttgttcagaattagggtggcaagagcatcgctctccacatcctcagcaacgatcagcagcggcctttgcttctgaaaaatggcagtgaaaataaatttcgatcttcagatcaaagtaacttaatgaatatcagacactattgacagtgaagaaatcgccaaattgtttataccttgagggccagttctaatactttcaccattgcgtttatattggaaattttcttctcgtggataagaatgagaggatcttctagttcctgcaacacatattcattcagagcaaattaaatccgcaattccttaaattgataaagtaacaaggtgggaatccttacacatttttgtgttttcgggttagttatgaagtacggggagatgtatcccctgtcaatcttcataccctcaacaacttccagctcattaaacaaggtcttgccatcctgaatcaagagatgataacattggtcaccttaaggaataagcaaaataatttgacatttagggataaaattcaactcacttgaattgtgatcactccctctttgccgacagtttccatagcctttgcaatcagttcaccaatttccctatctccattagctgatattgttccaacttgggcgatttcttcagaggtgctaatcatgcgtgctcggctctgcaagttcgtcacaacagtatcaactgccaatttgataccacgtcttaggtccattgcattcattccagcggcaactgatttacaaccttccgtgaagatagctctagtaaggactgtggcacacgttgttcctgtaacgcataccatatattttgtcagatacaaaaacaccgattaatatgagtagataggagactaacaacccaattagcaaaaacagaaaaaacgttttaatccattgaaagggaacacttaccatcaccagctacgtcatttgtggcgttagcaacctgtttcacaagactggcaccaacgttcttaattctatccttgaactcaatgctcttggcaacagtcacaccatcctttgtcacctttggtgcaccccagctttgttcgatgatgacattacgacccttcaaaaatggttttagacatgtagtatcagagagtgtgagggtaacaaaacagacgattgttgatacttgtcaataggtcgtcacgttatctatttttaactagattcacttacaatacaagtctcttacacagaaattatctgaaacataagtttataccttgggtcccatagtgactttaactgcatcagcaagatcctcaacacccctaagcattaaagcccgagcttcaacaccgaaccttatgtcttttgctgcataattcctagtagaattgagcctgcttccaatctaacaatacacaaattcacatcaatacatacccacaaacggctaaaccacaaattagatacaaaatgaagaacacgaacctggcttgtacactttctggcaatcctgttgaaacaaagaaaaataaatcccatcaataaatgaagcaacttccagaaatacaaagaaaatagaagatgctaaactctccaatggcagagaaatattcaattcaatccgatcaaaatccgattcaattcccaacagtttctcgcaactttccgatttcgaggatccaatcagaaacaaattcacagaaaataaagcagcattggaatcatatacacaaagaaaaccaaaaagtcgaatagatctacctagctttggaagcaacgttggagacaagccgatacatggtgattgattctctcacacaaccgagaagattgcaattaattcagatcagaccgaactaaagaagctaaattgacaaattctctcactcgtagatgaggagaaatgaagcagatcgtcgaagattctataagcagtagggtttagggttttacgttttctccaagctcatcattgcttggtcgagttttagcctccggttttggatccggttcgagttttgacccggtactattttaatatgggccttttaaagcccagttcattattacaacattttaaaaaaaaagtcaccaaaaaaaagatttttcatttcatttcatttctgattgtctttctcagaatccctagaacacacactgattaacgaatcaaagatcgatttggggatcaatcgaggaagaagatg

SEQ ID NO: 31124 - DNA, 3003 bp, Unknown; identical to SEQ ID NO: 31123
  misc_feature (1)..( 3003): 2750-1469P.txt file - cDNA_ID_3038992; gDNA_ID_2214480; Annot_ID_183316

SEQ ID NO: 31125 - DNA, 3000 bp, Unknown; identical to SEQ ID NO: 11157
  misc_feature (1)..( 3000): 2750-1469P.txt file - cDNA_ID_3038996; gDNA_ID_2214480; Annot_ID_133245

SEQ ID NO: 31126 - DNA, 3000 bp, Unknown; identical to SEQ ID NO: 11147
  misc_feature (1)..( 3000): 2750-1469P.txt file - cDNA_ID_3038996; gDNA_ID_2214480; Annot_ID_183315

SEQ ID NO: 31127 - DNA, 3000 bp, Unknown; identical to SEQ ID NO: 11144
  misc_feature (1)..( 3000): 2750-1469P.txt file - cDNA_ID_3039010; gDNA_ID_2214480; Annot_ID_183305

SEQ ID NO: 31128 - DNA, 3003 bp, Unknown
  misc_feature (1)..( 3003): 2750-1469P.txt file - cDNA_ID_3039026; gDNA_ID_2214481; Annot_ID_133276
tatttgtatatacatgatatgtgagcagaaatatctgagatagaagcgaaagataaggaatgtctaaaaggatacattgatgcgcctttaagctattgtatggctaggatttatccgtcgttgtgttatcgaaattgtcgtttttacaagggcgcgaaaggtggaaaatgcgacggtcttaagtgcttctgcgacttctgcagcgacaagcctttttagtcagtttctgatgagaaatgtttgaatcttggcatgtataatggtttgtgtaatgattaaaggtaaacgaacaagtaatagtcaataagtaaaataaaaattaaaaacgctagactttgattgtgttatcactaaaataaatgaagataagtgggacttcggttgtggatcactcacgagtgaacaagagatcttgtatttggaaaaactagataattgatgggaagcttcataaaaataattatctaaataaataaaatttataatatatctcgtgaagaacgagagagagatggagatatcttcgaaacgagtgaagacaaattttattattttgatttttttgtttgtttaaagagaagatatgatatgagagcatattccttaggcaaactatgctagttcccaaattcacccactacacaaacacaatgaggtctactagaaatataatagttatgacagctaatgactcgtggttctcgtggttgttgtcctaacgatgaagatatatagcttagcaccacaacaagtgttgagcataagtccatatttgttaactccaactccaaagtgatcaaagagagaaagagatagagaatcgccatggcaaagatgtcagcactttctatcttcgccatctttatcatcctcgttctggttatctttggtaaatttatttctcacatatttattcaactttatgattcacaggatccaaagagtatttctttcggtgatagcaataagtttcattatatgtgattttttatatgcttaaatctgtatgtacatatatttgtgcagaaatacctgagatagaagcacatgatagcgagtgtctgaaagaatatgggggtgatgttgggtttggcttctgtgcgcctaagatatttccgacgatttgttatagaaattgccaaaaggacaagggggctaatggtggaaaatgcctctggggagagggcggtaaagtgaaatgcttatgcgacttctgcagcaatgaatcttttaatcagtttataagtcttacttgaaacttgcatgtgtcgtcgtttgtgtaataagcaaggctaatgatccaagaaataatgtaacaatgaataagtaaaataaagaaccgctaggctttgctagtcttactactattattaaataaggatacttcaatctcgttaagatcgatctcgtagaagatcaatccctttctctcttttagccatctgaaaacaaatcaagtactgcagatttgatttgacggatagaagtatataacgttgtattgataaatgataaacccaaaacaactaggtataatgcgataatttaaataaacgtataaacgacatatgagtttgtgataagtgttggatgagcaaccaaaaataaatcaagatccattaagagatttcatcgtaaagataagtgtttttttttttttttgatgcaattttatctcttactatacattacctaattatggcgtcggcttcaactttgtgttgaaactgtaaacccaaacaaaaaaaaacaaaaaaatatgaggttagatgcgacttcgctttccgtaattatgatctttattgttacagatgaacaagacatttttattataaaatacagaaatgacgaagaaattaatggtatttatcatatagtagatagtaaattagtgtgttctgtcgtaaaaaaatattaaataatgtgttccaaatgatcataaatcatgtacgacaaaaagaaagtcataaagcgtccgattaatttatggctaaatccaacggttagaaattaacttcaatttggtgacgtgtgaacaacaagatcaatagattctcggtgagaagaaaataaaagaaaaatggggatatcgggttcaaagcgagttacgacgattctatctaactcgcccgagtttgactcggcttgtgactcagcatacgacgaatctctctctcttgcacagcatgctttcgccggagttcgtccttaccagctcgtctccgccgccgcccacatccaccggaatctttccgctcttcgtttccctctaatcaccagatggctctcttctcctccgagtcaatcccaagtcgactcagctctccgagtcaccgtctctcgagtcacggcggcggatgaggaggagatcctcgggcaagaggagttcaagaaatgggccgtcgaggttttcgcggaagccgttgtgggaaacgcgaggaagacaatagcgagtcggattccgttaggaatcgtcggaatcggtgggatcggcgccgtgactcggtcgggtcaaaacttgatcggagctgcgattggtgtgtacgcgataggagttgctacttccgtttttctaagcctcactgattagaagaaaagattacgttgttgttcttgatttgctgaaattaataaattttaacaatcttgtttaaacatcaaccctatatttgaacaatcataaacttcaaactcttacatgtggtttgattgctaaacataaacatatctgtttaatccaagataaaagacagaactagtggagcttaaaaaagatcacgtgaaaaacgtctttacctacaaagcaatataatccagatttgcccaatctagtagggactgttcgtgcctccgatatttgtagtttcctttttttttggctccgaatatttatttgatattaataagattttacaaaagaagctcaatcaatcatttcatatcactttaaaagcagcaatgtccgaatacatctccaaagtaagcaataagcaaaggaaaatg

SEQ ID NO: 31129 - DNA, 3003 bp, Unknown
  misc_feature (1)..( 3003): 2750-1469P.txt file - cDNA_ID_3039026; gDNA_ID_2214481; Annot_ID_183364
gcaagtttctttatatgtgaattttatttgccaaaactaatttatttgtatatacatgatatgtgagcagaaatatctgagatagaagcgaaagataaggaatgtctaaaaggatacattgatgcgcctttaagctattgtatggctaggatttatccgtcgttgtgttatcgaaattgtcgtttttacaagggcgcgaaaggtggaaaatgcgacggtcttaagtgcttctgcgacttctgcagcgacaagcctttttagtcagtttctgatgagaaatgtttgaatcttggcatgtataatggtttgtgtaatgattaaaggtaaacgaacaagtaatagtcaataagtaaaataaaaattaaaaacgctagactttgattgtgttatcactaaaataaatgaagataagtgggacttcggttgtggatcactcacgagtgaacaagagatcttgtatttggaaaaactagataattgatgggaagcttcataaaaataattatctaaataaataaaatttataatatatctcgtgaagaacgagagagagatggagatatcttcgaaacgagtgaagacaaattttattattttgatttttttgtttgtttaaagagaagatatgatatgagagcatattccttaggcaaactatgctagttcccaaattcacccactacacaaacacaatgaggtctactagaaatataatagttatgacagctaatgactcgtggttctcgtggttgttgtcctaacgatgaagatatatagcttagcaccacaacaagtgttgagcataagtccatatttgttaactccaactccaaagtgatcaaagagagaaagagatagagaatcgccatggcaaagatgtcagcactttctatcttcgccatctttatcatcctcgttctggttatctttggtaaatttatttctcacatatttattcaactttatgattcacaggatccaaagagtatttctttcggtgatagcaataagtttcattatatgtgattttttatatgcttaaatctgtatgtacatatatttgtgcagaaatacctgagatagaagcacatgatagcgagtgtctgaaagaatatgggggtgatgttgggtttggcttctgtgcgcctaagatatttccgacgatttgttatagaaattgccaaaaggacaagggggctaatggtggaaaatgcctctggggagagggcggtaaagtgaaatgcttatgcgacttctgcagcaatgaatcttttaatcagtttataagtcttacttgaaacttgcatgtgtcgtcgtttgtgtaataagcaaggctaatgatccaagaaataatgtaacaatgaataagtaaaataaagaaccgctaggctttgctagtcttactactattattaaataaggatacttcaatctcgttaagatcgatctcgtagaagatcaatccctttctctcttttagccatctgaaaacaaatcaagtactgcagatttgatttgacggatagaagtatataacgttgtattgataaatgataaacccaaaacaactaggtataatgcgataatttaaataaacgtataaacgacatatgagtttgtgataagtgttggatgagcaaccaaaaataaatcaagatccattaagagatttcatcgtaaagataagtgtttttttttttttttgatgcaattttatctcttactatacattacctaattatggcgtcggcttcaactttgtgttgaaactgtaaacccaaacaaaaaaaaacaaaaaaatatgaggttagatgcgacttcgctttccgtaattatgatctttattgttacagatgaacaagacatttttattataaaatacagaaatgacgaagaaattaatggtatttatcatatagtagatagtaaattagtgtgttctgtcgtaaaaaaatattaaataatgtgttccaaatgatcataaatcatgtacgacaaaaagaaagtcataaagcgtccgattaatttatggctaaatccaacggttagaaattaacttcaatttggtgacgtgtgaacaacaagatcaatagattctcggtgagaagaaaataaaagaaaaatggggatatcgggttcaaagcgagttacgacgattctatctaactcgcccgagtttgactcggcttgtgactcagcatacgacgaatctctctctcttgcacagcatgctttcgccggagttcgtccttaccagctcgtctccgccgccgcccacatccaccggaatctttccgctcttcgtttccctctaatcaccagatggctctcttctcctccgagtcaatcccaagtcgactcagctctccgagtcaccgtctctcgagtcacggcggcggatgaggaggagatcctcgggcaagaggagttcaagaaatgggccgtcgaggttttcgcggaagccgttgtgggaaacgcgaggaagacaatagcgagtcggattccgttaggaatcgtcggaatcggtgggatcggcgccgtgactcggtcgggtcaaaacttgatcggagctgcgattggtgtgtacgcgataggagttgctacttccgtttttctaagcctcactgattagaagaaaagattacgttgttgttcttgatttgctgaaattaataaattttaacaatcttgtttaaacatcaaccctatatttgaacaatcataaacttcaaactcttacatgtggtttgattgctaaacataaacatatctgtttaatccaagataaaagacagaactagtggagcttaaaaaagatcacgtgaaaaacgtctttacctacaaagcaatataatccagatttgcccaatctagtagggactgttcgtgcctccgatatttgtagtttcctttttttttggctccgaatatttatttgatattaataagattttacaaaagaagctcaatcaatcatttcatatcactttaaaagcagcaatg

SEQ ID NO: 31130 - DNA, 3003 bp, Unknown
  misc_feature (1)..( 3003): 2750-1469P.txt file - cDNA_ID_3039070; gDNA_ID_2214481; Annot_ID_183349
tattcccttttgaagccatgaaacaaacatttcctttaggataaacgcaaaaaaatagaaaagatttcctttggtcaatatttgctcatttggttaaggtcaatttagattaaacgcttgccttgatcatttgggtttttatagaatatataaaatttatcttatcaagtaagaaaaaaaaaagcattaattatatcagttatcataaattgaaacttttaacattagttgataatatctagattctgggatgtgtatatttagtttgttgagattcttttataatcattatcttttttctttatctcaattgaaagttgaagaaaatatatagagttcaataccaaaatagttcggtaagaattgtgcatatctctatcttattgacaacgaaccatttgtatttattgtatagaacctcactttcaaatatatgattggcttatgtagttggttaacatttaatacatctttttgacaattcatatgtttttaaaaaaacttcaaagcattccttcgacctttcttgcatttttctttacatgagagacatgttttatctaacaaaaaggacataatagtgtgtattttcctaaaggtaattaagtttttcttaattcagaactttagattaaaaaaatcgaacgcattaacaagtatcattggtgaccgacatgtgcttattctcaattaaattagtaattgaataaaattaccaaaccaaaaccggttttcagacacgcaactgaaagccgtcgatatttaaagggtttatcagaagtcagaaatctagcacgacagacaaaacataaaagatggaggaaaaaagagaaaacactaactcgatctacatagttcccgagctattggaagatattttccttcgattgcctttgaaatcaatcctgaaattcaaaaccgtatcaagacaatggagatcaatcctggaatccaagttgttcgtggagaggcgcgggaatcttcaaaagcaccaccggaaaatcctagctgcttacaactgcaactactttatgcggccgagtatcttccctgagtctcgtttcgaaggggacgaagagatcgtttatctacactgcgacgccgcgcaaccctcgatgacttgcgacggtttactctgcatcaccgaacctggttggtttaacgttttgaacccatccgctggacaactccggcgattccctcccggcccaggtccagtaaaaggtaaaatctaacattatagttgtttgtttcttgcagtgaaagaaattaaaaatatttacaacttgcaggaccgcaggaaaattggctattgggattcggtagagacaacgttacgggcaggtataaaatagtgaggatgtgttttcatgattgttatgaatttggtattcttgatattgaaactggtgtatggagcaaactgaggtcacctcctcataatatgcttccgggaagtaaatcggtgtgtgtgaatggatcaatctactggttacaaattagtgcgggttacataatattagctatggatcttcacgaagaaagctatcatggtgtccaccaccttccggctacgtgggtcacgcaggaaacccagttagtgaaccttgaggaccgtctagccatggccatgaccaccaacgttgggcctgaatggatactagagatctggagcatggatatagaaggaaaaggatggagcaagggttactcgtggagcaagagttactccataagtttagcccatggagttggtttttcctggccatggcagaaaaggtggttcactcctgtgtgggtttctaagcaagggaatcttctcttctacgataatcacaagaggctattcaaatattattcaggaacagatgagattcgttgtctctcctctaacatctgtgttatatcttcttatgttgaaaatttggccccacttccgttaaaaccaagccatacgcatcatgatcttgggaattcgaattccaagttcagcacgtccagatgccacttgtttccgacgcgaggttcttggatatccaaagttttgtttacctctatactatttgggtatatctgcttacctctctagaagtttacttatttagtatcaaactattgttgtggttctaaaatcttgctatatttttaaagttaattcaattaattgttgcttttatagtttactctactattttattaaagttataatgttaagatccgtaagtaaacattgtttaagcattaattagattattatcaacattgtttatttatgagaaatcctaatatcaactatcataaattgaaacttttatacattagttgataatatctcgatgatattaaatatgatgtgtatattttagtttgttgagaatcttttatataatcattacctctactgaaagataaataaaccaaaacaaaaatcagtttgttcaatactaaagtttatttcagttcagtaagagttgtgcctatcttattgacaacgaacccccccttgtattatttgtataggacctaacttcatacccatttttcaaatatatgattgattgccttatgtagttggttaacatttaatacattttcttgacaattcatatttttgaaaaaacttcaaagcattccttcaggcttcaaccaagctcttttatttctgaaatcactttccttgcatttttacatgagaagacatgttttatttaaccaaaaaaaagggacataacatttgctagtttgtattttcgctcacacttgttgccgttaacctttttcctaaaggtaattagtttttcttcgtttagataaaaaaaaatttggaacgcattgagatgtgaattacaagtcataattggtgaccgacatgtactttttctcaaataaattaattgaacgaaattaccaaaccaaaaccggttttcagatatacacttaaagtcgatatttaagggtttatcaaaagtcagaaccacgacgacagacaaaacataaaagatg

SEQ ID NO: 31131 - DNA, 3000 bp, Unknown; identical to SEQ ID NO: 11163
  misc_feature (1)..( 3000): 2750-1469P.txt file - cDNA_ID_3039078; gDNA_ID_2214481; Annot_ID_183346

SEQ ID NO: 31132 - DNA, 3000 bp, Unknown; identical to SEQ ID NO: 11162
  misc_feature (1)..( 3000): 2750-1469P.txt file - cDNA_ID_3039082; gDNA_ID_2214481; Annot_ID_183345

SEQ ID NO: 31133 - DNA, 3003 bp, Unknown
  misc_feature (1)..( 3003): 2750-1469P.txt file - cDNA_ID_3039086; gDNA_ID_2214481; Annot_ID_183344
tgtaatatatctattaaattaacacacaccaaaatcatattcataggattgggttcatgcctagtccaaatgggtggaggagaaaagcatgattcatgcactcgtacccattttttcttttaaaactattataaatggtatgtttatttttttgtactaaaaaaaggatgcttttaaaaatcctttaaaaattctaaacttagaggatgttattggtttatgattttaaaagagtttttgtgacttaaaagtgtcatgtaaaatatgttgttattcaatcataatttttaaaagtttgtaaaagttttgtgttattcaattaaaacaaaaaaatctctcaaaattcaattatcacagattaaacatcattcattattctcagaattcatattgtttttaaaaatttcataacaaaaaaactacacattttacgaactttatatttgtatatctacgtatatttttttgttagccaattttcatagaccaacattctttatcaaattgccacataattaggcacaggcttccgtctacgaagggctttgatgttcttacgaaattattcaaatcacattcattttatacagcctttttaaacatatttattttagtatttacatcaaaacatattgaacattcccgtctacttcatccttttaaaatcacattcatgttatacagccttctttatctaaacgacggaggaaaacaaaaaaacgaagatgcgcttttggttgcatctgtaggactggttggttcgaacacttgttaccaaagaacaaagcgtctctcttggtcaggcaagttttagctctcaaataaccaccaacgcaaaatgatcgcagtcaagactctttgactcttatcttttgtattaaagataaatgaacatgtgataagaataataacagattagatgttgcatgtaatactactagactagatctacagaaggatcaaagaaagtagtaccaaagtagacatcaataatgaaattgcaagcaaaacagaataaatgttgtctcctcgattgcaagcaaaacagaataattattgcaaattctcccctcgatcatcttgtgttagatatctgtgccgctgaagacacttctctcgaaaggattcgataaaaatcacagatacacatctcccaaactaacaacacagcacaaccaagcaatgcaaaagcttttcaatgatagaatccagctcccatatatcagcttctttaaagatatcaccggtaacaagtttgttacagttggacattcttttctagaatttccaggaaaaccaacatcctagtatcacacaaaagaaaactcaagttcatatataccatgaaaaaggtagatctgctgtttcttataaaaccaacatacacccgtgtctgaattaataccatctcaaaaacccaactactctaaaaccatcattatcgcatcaaattcactacaagaaaaaacaaaacaaaaccaaagaatccagctcccatatatatctaaatatgctataaaacatcaattgtaacagttttgttacagttgtatcaaatgagtgagtccattgttttccaatatttccaggcatatacaagaacaagaaaaccaacattatttcagggactaaaaatcattccagggctaaaagaagtgctctttcaaactcaagttcagataaatcatttgtatgtcttaaaagacaaaactgtagctgcttttaatttagaggaagacatgagaagacatcagatcaagactgcctccaatcgtgataagaagctaataaataatgtaggcaccatgcaaaaggttgctctgctgtttcttataaacccaacaagcacccgtgtctgacttaatgccatctcaagaacccaacaactactctaaaaccatcattatcgcatccttatcaccacaagaaaaacaaatcaaaaccaaagaatccaaataatattatgtcgccaagagtattgaatcatgaaactatagagaaataagtttcatgggtcttcctctggcatttgatctaggctccaagcggcagtcaggtcaccattaaaagtggcgcctgctgttgactcgataaaaatggagcctttatctcgtaaaacaaaaacattcgaaaacgcacagatctataacaagtttcaaacgaaacgatacatgattgatgcggagaaagagagagaatcgagattatatagtagtgactgtggggaggagaagcaaaaccctagcattttgaactgtgagaataacgggcttttaaactgtctttattaagcccaatcactcattacttgggcccatcatagtcatctatatatattcagaaacgatggcttgttgaaccaatctcacaagtcacaagtcaaaatgacgtagttttgacttcgagcgatgtatttgcatatttggtaaggttttgcaattgtttataagaaaatcagaaatttttgagagatccaactgaaaaaaattaacatctatattcattcatacccataatggttatcacaaatattattatttattatcaaaattcatatatatgttaataaaagttgggttcataacataaaaaacactttcactaagtttatatttgtatctacgtattttttttgtttttgttaaccaaatttcatacacccacactctgtgtagaccaaaaacaagtcctcaaatttcatatataggcctgcctaaaggccaaaaaagttttgttgcccatttacaaacaaaaattccaaaaatgttaaaattttgagccatcaatttttctatttctaaacgtatataattaacaataaaagcgatattcaaataccatccacaagaaacttttaacaagttgtcttaataagtaatttactatacttggaagcttggcttaacatataaatacactaatagttaaaccatattcaacagccagaatattcaaaggaaaaagaaaaagaaaaaaaaaatacattactagaagaaaaaaatg

SEQ ID NO: 31134 - DNA, 3003 bp, Unknown; identical to SEQ ID NO: 26952
  misc_feature (1)..( 3003): 2750-1469P.txt file - cDNA_ID_3039097; gDNA_ID_2214481; Annot_ID_183338

SEQ ID NO: 31135 - DNA, 3003 bp, Unknown; identical to SEQ ID NO: 25393
  misc_feature (1)..( 3003): 2750-1469P.txt file - cDNA_ID_3039100; gDNA_ID_2214481; Annot_ID_183336

SEQ ID NO: 31136 - DNA, 3000 bp, Unknown
  misc_feature (1)..( 3000): 2750-1469P.txt file - cDNA_ID_3039141; gDNA_ID_2214482; Annot_ID_183400
ttgtcatctgtaattcgactcctccacccacaaaatatttggataggctcccgacatggaggccatcactacgtaaatgcaacagtgacaaaataaagtataagaaaaacttgattatcatcctatgtaaatatttatatatctaagaggaaccgtgataagattcttaaactgatctaagtttttcaaagtaaattgcccgttgaacatgatgatgcattgattacaagtcttttgttgtataacttttaacacacaaaaatagtattttatcaacaacaaaaaaaaaaccttcaacaaaaatgtgaggtatgatcttatgagttatgaccaacgtaaaatgaagtaaaagacaaattaataaatacttaagtgtattgaagcatgtgcaagtatgggccacttgattaggaatcgaagttggtctaaccgcaacatttgcatgtggccacaaccttcaaagtcccttgatcttattatatcattaatgatccattcacatttttttcttttctaactgtttaattttgttgtccacaaacatattttacaatacatatataaatctggccgcaacaaaaaataaaataaatatatcttactctgctcaaggttaacggtggcatacattgttgactttgcttctagttatccacacaagtcacccatttggccatttctaaatttgatgttccatttcgttggagaaaaaaacccctatgtgtgtattaatgtatgaaagaataccaaaagataataaggatattcattgggatttaacgagaaataaaaggcacaattctctcgcaaattggtcaaaaatacgaataaataaatcaactaaatacccaaaaaggtgaaagaattagagacaccccaatgtacttcatatagtaaacatttaaatatgattatcgcttggcacaattattcactcgagtacccctatatatacccattccttccatttgtagattccatattattcacgattctcatcaaatcatctccgatactcacaaccgaaataactaacccctcctcaacaaaaaacaacaaaacatgtacactccatcatacttaaaatattcaataatctcaattatatccgtattattcctccaaggaactcatggagacgacggaggttggcaaggtggtcacgccacgttttacggcggcgaagatgcttccggcaccatgggtacgtatgaccaatcccaatatctaaaaatgcataagttagctaaattgtctctttatccacgtgtaagttagctaacaagtggcatgcacaaatcaggcggagcttgtggctatggaaatttgtatggccaaggttacgggacgaacacggcggctttaagtacggctctattcaacaacggactcacgtgtggcgcgtgctatgagatgaagtgtaacgatgacccgaggtggtgtctcgggtcaaccatcaccgtcacagctacaaacttttgcccacctaaccctggcctctccaacgataatggaggttggtgcaatcctcctcttcagcatttcgacctcgccgagccagcttttcttcagatcgctcagtatcgtgccggcattgttcctgtctctttccgaaggtccgtttacttttctttaaacttgggacgctaagtgataagattgcgaaaagacaattaactgacagtttttaacatgtagtcccaatccatatatagtagtgtttactattaacaaattttcaaaacattaaaattgtaggtttatttgggaaaagaaaaacacacttttttttaacaaaaccaacctttaccttataaatttactagtccgaaactaatagacaagtcttttgtagctagtagctaccatagttaaaacttaatacccaacaaagaatttgttcctaattaatctctatttaatgagcttatcttaactaaatagtatatgttttttgggtcttaaatgggatatagcatttttctgataatgtttaacactaaaaccacactattaagcaatagcctatgcaagatcttgtatgtataagtccatgtttcttaaataatggcttaattttgtcggtgtttttacgtgattattgcagagtaccatgtatgaagaaaggaggaataaggtttacgatcaacggacactcatacttcaacctcgttctgatctccaacgtaggaggagcaggagacgtacacgccgtctcaatcaaaggctcaaaaacacagtcgtggcaagcgatgtctagaaactggggacaaaactggcagagcaattcatacatgaacgaccaaagcctttccttccaggtaacgaccagcgatggtcgcacactcgttagcaacgacgtggctccttctaattggcagttcggacaaacctaccaaggtggtcagttctgatccaaaccatcatccacatctctctgttttgggtgctgacgtggctgcatattgctgaggtggctcgtaagcacccgcttaattagcttagccttttttttctcttatttacgaattattgcttcaatggttgtattttcattgtgcctacaaaaaagcaaggtttttttacatgtttattggatttttttcttctctttataagccaatatcgacgcccaaaagaatgaaattacacatgaattgatttaataatttcgaattttatttaatcaactacaaaggtttttttttttttccttacacaaagtgtttatatacacgattataaactatccggacaaaccggttcaccaaacgaaaatcaaatgtgtaaaccacattatcatctctaatagcaaccccgccaaaaataagccattgtatcttgtagtaaacttgtatgattgtatccatcacatcacaatttgatgtttatgaaatctttgagtgctttctcatctaatcaggcccataagtaggccattatcatcactattagtaatgggccaaaaccccgtgaatttggtcacgcacgactcaaatg

SEQ ID NO: 31137 - DNA, 3003 bp, Unknown; identical to SEQ ID NO: 24979
  misc_feature (1)..( 3003): 2750-1469P.txt file - cDNA_ID_3039145; gDNA_ID_2214482; Annot_ID_183397

SEQ ID NO: 31138 - DNA, 3003 bp, Unknown; identical to SEQ ID NO: 17140
  misc_feature (1)..( 3003): 2750-1469P.txt file - cDNA_ID_3039161; gDNA_ID_2214482; Annot_ID_183389

SEQ ID NO: 31139 - DNA, 3000 bp, Unknown
  misc_feature (1)..( 3000): 2750-1469P.txt file - cDNA_ID_3039165; gDNA_ID_2214482; Annot_ID_183387
tggtcaccatcaaagcatcaaatgttagtatgcaatgcatattaatgtgtttgtatattacactgatctgacattgaagaaaaaactgagaaagaacaaaacttacgaaagtgtcatcaagcttgaaaggaacccaataaccacgaccaccgaatcgagtcaccgcctcctgaaccgatccgaatggaggagaagtatcgatttcagctctcaacccaactctcctaattccaggtacattagaaacaccaaccggatcaacacagaacccggaattctcagaaccgggttgaatcctgacatcatggatcccaggcgtacccggaatcgcctcagccacatgataattctgatgctgctcctctgccaatgccatcgccaccacaaagaaccaagagatggacgaattcgaagggttttaaagaggagcccttttcacttatcataattaataaaattacaaaagaaaagagaaagggaaaaggagatgaaaaaagcaaaagagcttttgaagaaggaatcgatatgattgtgctttctcgttacagagtcacactatcaccccactcggagagtgagaagaagagagagacacagagacagattataacgacgtgatgacgtggtgaattatgattggttggttgtttagattgaccggtgttaaagacaaggttcatgtgagaacggttgtatgggatggttgactgattactcgatttgggccgttgattgcgggcttattgggaattgcagtttcttctgtgtagcttttgcaaaaaaggcagggatttagggtggcatggaccaatcaatcaaacgacgacgtttgcgctgccgacggttgatcccacggatcttttgttttcacgatgttttcttttaggaagttatgggccaataataagcccatactgtttgatgtatgaatacattaatcggaaaagtaactcgttcatagatacaccaaagtaaaaaagaaaggtgaaaaatgggttaaatcatatatagtcaatgctataaaatctgtgttcatcataaaatagaagtcacaaaaatgtaattttttttaacgaatttatcactagtgaaaatatcagaatacatatgcatacttgatactttacataacgaaatctaattttaaaagattttcaaaaacaaaaaaaggggacaaacgtatggtaaatgagcagaataattgttatattgatttttggtacgcataattatcacaaccaccttatctttcacaatgttatgatttttttttttttttatggggtcacttacgtaaataagtggaaccttgcattgcatccattattttattttgtctgattctatctcaagatgaaagtttaccatacatcaaccatgattaatggctgtaatcaagtcggaagtaactcattacaaagtacctcggttttgagctttccatttatagataattgattatatgtggggttttaaacaaaattttatagtactttttaacatagctagtatttggggtttaatgtttgagcatataaaacctcttaatcaaaataatggattaatattcgacacgtgacaactacactattacactggcataaacaaaacaaaaatagttaagaaaaaaggtgacgaataccaccaatagctatgaagaaaaggcaaaccaaactaattatgtaatcaatctacagtttgttatagtgaattttattatacatacgactattagatatctttgtttacctataaccctatgtttaaatagaaccatgagcatgaaaagtaaatgtaaaatatcttcactcttttaccaaaaattatcttcaaactaaaatgcattaatacataatcaaccgtttagagtgtctataatctataagcctatagcctacactatttaagtaggctgttcttcataacctagccgtctacaaaaatatcaaaaccgaaatgcatagaactgcctaatcggttgtctcttctagtcttctgttattagaactgccctaaacaataatctgaaataaattgtagatgcatacatacacatatatacacgtagtgcatgtaggtagatgtatgaattaaataggaggagcttcgccttatatttttctaactaactttgtcttcatttctctatcgaattaaagaaaaatctcagtacgagacaatggaccacgaacgcatctcctatacattaatacgactcaactgtacatccaacggtccacactcttccgcctctctaccttctctttagtatcctacacgttttttttatatgatcatcttccaaacgacattaatagtgacatcggttttttaatctttttctttagtaaacttttcttacatggatattctagctaccactggagttcacttgatttctaggttcaatcaattgtagaaaaagttatgatcctacgttataaggagtaatacgtttttttcttgtccaatctatattaaactcatttcgaaatcaaaattgatgtgtaaatagtagtaacaattaagtcgtatacactaatgaacagtataacgcccccactcatttattatctaaccattttttggccctctacaattattttcgagtatcttatatatatgtcatatgcatccatgtgaaatttaccaatacaaaaaaaaaaccccgaaaataatacagatactacaaaaaaaataagaacaatagattaaaatgcacatgacatgtgctaacacatgacatgtgctaacacaccccatgcaaaaaaagagatcctttaattcttccgcaaacttctcttacactaccaaagcatcacttttccaaaaatagatgcgcctttgtctctcttttgcatatctgcagaagcttcgttgtcttcggatctcgcattttctttcttttttctccattttcgatattttcattctgcagataaaaacctgtctcaacgacatatccagagaggaaagttttggttacagaagcattaaatg

SEQ ID NO: 31140 - DNA, 3003 bp, Unknown; identical to SEQ ID NO: 20977
  misc_feature (1)..( 3003): 2750-1469P.txt file - cDNA_ID_3039168; gDNA_ID_2214482; Annot_ID_183385

SEQ ID NO: 31141 - DNA, 3000 bp, Unknown; identical to SEQ ID NO: 11174
  misc_feature (1)..( 3000): 2750-1469P.txt file - cDNA_ID_3039172; gDNA_ID_2214482; Annot_ID_183383

SEQ ID NO: 31142 - DNA, 3000 bp, Unknown; identical to SEQ ID NO: 26953
  misc_feature (1)..( 3000): 2750-1469P.txt file - cDNA_ID_3039180; gDNA_ID_2214482; Annot_ID_183380

SEQ ID NO: 31143 - DNA, 1146 bp, Unknown; identical to SEQ ID NO: 11173
  misc_feature (1)..( 1146): 2750-1469P.txt file - cDNA_ID_3039184; gDNA_ID_2214482; Annot_ID_183379

SEQ ID NO: 31144 - DNA, 2063 bp, Unknown; identical to SEQ ID NO: 11201
  misc_feature (1)..( 2063): 2750-1469P.txt file - cDNA_ID_3039207; gDNA_ID_2214483; Annot_ID_183438

SEQ ID NO: 31145 - DNA, 3000 bp, Unknown; identical to SEQ ID NO: 11203
  misc_feature (1)..( 3000): 2750-1469P.txt file - cDNA_ID_3039211; gDNA_ID_2214483; Annot_ID_183432

SEQ ID NO: 31146 - DNA, 3003 bp, Unknown; identical to SEQ ID NO: 24993
  misc_feature (1)..( 3003): 2750-1469P.txt file - cDNA_ID_3039223; gDNA_ID_2214483; Annot_ID_183428

SEQ ID NO: 31147 - DNA, 3003 bp, Unknown; identical to SEQ ID NO: 16933
  misc_feature (1)..( 3003): 2750-1469P.txt file - cDNA_ID_3039233; gDNA_ID_2214483; Annot_ID_183423

SEQ ID NO: 31148 - DNA, 3003 bp, Unknown
  misc_feature (1)..( 3003): 2750-1469P.txt file - cDNA_ID_3039239; gDNA_ID_2214483; Annot_ID_183420
tttcccttttctacttggttatccagtttatctgattatttctggtgaatctgtcaaattttcagcttcatgtatacttgagaacctatggacttgaacaaatggtccaagctgcaagctctgctgttggtcttcgaacgatcaagcgggttgagcagactctgcaagatctcggggtttgtctttgcttcttgttctgtttaactctttctatttgtctatctcatttgcttatctttccccattgattgatgatgagacttaactaatgttataaaaggcacccgtactgaagctagctttgaatgtgttctatgtaattagttgggattttggttcgggtagaggctagtaggttcttgtcagtttatttgattgtagccactcttaagatttactaaatggattttttgagtatatagagttttctgtttacaggttaatttaaagccaaaggttcctaccaaaactgtatgcgatgagcatcttgagctaagaaaagaaatattaacactactgaatcttcagaagcaggtaaaccatacaatacaagtcttatctcacatagattcacaaatatacagctatttgtttatttaacttgttgccaaaacatggtggggtcgtaacttcagctgcaatataaggaatcagaaggttcatcacatcgtgaagggtcgtatgccgcaatgccagacactccaaaggtgagcaacaaactttgtttattggttctcgctacagtttcatcttcctgttgatctctttaatttctatatatatttgatcaggatcgtgttttcgcaccggacccattcagttttggaggtacattatttccttatcttgttggtttcagcattgtatgcactacttaaccatctctaagttcattttgtgtgtttatttcagctgaaagaccaatcaagaaggaacaaaaacgcaaggtggtgcacatcagagtttgctcttctttatttttcgtaccaattcctccgaaaatcctttgcatctacatgtaaaacttgaatcttaattaaaatatgtttgggaatcctgcagggtcctggaagacaagcagatactccttcaccagctcataagcgtccgagaaagttgaaagcctctgatctctaaaatctctctactcggtgcatactgactcgcaatttcatgtgtatgtatttgcctttttccggtgatttccgcaatgttttcagttcttaaattatttctgatctctaaaatctctctacttgtactcagacaccgcactatcttgtcaagccaattagagaaattgagaaaatgttgcacattatatttatgactagtaagaattattacatctaaagacattttcgaaaatgttaaattacaaatggttgattggtatgataaagaaaagaataaaaattaattagatagaagagagagtaaactatcgaaataagaaacacaatatcaggaggtggaaggcgaggagacacattcataagaatgtagataacagggagcttgaggtgggtagagacagagaagaagacagttgacaacaattgttgagtcttgaaggagtctcgctacatacatgtaaagaaaaacaaggattactactttatttcttcaaacttatagattcttctattgataggcaaaaatcttagcttcaatgtgtttatatgtatgccaaaactccaaccaaagaaagaatgtccatactttttctctcaacttagcaataagtcccattatacagtgggatttaagattactgaaattttcaacacttagaaatcttgagtttttagtatactaccaattagaccaaaaaataactaaatttgttccacatgtgacagaggtatactagttattataatcaatatcattatcaatattaagcacaactacattcgaatgactaacagagattcctacgaaaaaacaataatctgaagcaatagaagtaagagaagcaactatacatttggaatcgaatagccgatatgggaatccgccacagattctggagaagaatttgcagtttgtcggagagagcttttgattgaagaaatcagacaaaagttttggaggagagatctcgaaccggaacaaaaagtttacattagtattgaaattagaactaatttgcggttcggtttacactgggctaaagaggaaaaaaaaaaattcacgcgatggtgattttgaagacaactgcgttgataaaaaaaggcatgatttcaaaaggtgaacccctacagaattgctctcacgctctcaacgcgcactttgtgcgagtagatctgaaatacagccttgtgattggctaaaaaactctaaaaaaatagaaatagtagacatgttgctagcttatgttattatttagcttttctacaaaacgccgtcgttttttatttcgatcgtttcagcttttggcattgatccgaaccaatcggttcaactggctaagtctatccacaggtttgtataaaaaatctcatttggtcatgaaattaagcactaaatttatattaattaatcatttaatgcttatagacaaattctatttcatatttctaacgaatcagacctaattgtacgaaataaattattggttctgaaaatatcaattgggaaattaaaacccggttcaatttgaaaccggaaacaagactagctacgcctggaaactctcacacagagtcacaggagaagctcccgcgtctgcaaggaacggataaagtctctctctttctcactctctctcaatgaagaagaagatgctgacgagtcccagtaacgcacttcacagtagtactccacagttctggccagttcgccggagcagactttgccgttcccggaatttccctcgttttcactccggcgaacgcagcagcggcggaggaggaaaattgtgctcgctctctcttctctccggaagtggcgccagtaaattcagtgtcagagctctagttaggcctgatgataccgatg

SEQ ID NO: 31149 - DNA, 3000 bp, Unknown; identical to SEQ ID NO: 11228
  misc_feature (1)..( 3000): 2750-1469P.txt file - cDNA_ID_3039275; gDNA_ID_2214484; Annot_ID_183457

SEQ ID NO: 31150 - DNA, 3000 bp, Unknown; identical to SEQ ID NO: 26956
  misc_feature (1)..( 3000): 2750-1469P.txt file - cDNA_ID_3039279; gDNA_ID_2214484; Annot_ID_183456

SEQ ID NO: 31151 - DNA, 3000 bp, Unknown
  misc_feature (1)..( 3000): 2750-1469P.txt file - cDNA_ID_3039286; gDNA_ID_2214484; Annot_ID_183448
ttttcaccgtcggattagggctaatcaactgtgccaacccaaacagtccccgttgccaaggtcctaacgggacccgattcgcagcaagcatgaacaacatgtccttcgtgctaccacgaagtaactccgtcatgcaagcatattaccaaggcaccccaggaatcttcacaacggattttccgcccgttccaccggtgcaattcgattacacaggtaacgttagccgcgggttatggcagcccataaaaggaaccaaagcttacaagcttaagtacaaatctaatgttcagattgtgttacaagacactagcattgtcacgccagagaatcatcccatgcatctacacgggtaccaattctacgtggtcgggtcaggtttcggtaatttcaacccgagaacagacccggctaggtttaacttatttgacccaccagagaggaacaccattggaacacctccaggtggttgggtggcaattcggttcgtcgctgataatccaggttagatgatcttattgactcgaaagcatttgatactttgtaaccataggttaaatgatcttattgactcaaaaatgaaaaacatattttgatatacttgtggtgtaatgcaggagcatggtttatgcattgtcacattgattcacatttgggatggggtttggctatggttttcttggtagagaacggtcgtggacagttgcaatcggtgcaggctccaccattggatcttccaagatgctaataaaaaacttctaccgttggatctaaagaatttatggggtttggttttttgttcttgttttttaatcaaaaaaagacttcgtgagtcttgatatgttaaagatggacaactgctctattgaaagtggttcaacctttgttttcgatgtacttttgttattttcctcgtaatagagtgagtgttttcatttttccgattaaaaatttaccaaataaaagctgtgttagttaatcttctttttctagctgactttcccaaacaactttattagttattaacttaatatgaacccacaagatacttttaattacattatcatacataaacttttcttgcaaaaatagcatcatatcgatctttaattggccatctttacgagaaaataattcttgaaaaagaacgtaaatagtgtggttgcgattccgttgatcaaaatttaccattaaactgaaaaaaaaaaatagtgatccatgaattacatttctgtataacttcttccacaaaaagatgattttttttggtcaactttctccaaaattctcaaaacaattcgccgtcaatgcctataactcgacataagtaaattgactacaactgccataagattgtaagtttggtggtctgttggtcatcctgatggaatgtagttgtaccattttgaactataatagaatctaatgagatagttttgatcgattgttataaattggataaccctaaatgtaaaagtacaaaaaatacattcttcgttgtggaatcctaataaacaaaattgtcctctggatacttaataattcaaacgtcatgacataagtgatccaaacatcacaaaaaaaattcataatctattggaacaaaaggttgatagacttacatgagtggtatccattccaatcgacactaagatttactgatcccaagttgaattcatgcgaaaatatttacactaaaatggttagaaataggatttggtatggtaaacatttttgggatactctttattggtctcgattttgcaatcaacgtcgcaaataattgatttacgatatcttttacctcacacgaaacgtgtacacaattgtgtattctttcttgcacaaccctagaccttagtttaaacttcaatcttctccgcaatgaaataaaatacacaattatacataatttccataatccaacatttttttttttatatctaaaagcacctccaatggagagaatctgtcgaagggttctctctatttttttatgattaaatttcaaaaaaattaacaaaagagcttttttcttttttttggttttttatagtccaatggtaggttcttttagaagaattctctggaaaaacaatattaatataaaattattttatttcatacaatttaataattattacaaagtataaaatattaaacatacattaatttgaaatattataaaatagatatgaaaaaaaacggaataaagatcagttgttctgttgattgttacaacatttagtcacgatatacaagagaaaatgacttgattcatacctaatttggagaatccgtcaacgattactctccaaatcatattttctattctccgattgagtttatcttccggtgatagtcatcaccatctgcaatgttataaaagtcatgcagtacgtacttaggtgctagagtaccgcctatttcggattaatcgtcgactaggcgttaaatcaaattggcaaatatgctatagtttatataaatatatagtatatataacttttaatcagtcatatttttaaaatttgatgtagcattgtggtctggaaggttgtttttggtagccaaagtgataagttcgatacctacaagtggacaatattatgcattttagttaaaacgaggggtacatctgtaatttcacgtacaaagtcaactgcttttcctacaaaacctaatcgccgtcgtcaaacctgagtttttttttgttctgattttttcgtatttcttctatttcctcatcattttatcgcatctctttaccaaaataacacaaatacaacattaatctttggatgattgaccacaaaatggaatttaacgtagtcttgaacacacgaatttttttgtttcttttgttaagctttacatccaatcaaatttggacacgtgtccgtttctctcctttcttcaaaaacttcccccagctaccatcatcttcgttaactccgctaaagcttttttaaaaaggattactactgtttacttctctgaatg

SEQ ID NO: 31152 - DNA, 1893 bp, Unknown; identical to SEQ ID NO: 11242
  misc_feature (1)..( 1893): 2750-1469P.txt file - cDNA_ID_3039295; gDNA_ID_2214485; Annot_ID_183494

SEQ ID NO: 31153 - DNA, 3000 bp, Unknown; identical to SEQ ID NO: 11252
  misc_feature (1)..( 3000): 2750-1469P.txt file - cDNA_ID_3039302; gDNA_ID_2214485; Annot_ID_183491

SEQ ID NO: 31154 - DNA, 3000 bp, Unknown; identical to SEQ ID NO: 11235
  misc_feature (1)..( 3000): 2750-1469P.txt file - cDNA_ID_3039306; gDNA_ID_2214485; Annot_ID_183488

SEQ ID NO: 31155 - DNA, 3000 bp, Unknown; identical to SEQ ID NO: 11236
  misc_feature (1)..( 3000): 2750-1469P.txt file - cDNA_ID_3039309; gDNA_ID_2214485; Annot_ID_183487

SEQ ID NO: 31156 - DNA, 3000 bp, Unknown; identical to SEQ ID NO: 11248
  misc_feature (1)..( 3000): 2750-1469P.txt file - cDNA_ID_3039313; gDNA_ID_2214485; Annot_ID_133348

SEQ ID NO: 31157 - DNA, 3000 bp, Unknown; identical to SEQ ID NO: 11237
  misc_feature (1)..( 3000): 2750-1469P.txt file - cDNA_ID_3039313; gDNA_ID_2214485; Annot_ID_183485

SEQ ID NO: 31158 - DNA, 3003 bp, Unknown; identical to SEQ ID NO: 24998
  misc_feature (1)..( 3003): 2750-1469P.txt file - cDNA_ID_3039317; gDNA_ID_2214485; Annot_ID_183484

SEQ ID NO: 31159 - DNA, 3000 bp, Unknown; identical to SEQ ID NO: 11238
  misc_feature (1)..( 3000): 2750-1469P.txt file - cDNA_ID_3039321; gDNA_ID_2214485; Annot_ID_183482

SEQ ID NO: 31160 - DNA, 3000 bp, Unknown; identical to SEQ ID NO: 11239
  misc_feature (1)..( 3000): 2750-1469P.txt file - cDNA_ID_3039325; gDNA_ID_2214485; Annot_ID_183480

SEQ ID NO: 31161 - DNA, 3000 bp, Unknown; identical to SEQ ID NO: 24995
  misc_feature (1)..( 3000): 2750-1469P.txt file - cDNA_ID_3039329; gDNA_ID_2214485; Annot_ID_183479

SEQ ID NO: 31162 - DNA, 3003 bp, Unknown
  misc_feature (1)..( 3003): 2750-1469P.txt file - cDNA_ID_3039333; gDNA_ID_2214485; Annot_ID_183478
tgggcatgtgaagccaaaatatctccctgtttccaacatagaaaagataccagtcttgttcaggtagtataatcatcaaagttgtagcaaatttgtaacaactaacccaaggagatactgccattattcaagaaatgctaaccaattcacagaataaacagagagatgtacaagaaaaagtttgaaggcgacaagaaactagggatgaaattgccttcttattagctggaaaaaagaacaaaacatacctcacttcgctacagacaccataatgcgcagatgttatataagtttccagctctatgtcatctttaaaaattttagtaactagctgcaaacagaagacacagggtcgattaaacgtgtgacatatgaagagtaactatcgatctagaatgcagcataagatgaagacgtgatgatgattacccgcagttccggaaacttaagagacaaaatgtcgatcatgttattagtttcatcagtgtcaggtgcaaaagctaaaaaatccccctcagcaagcaaaagcttcaaaacttctggaaaactaggagagttgcctttgcccacttcgacgactgtatctttgtctatgttcctttcatgatcaacagaacaaaatgcagaaaacgaaatcaaaatccaattttagtacgagagagagagaggctagtgacgagtgtaaaaaactgatatcttacgagtgagccgggtgaattgtggtgtcaacccgtgtcctgacggctatcaacagcaacattacaatagtcggaagcaaaatctgccaatgaataagagaaagaagcaaaatttgatcaacaattcgaaattttaaaaacaaaaattgcattcagcatcaaggagaagaagacccattaagacgagcagtgaataagcatgaaaacgacatagttttgaggagcaaagaaaaagagagaaacctcagctgaagtaacgaagggatgacgagttttgaggagccaattcttgcggagcatggccttgaattgcctcttcgatgaacccatttttccttggaacccagaaagaaccctagacgatagattctagtcttggcttcaataagaaatcatacttttatggttcttctttgggaaaaggcaaagcaaagtagcaaactaagaaagcagagagaggtggcgaagacttgggctcacctcactgacatttgtgcttccttttttttttttttttttttcctgccaatttatttgattcattaatcaatttgattatacaatcaaacaaaagaattttgcaactagctgcggataacacaagtggtcgacaaaaatagaagaattccgaaactgtttcatttatttacgggacctttcttcttctatcaaaaaacccaaaaaataaggagaagattagattagttgtcgtgatattaagaaggtaatcttatattaaaccaaaaaaaaagaagaagataatcttataattaatatatataagtacttaagtacagttgctgatgttgacccaaatataaatctttgcgtcaatgccaagtaggggtggctctctcacgggctccacattaaaagcctagtgtagtgtacgtggaacatcctgattcgttttagagttgcgttacgccaattatattacgacgaaaacgacgacgttcctaagtttgacggcaaagtatacgaatgtttttattatttttccgaaggttgccaataaaagccgccattagaattattcctttcattgccactccccaacttgattcttatttttatttttatcagttgtgacacaactttaaagaaatccaccttcatattcaatcctcaaaaatgctgtttttttttaacacagaaaaaaaacaatttttagtaaaattatatcaaatgtagaatcaaaatgacactattttcttcaactaaaaacaatgaaactttttttttaataccattaacttttaataatttatctggattttttcaaaatatatgatcaaatttcaagtaacatctaaatatatgttaaagatgattttgtttgggctgtcgtttccaaggatatttttgttatccgccagagacaaaaaaaatctgttatgagaagcggggctactgggccagctctttgtggcccataatttagaaatattttaaaacttatgtattgtttttgttttttttagggtgcgattttcccgactaaaccaactctacttgtctgtacatgtgtgttcgactaaacaaagttacaatcgtcttctgctttgttgttcgtccatcttctacaatcgaacctacttcccttaacatccaataaaccagagaataaattgatggttttcgattgtctcctgttagctcgatttctccgccggcgacttttgggatcaaatttgattcttcacgattaagattgaattcgccattaggtaaagctgctgaattttaaatgtctagctcaaaatccaaacccaaaacaggtcccaatctaagaaaagtattcattcgtctttgccacctgtacaactttttaagattttcgtttttttctctattggtgaacaagtgattattttagtctacctttttttcgatttccactaactaaaacgcaagtaaatttttatcttttgttttaagggatagtggaggacaaaatcttgaaaactgtttttggatcccttcaccaggtcattcttattctgcttctgtagaaagtaataaactaaagtcataatctatcatgaatatgtgaacttttttgaatttgttgtcttagtatcaaaaagctatggttttgaagattacagctaaacttttcaaacagtgtctttaataagcattaggaatttctcgaatgtttacttgccacattgttcgattatctcttgtctctttttgcacattccttcatgtcttctttcttgtgtgtgtggctgtggcttaaaatatgtgcaggtggagcatcatttaagaatcttatgctttggctacaacgcctatg

SEQ ID NO: 31163 - DNA, 3000 bp, Unknown; identical to SEQ ID NO: 11241
  misc_feature (1)..( 3000): 2750-1469P.txt file - cDNA_ID_3039337; gDNA_ID_2214485; Annot_ID_183477

SEQ ID NO: 31164 - DNA, 3000 bp, Unknown
  misc_feature (1)..( 3000): 2750-1469P.txt file - cDNA_ID_3039341; gDNA_ID_2214486; Annot_ID_183511
atcaacttatcatttcatcttcagattttttttctcttttttttttgttacattaaatcaaatacagttttgttatttaaattaacagagtacttatttttgacaaactttcaaaaactcttgattttaattttaattttctaataacactagtttagtacatttgtttggccaaaacattagttcggtattacacgttttttatgccacaagtcatgttagtcaaatataatgtgcttcaataggactttcaaattttgaatattcctatttattaaattcatttctaatatctgtatttagctttccaccaagacaaaaaatcactgtagcgtgattagcacttagctcacaacgagagaacaggcaaaaggaaagaatgagagattctatcgattcataaaggaaaattgtacctctccaattctctgcttccgtcatcgtagatccatgagatcttcagcgggaaagcttctctcccattctctacggagaaaccgcgggaaacttggtgatggattttggattccggctacgaggtctcagaagatgtggaattcgacggtaccgtcagatgaaaatcctgatcaaaattcgatcgatgcaggatcttcaatgcggaaaccaattagcttatggcctggaatgtatcattctccggtgactaatgcgctttgggaagctcgtcgtaatatgttcgaaattcctaccggagacgacgcttctcagtcaaaattgacggctaaatctccgtctcgaagccgaacgtcaattctctataagttttcttctgattttgttcttcgagaacaatataggaatccttggaatgagattcgtactggtaaattggttgaagatcttgacgctcttgctggaaccatctccttcaaggttcttgtttttggctcttgccttcttatttgtttgcatcctgagtatttgaatataactttgttttgtgtgcttttactgaaacagcattgtggtggtgacagcagtgcgagatcgatgattttggtgactgcttcagtggataggattatcatgaaaagacctattcgtgtagatactgaccttagtatagttggtgctgttacatgggttggtagatcatccatggagatgcaattacaagtactccaaattcaaggtatcagtttctctgtaaactatatagatgatagacacttgagtcttgttaggtttggaggagcttcactgtctcaaaaaaatagaaaggtcatgcttgaactgttgaataaggtggtaaataaagaaatatatatagttgtgaataccagtttgaagcgttgtgagatgtatttgagatgttctgtcaacaacaatcattgtcatcatgtcgaagaagctcatgatttgctatatctttcttctaacaactgttttttgcagataccaacaactcctctgagtcggttgcccttgaagcaaactttacattcgtggctcgggatgctcagacaggcaagtcagctccaattaaccaagtcgtgccagaaactgagcatgaaaaatttctgtggaaagaggcagaagagaggaacaaactacgaaaacaaaagagagcacagggtaaagaagagcatgagaagttgaaggacttagagaggctaaatgagttattagcagaaggacgagtattcctggacatgccagctcttgcagatcggaacagcatcctaattaaggatacttcccatgaaaactcattgatctgccagccacagcaacgaaatattcatggcagaatttttggaggcttcttgatgcgcaaagcttttgagttggctttctccaatgcttacaccttcgctggggtttcaccacgttttctcgaagttgatcgcgtcgattttatcaaaccagtgagttcatttctttctcatcttcatctagttatggtgtgatgtgaaaagaaaaaagacagtgagatatatgatagctttagaagaaagcgattaaggggctgttttctaatgatgcaggtggatgttggaaatttccttcgtttcaagtcacgcgtattgtacacagaagcaaccagttcagctgaaccgctgataaacatcgaggttgtagctcatgttacaagtccagagctcagatccagcgaagtaagtgtacacagataagaatatattgattgaactatgcacaatacatgtttaagctgtgaaggaatttattgagatgtaatttttgggttggtaggtctccaacaggttttacttcaccttcagtgtgagacctgaggccatgaaagatggattgaaaataagaaatgtggttccagcaacagaagaagaagctagaagagtgatcgagcgcatggacgcagagagacccatctcattgccttgattgccgcatttgaacagttgatttcggtaaacaagagaaaacatagtctgactaatatatgaataagaagccatttatgcaaaatagattcgtttgatcattctttccctctgtgatagattaacgatcttcgacaataagagagaaagtcaatgtatagcttaacctacactaataatttgttttttcaggctatttgagtattttctaattaaaaaaatcctgtaaaagaaaagagtaatcatatacttcgttcatttgttgtgttgagtagtgtttatgactggtaaacattttttatgcccaaactatatcaaacaaagttgccttgaaaactactttattaccgaagagaaccaatacaaattcaaggagtgatttagattaacgcctaaatgcatcatttgcgattacaaaatcaaattttgctccagatggattttaattacttttcgtcgcttttttactttagagtttagaccttgaaatcgatggaaagcaatcgaacccgaaattctctcatttctcaatcaaaactatcttctttcacttctgggcaagaagctctgttgtggaacatcggaaatcagaactgaaacagaaacagaaaccatg

SEQ ID NO: 31165 - DNA, 3000 bp, Unknown; identical to SEQ ID NO: 11266
  misc_feature (1)..( 3000): 2750-1469P.txt file - cDNA_ID_3039345; gDNA_ID_2214486; Annot_ID_183510

SEQ ID NO: 31166 - DNA, 3000 bp, Unknown
  misc_feature (1)..( 3000): 2750-1469P.txt file - cDNA_ID_3039361; gDNA_ID_2214486; Annot_ID_183504
tataactagatctataatgcaaaatttgtttactttactcaggttagatgttatcgataggtgcttctcgaagagaacaatggaagaaattatatctgcacttgtaagtttttcattaatatataggatatgtcgacttccgttcctaagttggttgagtttacctttgacattgcactctgtgttggttaggagagagagaccactcaagaactagatgattggagcttaactacgattcgagctttgaagaagtcttcaccctcaagccttaaaatatctcttagatcggttagttcccaaaatgtgtcatatgcaataatgggacagagctgactatgtgtataaatttcagataagagaaggaagattgcaaggggtaggacactgtcttacccgcgagtatagaatggtgtgtcatgtgatgaagggagatttaagcaaagacttggtggaggttttgacagcttttctgattgtatcttcaacctgaaattttactttgtagacaagacaataattaaaaaatcatgttttacttatgcaggggtgcagagccatattgatagacaaagataggaatccaaaggtttaacaaatctctccatttagtatttgttgttatgtcatattgttgaaattatatatgttgtattgttggaattatagtgggagccaaggcgattggaggacatgaaggatagcatggtagatcagttctttgagagagtggaagaagaggagcgatgggaggatcttaagctttcaccaaggaacaacttgcatgctttaagaattgcagcaaagttgtgaagtagaaaaatgtgattggtcagacattaaaccaatgacctaaccaagattctgtgtcggaaccattcttctttttctttttttttttgttgttgtagaaaataagaatacacatgcttcttttactcctttcaaggagtttaatatctcatatttccactactttccctttatgtaattactttcgtgtatgtaggaacttatggttccaagttttttattgaaaataaaagaaaacaaaatcaaggctgaaattttttcctacggaaatattgtgttatatattgtaattgcacatgctttgattggaggttccattatgtgatattagagccttcattacatttttgatctaaaccactttatggtatccaaaccactcattcatcacagatttttatttttatccggtcgcgatttgtggtattaagaggaacacacattatggatgcaagattcggttccaattatggtgtgaatataagtataaattggaattagtctttcttgataaaaccaaagagaagaattgtagaccgaaaacaaaaggaaacaaagaaatgaaaaagttggtatttatgatgaactgtattaatacacagaaattaaattatatagtacaaatgtaacttgctagctaggttttttgtgtgcgaagaagattatcctcgatgacattcctcttattttatactagctcgagccttctaatatattgtgtttttggtgtcttttgtcctatgtttagcagtcgttttggttcatttgtcgtgttaaagtctatcttttgtgtcttttttattgtgttttgaatcttgtacatgttttaggtataggattgggtggtttcgaacgtgtttggatcaaaagcagggatcaaagctgaaactaggagcagagactggtggaccgatggatcggatagctgacggatggcataaactcagtcggatcgattagtcttctccaagaccgattggtctggttttctgactcgtttccttttatttttcagtattctacgacactcatttttaataaatatatattcttgaccgaaacaaacaaagtataattaagatttacaaccacttgacagaaaacaaaagtcataaataatgatttcttacaacaaaccaaaataaagtcacatataatataccaaataagaatctatctttttcaaccatactagcaaaagtcaatgttaaaagaaccataatagcgaaaccacctttctatttctcagtgtcacgcatcaatccaacggacaaaaaaggaagatgaatggaaaaaagggaaatatgagttataaagacaatttattcacgtacgacgtaatttttgtttgattgaaaatgtgcaagtgaaaagatgggtcgactataagataaaataaatactaaactaagagaaaataaaaaactatttgttttagaaaacaaaggaaaatcgatcacgacgaaagttagaaaggttaggcacatgtagtactgtcaatgttgtcatatcttattgatgcaagaataggaatgtgaaattaaaccaacgctctcttttaggacatgtatgagctgacaagtttcaacccctataaaaacgggtagattgtggaatgtgatttgatataagtagcaaaattagattcttacttttagagagctcaatgagatagattaaagttcattaaagctttatttagtgaaaaaatgatttgaagaaataccaaactatgatatactttttcattgaatgaattatgaaacgatgaaacaagagagttgcacaaagtgacaattcttcatgttactctattgatggttcattacatacatatctattaatctacttattacgaaaccctatttacatggatttttggacttttattaagttatgtgtgctttagcagtttcttatgtaagctttaatgctagtggatgagtgtgagacactcagattttcatacttgtgttttcataataagtattaaaattttcattcatttgtttacataaaaatgagatttatataaatcaacaacaaaataaataagaacttttaaactttattttagctacacaaaaaaaaaaaaaccaaaatattttcctatatatatatgcatgtccgggaggatacaaaggcgaaggaaaactgtaagaaaaaaaaaaggagaagaagaagatg

SEQ ID NO: 31167 - DNA, 3000 bp, Unknown; identical to SEQ ID NO: 11274
  misc_feature (1)..( 3000): 2750-1469P.txt file - cDNA_ID_3039426; gDNA_ID_2214487; Annot_ID_183534

SEQ ID NO: 31168 - DNA, 3000 bp, Unknown; identical to SEQ ID NO: 11273
  misc_feature (1)..( 3000): 2750-1469P.txt file - cDNA_ID_3039434; gDNA_ID_2214487; Annot_ID_183531

SEQ ID NO: 31169 - DNA, 3003 bp, Unknown
  misc_feature (1)..( 3003): 2750-1469P.txt file - cDNA_ID_3039473; gDNA_ID_2214488; Annot_ID_183563
gaatgatgttcgtcggagattccaactcatgttatctccaaaacaatttgcgacacttacggtaagaacaaatttactttgtaaattcatctttggttatcacagtaaatcaatcttttgaaattctagaatttctgaacttgaatttgacgatgacagagctgtaccattaattagtcgtcacactaatccaaattgcttaaccggtaccaaattatttaaccgaagtccggtattcggcgatgcggtctagtgtgttcggatgagtcataacgaatggataatgagtgatggtggataaggatttacggcaaagaaaaacagaggcaaattcgttaccagtttaaaaatggcggctttgatccagaccatccatggtggtaaacccaacttgtaaactctcttgtgttcttattgattctttcgatttcgctatctagtggtttaaaagttttccccttttttctgattactgttgtatagacaagaaactagaattgttgaaaacgaattccggtttaggttcttattgggtaaggtagaatccctaattgcacagtttctctcttaagttcacatctcgtgttaaagtacaattttttattcagtttctcagtgtagcattagtttctctaattgattggaattgaattgggcattttggcattaaacgtatgtaatttagcaattggttctcagtttctgattcaattcatcgatatgggttgatttcttggtctgtacttggttattcatattgagcactatacaatgcaggtgtggttgttaccagaaccttgactcttgtttatccttctacctttacgtccagacacaaagctctgaaccagatgacaagtagcagtaacagcggcttgcgacggttcctgttcactccgcctcagcggctaagccaaggtatctgttactggggagcagagctaagcaacaatgtgtcatggacttacaaaacgaaaatggttgttcgatccaaggccggagcagtgcctctgatgaagcatggcgaccggtttctctcctctctctcgtctccagccttagctggtgatccgtcagcgataaaccgacacattaagaagtttgtggctgcttcacccaaatcagttgctctcaatgtcctctctcatctcctctctgatcaaacttcccatcctcatctctccttctttgctctgtctgtgagtctttgcttttttttcctgtttctctcaataaaatattgatgaaggtaaatgactttatattggttgttgttttcttctccagttgtattcggaaattactgaagcgtcgtggtttgattggaatcctaaactcattgctgaacttattgctttgctcaataaacaagaaagatttgatgaatcagaaacgctactttctactgcggtttcgagactgaagtcaaatgaaagagactttactctcttcctctgcaatttggttgaatcaaattctaaacaagggtctatacaaggtttcagtgaagcatcttttcgtttgagagagataatccaaagatcatcatcagtttatgtcaaaactcaagcttacaagtctatggtttctggattatgtaacatggaccagcctcatgatgcggaaagagttatcgaggagatgagaatggaaaaaataaagccgggattgtttgaatataagtctgttctatacggctatggaagattaggattgtttgacgatatgaacagagtagtacacagaatgggaacagaaggtcacaaaatcgacacagtttgttcaaatatggttctctcttcctatggagctcatgatgcattgccccaaatgggttcttggttacagaagttgaagggttttaatgttcctttctccataaggacgtataactcggtcttgaattcttgtcctaccatcatatcaatgttgaaagacttggatagctgtccggtttctctttctgaactgcgtacttttctgaatgaggacgaagcacttctggtccatgaattgactcagtcatcagttttagatgaagcaattgagtggaacgcggtagagggtaagttggatttacatggtatgcacttgagctcatcgtatttgatattgctgcaatggatggatgagaccagacttagatttagcgaagaaaagtgtgtaattcctgcagagattgtagttgtttctggatctggaaagcatagcaatgtaagaggagagtcaccggtgaaagcgctggttaaaaagataatggtgcgtactggaagcccgatgagaattgaccggaagaatgttggtagttttattgccaagggaaaaactgttaaagaatggctctgcaaatgaagatttataactgtatattttgatcacaatttgcttaagattgatcaggaataagttttgcttggaatccaaatcaactcttggtgtcaaattttccaccagaactaatcaggtgagtcgaaattttctctttacactcttaaaattacctgcgtggtagtaaaattctgaatagctggttttagaataagagaaatctgaacaaaaatcatttcagttttcaagtatgtatgttaaaccctagagctctgtgaaattttaacaatagtttgtttgtttctgtttctggtgtatctttagctatattccatgaagtttctagtcttgaataatgtgtatagtttatttcaagcaatggctctggagctttagtttgtttaaaagtgcatctgctctagtcctttgatttggatagcaaataagtgaaagttcttgtccctataaggtttcttcagattaatggtattgatttctcttttgtcttcttaagatttttattcaagagagaatcttggatgtctgcttttctcattcaaaaatttgtcttcaaaaagtgatttttcatgcttgaccttgtccacctttgaactctattaaagtcaaccgatcaaatttgaagaaaaaaaaaagcttttcgtttcacccatgatg

SEQ ID NO: 31170 - DNA, 3003 bp, Unknown; identical to SEQ ID NO: 26964
  misc_feature (1)..( 3003): 2750-1469P.txt file - cDNA_ID_3039477; gDNA_ID_2214488; Annot_ID_183562

SEQ ID NO: 31171 - DNA, 3003 bp, Unknown; identical to SEQ ID NO: 25020
  misc_feature (1)..( 3003): 2750-1469P.txt file - cDNA_ID_3039489; gDNA_ID_2214488; Annot_ID_183558

SEQ ID NO: 31172 - DNA, 3000 bp, Unknown; identical to SEQ ID NO: 11308
  misc_feature (1)..( 3000): 2750-1469P.txt file - cDNA_ID_3039512; gDNA_ID_2214489; Annot_ID_183611

SEQ ID NO: 31173 - DNA, 3003 bp, Unknown
  misc_feature (1)..( 3003): 2750-1469P.txt file - cDNA_ID_3039525; gDNA_ID_2214489; Annot_ID_183605
tactatacttttggcttctagtggtgtcgaatgtattaattataataccatgcatgttctaggcatagattaagggatattattaggattgtgtgattaatatataattaatatgaatgagagaaaataaaacgcgtgaatgagatggaatggaatagaaagcgtaggcgtggcacatgatcatgcaactatcttaattttgtgtctccacaaagctaccgtttttctcgggactttgctttgttgatgttgcgaactctcttcctttttcttttctttttttatataattgatttaactttttggatcggccattcactgataaattttatcattataattaatttgctaatgcaaggaaattccgttatcgattgatgtttattgttcgcagttcaagattgcttttcaatcaccagtatgaatttgtcatctgagcgatgtagcaaacaaacattaggtgagtttgatcttatagacgtatttaccatttgaaaatgatactatataagtgttctaattattaatgttaaatacttatttccatttcttccatagagatatatgtgtgtattgttaattttgtatgattaattagttaagagttcaacttccaacaaccacaaaaaaaacaaaaataaacaaaaagtaacaaatgaagaaaaaacaaaaaaaaaactctaatcaattatgtgatttgatagttttcgttttcccccctgtatagcaaaaaaagaagcagagagggaaagaatttgttttttgttgtaatccgttaaatacttatccgaaacagtatttgaatattccatcaattttgtaagaatctggatcaaaatgtggtattacgtttagttttttttaaaacatatttaacgtttgtgtaattgatatcgtgacttcaccaacttttagagaagcatgagagagatccaaaattccacgtttaaaaataaaagcaaaaataattaatttgttttagagtatagtatatttcttatggacattggtgatttgagacttcgatatttatatattctattaattatagaaaacacatctcgatgactatacaacagtaacaatacaatagtgttagggggggatcaatgatccctacgttcctaagtctagatcgtagatggctattctaaaactcacaatttttatatcgattacagctacccccaaaaaaaaaaaaaaaaacgactacagctataatatattacaaacattactactttattagtgaatgcgcgtgatgcatgacatttaaatgaattctaaataattttcttttgggtttggttcacaattcacatcacgcttctatggtccatatatttttttcctaaaatgccatttaaaagaaacaaaacagtattaattaaaagaaattaatacaagattgttaatggcttatttgccaaaaaataatataaggattattaatgacctcataatacagacaaattaagttccgagtagcctttgttttacggatgatgattattttacaaaatgaatacttattgttttatgttttctacatgtacaattaaaaagagtttaatgttgtactgatataatattgttttccagttgaaattcagtaactattctagttgataaattttatgatgaacacaaaatttgaattcatatataaaaaaatacttatacattgtagaacgtaaccaactaagttggacgttaggtgtttggtattcgtcacataatatattaaaatttgaaactctcagcaaagctacaagtctcttataaaaatgtcattttttggataaagtagtaaatgtagttttacaaaagggatggtgtcctactggtaatatatacagtataaggggagaaaacaaactgttatcaaagatggatgcagtcaaacttccagcttatattttcggttaactgaaagttctaagtccgattcatctagttctgtctctaaaagtgtgttgccagtagtgctttcgtgtcttttctcaactttacatgattgtaacacttcatagcttcctcctccttaccttgctcgaaccaatactctacgaatgcgctactaattcataatgcaaaaggaaggaattggaatcggaatcggattcagatccatggaaggtaaacacgttctcagaccattccacgactccctaaaccagcttgcccatcatgcggatctcaaatgaaatctgtgcacaccaaatctccgtttttccttagtatacgtcttccaccaaactgtcactctcctttctccgccagggtttgccaccgaaacaagataattacaagacagtccttcaagtcccccaaccttggtactccacgcccacggcctagaatcatcactgcaaagtagtttgagtttcccattggaaaccgttgcttggaagtctttgcaatctatgagtaccatgcaaacattcggacacaagttaagcttgtccatcagaagattgtcataaacttttccactaattaggatgccacaatcatgaaaaactaattcaccaactataaaattgttggtcggtaattgagttttcagttaaaggttgtaagtttgtgttgtttcactcaagaggcacaagtagaaagagacacaagtatgaagtgacagaactaattgagttgttgtgtctatttgttttctatataaacaccttgtatcgtcatgtaaagattaacaagtttcagtttcaataaaacaaagttttgttcttgtcttcttcacaagagaagagatatgtctctcttactctgtttttcttctttctctcaataaaccaacatggtatcagagccgatggttgtccttggttgtctctacaaaaataagatgtgttctgctgcgaaaagaaaaagagagatggagacaacaaatctatggtgagatgaagaggaagaagaagagggaagaagaagaaataagaggtggtaactacagagagtaccatcagttttcacaaacacattcacatg

SEQ ID NO: 31174 - DNA, 3000 bp, Unknown; identical to SEQ ID NO: 11328
  misc_feature (1)..( 3000): 2750-1469P.txt file - cDNA_ID_3039528; gDNA_ID_2214489; Annot_ID_133431

SEQ ID NO: 31175 - DNA, 3000 bp, Unknown; identical to SEQ ID NO: 11310
  misc_feature (1)..( 3000): 2750-1469P.txt file - cDNA_ID_3039528; gDNA_ID_2214489; Annot_ID_183604

SEQ ID NO: 31176 - DNA, 3000 bp, Unknown; identical to SEQ ID NO: 11311
  misc_feature (1)..( 3000): 2750-1469P.txt file - cDNA_ID_3039532; gDNA_ID_2214489; Annot_ID_183603

SEQ ID NO: 31177 - DNA, 3000 bp, Unknown; identical to SEQ ID NO: 11314
  misc_feature (1)..( 3000): 2750-1469P.txt file - cDNA_ID_3039536; gDNA_ID_2214489; Annot_ID_183598

SEQ ID NO: 31178 - DNA, 3003 bp, Unknown
  misc_feature (1)..( 3003): 2750-1469P.txt file - cDNA_ID_3039543; gDNA_ID_2214489; Annot_ID_133423
ggttgggagaaggcacttcctgtaagtagaactttctggtaatctataacgttttatcagtattcttcatatataaggctcttattttaggcaacttaaaattttcatttagacatatacaccagactctccgggtgatgccaccagaaacctgtctcagcaatgtcttaacgcacttgcgaaagctgtgcctggttttcttggtgggagtgctgaccttgcatcttccaacatgacaatgcttaaagcattcggcaacttccaaaaagccacacctgaagaaagaaaccttagatttggtgtcagggaacatggtatgggagctatctgcaacggcattgcccttcacagccccggttttatcccttactgcgcaactttctttgtgtttactgactatatgagagctgcaatgagaatctcggctttgtctgaagctggtgttatatacgttatgacccatgactccattggtcttggagaagatggaccaacccaccaacccatcgaacacttatccagtttccgtgccatgcccaatattatgatgttccgtccagctgatgggaacgaaacagccggtgcatacaaaatcgctgtcacaaaacgtaagacaccttctgtcttagccttatctagacaaaagctgcctcaacttccaggaacatctattgagagcgtcgagaaaggtggatacaccatttctgacaactcaaccggtaacaaacccgatgtgatcttgatcggaactggatcagagctagagattgctgctcaagctgcagagaagttaagggaacaaggcaaaagtgtgagagttgtttcctttgtatgttgggagcttttcgacgagcaatcagatgcatacaaggaaagtgttttgccatctgatgtatcagctagagttagtatcgaagctggatcgacttttggatggggaaagatcgtcggaggaaaagggaaatcgattggaattgatacgtttggagcaagtgcaccagcaggaaagctttataaagagtttggtatcaccattgaagctatggttgaagcagccaagtcacttatttaaaaaagtatcttacaggtactaccgaggtttgcatttgaagtaagagacattccataagcattatcttctttgtccaaataaaaatatactccttccaatctttttataaatgatgtttaaagctttcattttggtttttaaataaatgatgttttaaattttcaatgcaaaattatttttattggttgattaaataaatgatgttttaggcttttatttatatttttattgttttcttgtaattaacatagttttgatctttgtaaacaacaactctattgtacttttattcttgattagttgattttatttcgcaaagacatgtaatccttacatgttaattgcaatcgtctcaactagtcttacatctactttgtagtctaattggttgacacaaaaggaatttacggaattctgtctagaatctttccatttttgcttacaaatatggcacaaccggaaattcccttacttatttatggaaaaacaaaagtgtcatgtgttatatatattggtccctttttatgtttgtagggctatcactaccaatccacaatggaagattcacaaccgtgtacatcacgtaacctagatcatgccgaaaactccacagcaagcattcctcttaaactcatcttcgaaatactatcgaggctttcgacgaaatttatcatcagattccgatccgtgtcgatgctgtgacgctctatcatcgatagtaaagatttcgtcgacgcctttctgaatcctcttttttcaatgaagactctttttttagtccgctttatggaataatacttatgttttaacgtaatgaatctttatatctatttgtatttttcagttacacttttgtttggacgttttgttttcaaagaacttctcaagttttcttttccttttttcttcttgtagtttgccttgctcgttggtgaatacactacattaattgagggcacttgcgattatgatgttctcccgcgtgaaagagcattgacctctcttttattcaaaacatcacataacagagagtctgtgaggtttgggacatcgcattctcaaatctcaatataagtggttttggtcgaatgctagaaaagggtgacttgtatgttgtgtcgccgctagtgttcgtacatacagtttatgatctaacgtatctataacatattattaatagatattattttgttttaattttgcacattgtttataaattaagtgcaaaaatttttagctccaagagatcgcctttgctaatcaataaaattgaacgcatttaataaaattgtaagagcaaactcgcactgatacgtagaataaatttgttgcttttgccttcacgacaccattacctatagttaatactccaaaagaaatagcagattcaacatacaacgtgcaagaccaaaaaacaaatgactcgtaatctccagagaatcataattcataacatgggagattgtccacaaaaaacataaattccctttcatgtctttttgttagaaaacccatttcttaaggcccaacaaaaaacataatcccctttcatgtctttttgttagaaaccccatttatctttcttgaggcccaatttgaaaacccacattttctttcacctaacccaccaaagcctttgcacatgttgacgtgaacaccaaactaacacgtgtcatactgccagtggttatgataaatgctcataccataccagagtcatagagtttttggttggtgaaagatttgacggatgccttcttctcatttctcaccaactccctccaaacccaacaaaagtgtttatattagcaaagccgccaaagtgtaaacgaaagtttataaatttcatttctgtgatcttacgtaattggaggaagatcaaaattttcaatccccattcttcgattgcttcaattgaagtttctccgatg

SEQ ID NO: 31179 - DNA, 3003 bp, Unknown; identical to SEQ ID NO: 31178
  misc_feature (1)..( 3003): 2750-1469P.txt file - cDNA_ID_3039543; gDNA_ID_2214489; Annot_ID_183595

SEQ ID NO: 31180 - DNA, 3003 bp, Unknown; identical to SEQ ID NO: 21002
  misc_feature (1)..( 3003): 2750-1469P.txt file - cDNA_ID_3039555; gDNA_ID_2214489; Annot_ID_183590

SEQ ID NO: 31181 - DNA, 3000 bp, Unknown
  misc_feature (1)..( 3000): 2750-1469P.txt file - cDNA_ID_3039558; gDNA_ID_2214489; Annot_ID_183589
aatttaaaaatctcatctcttcaaatctatatataaaacagggggataacagaaaatgcaatggacttggtagtattaggctgagtctcaagtacaggtgtaagtagatagatacagaatgcaatgggatcttaagcccaagtctcaggagtttaacatcaagacctttggagggatctaatctaatctattgaaatctcctaactcgtgggagcatctctccaaaatgatttactaatagtatgatttccagattatgaatccttcttagggtagaacaaaatatggatacctgtcaaatatatatatcttctcttcgagtcacaatcactgctgtaacaatatcttggataatgctcctttctgcctcattactgactgccctttctcctttccaccacatgtgttctggaaatagacaccaagatgtttctactgatcagtctaacagagaccaagatgattcaagacaatctaatgaagccaagtgactagtactaacaacacttacgctgcccatttcccttcactcatttgatgtagattttatactattcacagaccttcctaacacgtttaaagctgctacgcgctgcatctctctcgctgcaccagaggatcaacaacattatttctagcaaatacttgattccagatggttcatagctacaaacctaaaagcatgtgactaaagcctatatagttgtcagcagatatggaaaaaatggcttaagcagcagcatgaataatccacttatggatggtcaactagaactgtgccaaacagatatgattcagcaatggtaggaagtgagagagtggaagcaaaggagtagagtaccttcctcgagagagaactgaatagacctcttttccaagtcaacagcatgcttgctaagctcggcggaggaaagtgaccaaagcactaataacagaggaaacatatctataaaaacaaaagcgcatcaaggtcaggaattagagtgatattgggaggagctttactctgaacatgatcggtccgatcagattgattaagcttgttaagaagcatttgaagatgaaggtaacgctcttcccagtctaacttatggctggtaggggttggttcctgtgcctgtgcctgtgcgggtgatgaaggtatctggggtggtgccttagtaggaggcggattcggattagtagtgctagcagcggctttggatgtgtcaacctccactcttctccggacataaacaagtcgaccgctagcagcattagtagtggctggagagtccactggaggtttctttaccccaattgatgatactgtatcttgttcgatggccttttctgaatcttttggtgtcccctccggaatctccatttcactgcgattaaggagaaactaagaagaagcttacaaataacaggttcaaagaggatctgcggtgcttcaatatcaaccatacgaggactcaggattataattattggaatctgatcagtgaataatcaatcggaggagcgcgaagcaaaacaatttacctggagaacggagatggtgatggagatggatcagagagagaatacgagcagagcagttccgctccgagagatggtgttttcctcatctcctcgctagctagagaggagagtaaagcattgatgggccagtttaaggcccattatgtgcattcacgggccagtcttactccctctacatactgtatagcatcgcattctatggcccatgcttttcagtcacgttgataccaacaaaaaaaacacaagtgaagaacaacactcccgagtgaaattgttgagtttcctttggtgagtttttgcgagtttgagaaaaacaagagatttggacactattccgacacacatcgtgtaaggcttaattcaaaactatcaaccacaaaaaccagatgagaacagaacacaatttttttttttgtcaaaacctggaaaacagggtacgagacgtattggtcattgctgtgagacttggaagcgagggaaacaaagagagatttgagatcatcaagcttcttctgagtaaaagctctgcaacaaaacacacacacacaattgataagatcgattttcaaattagaaattagagagtgaaagtgagattggttccgatgaagacctggaagcagaagtgaagcgatgatcaacagaagacgaattcaaattcccattttcgacggatttttttctctcctcagttctccggcaggtttcgtcgtctctgttcttctattattttttattgatcttccacttcttcaaaattacaacttcaaccccttaaaatctaaatattctaaatgtaccccattacttttaatgcgttgatctcgaagcagcagagtaaaatataaaagttggtgagttgaaatcacacaaagaagagaaaataagaaagataataaaaggacgaggcaaacacgaagagctcacaacgagattcatgctttcagatttcaactggtaagtctaatctgtataaaccttaattattgcaaatcgtccttgttcttatggaatctacaattctttttggtatctttttttatgtgtcactttgttgccgagaaattttactaaaactagtaaagctaagctctttcggtcgtttttcatgttcttcttcatctattggatgccatggaagtagaaatcttcaggaatcttctttggctttgattctgagatttttgcaatttgaaagtttactgtgatttttgagttgtagtgcaatttaagggtcaaaggcttttgtgattttcttggatattttttttgtgattttgagttgtggtgttttctctttttcccgttgttgggatgttgagaaaatttctgtccagaattgttgcttcacactatttgctgattcggtttggtttgcattggttttgaaattaaaactgatttcggttcggtttcatttggttttgtggaaaaaaactaaaagagtcacgcgatagagaatttggagagatg

SEQ ID NO: 31182 - DNA, 3000 bp, Unknown
  misc_feature (1)..( 3000): 2750-1469P.txt file - cDNA_ID_3039564; gDNA_ID_2214489; Annot_ID_183584
cgtcaaagtgtttcgtatccaaatcagacaaggcaaccacaaaagccaaaatattttgtcgtctaacctagctaggcctagccatacttaaatagtattcgaaatatatttatttgggtataagtagtattcaaaatatataattagttagtgggaataagcaagcaacaaacatatccttgcaattgatagctaaaaatcttgagtagacccatatagagaatagaatcgtgttacacttttcctttggtgtttcatcaccaatttccatttcatctttatatcaatgtccaaagacagtataccactaagtgtccccatgctaatcacatcattatcgataatcactattagactcttaataattatttacgttatcagcttactgtataattgagactatcacaagaaaagtgtaaagtgacaaaaagtaacaagattagaaaatggtaaatgaaagggaacaatatctacaaagaaaataaaagcttgaaaatcctaagaactatttccataattgtcttcaattgcggcaatgacggccccatggaaatacccgagaacttgaccccgatgcgatccgggtcttgacccgttcgaaatctgaatacagacaaggaatagtgatacctccttcgtggcaaaatccgtactctttttcggcttctcgaagcagctcaccgaacaaaggatggttaaagtaaacgatgggtaccaaaactctatgacagtcgccgtctttttgacccacgtagatagctaagtgtccccttggaaccgggtcggctttcttatgatcaacgggtatgtatgcggatcttctcgtagacctgcgtctgaaactttgcttgagacgttggccccaacttttgagtttggctaatggtctcatcagcatgcaagcttgctgggtcgagtgtatccggttgtatcctgaacgttggatccgggttttgcgaaagatccatcttgagactcgtctcccgattctaaaccctatgatcttcctcatcttcttatagctaactttaaaaaacagtttttgtcacaaaactacactttttgagagatctgagaggaaatagagattaagagagtgagacgagacatggactaacgagtcaaataaagagtgattcatttgaacgagaataaataaatatatcaatcttttttacattttcttgattttctctataagaaagaaaaaaaaaaagacaatttctagggaaaacacaaattcgaaaatgatgtgaacggacaaagaagaaatgctttcgatgtatataaagtataaacgttaaagaagaagagatcaagagaagaatgagtgaaagacaagaggtctttaaaggagtttatatggagtctaaataaatgaacggttagatgaagactaaggtctatgaccgttggattagattaaaactgccatatttctcttgcttggcagatagtccaaacccgaagaatctacattaaatatgacacgtcccattaacctttagcctacatttatcattatcactgaaacgttttgatgggttatcaatcacaaattcacaatacgaaaaaaaacagtagtgtcaaactattatggtattttagcgtgtaattcgttacgcagatattattatctatggttgattttgaatctgaaaatatgatctatcgaagaaaggcctgaaattattttattatctgaatatgttttgtcggagcttacatgcttagcatgtttgaacttcgaagatgaagacaactatgccaccacacgtgtgctggccaagtgggacaaagttttgaacctattcggtaacactcacacgagatcaaatccccaccatctcattttataatgtcgtttatttatttgttagtgatcatctactgttttttaataaggttagtgccctagtgatcatctacttgtctgtgattttgtaaaaaatatatatagaattaaaattatattacgagaacaaaatgtgtacggtgtgtcctctagttgcgttacttgtgtacgttgatgatggttgatatatatacatattcatatcaggacaaaaaagcttttaaaaagaccaataaagatagatctagttttgagtaattggaggattcactaagctttttggagctaaaatggtgaatttcccacgaatcaaatctgagaagagaagctttctatattttgagttactttacacaattacacgttcatttgtaaattaagatcgtgtttgtgctgcatccaaaaaattcttggaattttaaagtaatgaaatataactaaacaaaatgaccactaaaaaataaaataaaaagcacatgagagatgagtgattatactctgataaattagctaacaaaattatgtatatataaaaaaggttttatgcagtgtaaattgtacttacacacttaatcaaagcaaaacaaaaatattaaaccgacaataatacgtaaaccaaaaaaccaatattccttaaaatcaatttgtgtttccaaccgacaagttctttgtatatatggttaatcatattttgttgtagtccgtatcctagctaaaagacgtttaaacgttcataatggatatgacccacccagctggtgaagatattcgtttttcgtgatcatatatatatgtttctttttgcccatccctgtttctattaacccaagttaaattagctatatatgagcaaaaactatgagttgaagttaagcacaatttccgaatcacaaaaaaaaaacaaattgatttggacctttcgataataggaatcagaaagaagtttgttccaaacacttctcttatataaatcccaactcatcagcttcgtgtttccgtacagtgcgtacatatacgaacgtgtcactcggcttttaacgtcaacttaatcgagagcccaattcaggcttactataagccttaataagcccaatattaaaagtccctgattattgtgagcccaatattaaaagtccatgactatg

SEQ ID NO: 31183 - DNA, 3000 bp, Unknown; identical to SEQ ID NO: 11305
  misc_feature (1)..( 3000): 2750-1469P.txt file - cDNA_ID_3039566; gDNA_ID_2214489; Annot_ID_133413

SEQ ID NO: 31184 - DNA, 3000 bp, Unknown; identical to SEQ ID NO: 11320
  misc_feature (1)..( 3000): 2750-1469P.txt file - cDNA_ID_3039566; gDNA_ID_2214489; Annot_ID_183583

SEQ ID NO: 31185 - DNA, 3003 bp, Unknown
  misc_feature (1)..( 3003): 2750-1469P.txt file - cDNA_ID_3039583; gDNA_ID_2214490; Annot_ID_183642
aagagctgatgatgtattgatgtttcagtacattgcatatttaagaatgtgaaattctggaatgaagcgtgtgaatggtgtgggagagagtgtagaagaagtaaagcaagagattcaaaggaaatagaagaagtggtggtcacgtgggaaatgggaaggggttcacgtgggaagttgccaacgtggcagaacatggtccccagtgaccacactcgtgcggcgtaatttttgttcctccacgaccagacattcacttctctttaatcattggatacttctctcctcctccgactcgatggttcctaacaattccacgcgctcactctcgcgtaatttttcctgtaaaaatcgctgtgatttttttttttttttttttaaatcgttgagagaatttaaagaagagaacgttagaagatactcgataagatctttagcaaaacaaaaaactcaatatattaatacacgtaaatatgagttaaattgtggatatgagtatatttacaatatggtttgagttttgttataactgtatggcgagggaattaatttaaagatatcagttcggtaagagacagctacgaacaggatccggtgaaaaccggccaaagcaaccaaagcccatgttgtaccaacaacgagagtttctgaggtaatcatgcatgaatataaatccttatcatacttacttaattcaagagttcaataattttgatacatctacatttttaaaaagaagatacacaatttggtcccacgtgtgtgtccataaccatgtgcatttataattatacatatattaatgtaaagtatcaatttatattctgttattagcaaaaaaaatatatataaattttgatctttgctcaacatttttttttgacacggtaacaactaacaactgaaatctgttgctcatcggcatatttttattcgtataaatcactcactatcaatgacgtcaaaaagaaaagaaaatcattcaaccatagttctactgtttagtccatccatcaatgttattgcttgctgagccaatttaatcattacaaaataattatgatattttcacgtaccacatgattgtatcgacgtatctaacaatttactcgaaatcattacacatgtccacgtgggaagcccgtcacttattttggtccgttccaagatttgattgattcttataatttattatttgctatccgtgcaatctgtattaataataacatatgctacgttttgaacactaaaacatagggatacgctggaaaggtgtgtaagatattagaatttcagaataacagctgttcacatgcatgcagaaattatatttataaacagagatcataaaggcatacataatctaagtagcatttataagaactaaggtgatcgatcgaacactgaattgaattatatcagaatgaacttgccgccttatcggtgcttttttaaaaagtcgacgaaatatctagtgaattgatccgatagaaaaaagatgtctttagatcaaatcgttcgacaaattttttctttcaaatatataaatcctagacaaaatatatctcaaaacgtctggactctggatagttcaactagctagttaccaaattaaaatcttttgaaataagactttactatggtataagttttaaatggtgacggtcacaagatgaatcgtatatgaaactataacacaattgaatgctgttttgttttttgttattgacagttttcggattcgcaacttgtaaccatctgaaccctaatattaatcatagttaaggactgaaaacaacagcatcgagcgtatttccgttgaacaatctttacgaaatccaaaataaataaataaagttaaaaagcagaaagtttcaagattcaaaaaaaaagttagcgaggagacatagcgagtgagagccacgtgactaagatgtgtaaagaatggagtgaggagaaaaaaaaaacagacaaaggacttaaaattaaattagatacgccagcgtttcacgtgggaagtcacgtgattgagtatccacgtgtcaatcccacaagtgaaataatagacgggttcccattgtcctaccttcgcaccacccccgcgcgtgtctctttgcctctctctcaccggacaccaatcatttgatgcgacacgagcttcttctacgtaattacatttataccccttagcctcctctcatgatgttatgatcacacagcctcgatccaatgcgttttggattgtgtgtgggtgtccagctgttatccatgtgaattgcacgtgatctcgctttgtttgagaaattagatttcattgcactaaaattggtagagagacaattagaacttgagtgatggataattcgtcttttcttaagacgatatctatttaactatattagacttatgaacaaaactaaaaatttcatttgaaatgtactatcgctcaagatctcaaggccttcatattgttctttttttttttaatcaaaattttaagtaatatcaattataagtggtttttagattatagatttttggttttggtctttggattttacacaaaagaagaaataaaataaatggaaaaatatataaaataaataaattcaaatggtaattctaaaaactagtaaatatggtttttggattttgggaaagaattgacaaaatctctttaaatctagattctctaatttttaggaaatcatttttattataatcttgaatgagtaacaaattgtttttttccaaaatcaaaaactaaaaaccatttcagaatctacaaacaataaaaaagtcttaatatttgcatataagtcaaactggtggtatctgggttaaacttaacaaaatgtgttgggcctaaataagctcaattaaaacgggccttttctcaagtacaccggtcaaaatcaaattttatccacaaggagtcgcttttggcttatccactgaaacaaagagactcgttggattcgtgaagccgaaaaaaaaaaaaaaatg

SEQ ID NO: 31186 - DNA, 3000 bp, Unknown; identical to SEQ ID NO: 11335
  misc_feature (1)..( 3000): 2750-1469P.txt file - cDNA_ID_3039588; gDNA_ID_2214490; Annot_ID_183638

SEQ ID NO: 31187 - DNA, 3003 bp, Unknown
  misc_feature (1)..( 3003): 2750-1469P.txt file - cDNA_ID_3039596; gDNA_ID_2214490; Annot_ID_183636
cctccatgaggtattgaaggaaggcactgatgtgtgtttgatagaccagattgcatcagttcatcactgtcccaaaactattgtgcttggatttagcaagggtggagttgtgatgaaccagctcatgagtgagatcagttccttggataccaactttgcgaaaacttcatctgcaatggtagaagaatctaccagccagcatgaaaagattcagatcattccagcctccaaagaaagcttcctcaacagcatttctgaagttcattatatagatgtaggactgaactcttctggtgcctacattactgatcacaatgtcgtgcagagaatctcccaacgccttgcacgaggtgcagactcgctacgcattgtcattcatggaactcctaggcagtggtgtgatgagctgcgaggctggattcgcaaggaaaaagatgagttggttcgtttgctcaaagctgaaactgagaattccggtgggaaactacaggtctgtgaaaggttctatttttctgatagacttgctgatttgcaaatgcactttgagataattgatgctatggatgtctcctaaccattcgcatgataaaagacacataataatacattgcaaaatgatagcaacttaaagccgttttatcagtacaaaaaccaaaacttttttttttttaaagacttccaaaaacaaatggtaagagaaactaaagaagacttgttctttaagatgacaccagcatcagagtaagtgagaggcttttagacggatcatattgttaccacagaatcactcttccatggcttcgttttgaacagacttcttttcggaaacatcaactttgatcttctgtgccccgggagcctggaccatatgaatgttctgatcaagttctttcatatcgtcattgagtttcttctgcttgtttggcttcaacctaagtcccatacaaaaaacaaaaacaatcataatcaaaaacagagtctagttttaaaatcatacaagcagtgttatcaaggatttgcaggagactagaagaagaagaagaaggaatgtatacctattttcgatatgtttggcttcccttgcggttctgatcttagcaatcttcttaatggccatgagtgtattctctgtaacgttcctgtcgtatctctcaggtctgtttctcttcttctcaaactcaaatgttgtatccttttagggtaaagtaaacaaagaaagacaagcaggagggtcagcatcaactagacaaccccaaggaaacaaagaaaaacttttgctcaaatgaacacgtaccttagtcatgtccttcccgtgtgcagctctgaatgctttagtccatttcactttacgtgggtttctcttcatcttgaagttcttgtgacacttcgacctacagaaccggaatatctgcaaaggagaagataccatgcttgtaagtgaattacaataacgcataagaaacaaagctaatcgataacaagacatacaaacaataaggtgttttgattaacatttatgctcaaatttttatcagaacatttgtaaacctcttatatactaaactcctagctaaagacacataaacatattgtaagaatatacaaaatggtcatttttttagctaaagactcacacaaataacgacatatatcaaaaattgttcatttaagctagagaatacgagcaaggagacattcacatatatagaatctaagagtactatgtaatataaaactcaagcaaactatttactgtgaattaaagcaggttgataaagatttatgccaaattaattaccttggcatcgttacggacaaattgaataccatgaccaggatatattgtggaagagcaaaaccaacacttctccaatctcatattgcctcgtcttgaaaaccctacaaaagactgttgcaaagttaagacatgtaaaactgaaactcagaccacaaaattgacaacaaacaaacaaaaaaagaggatactttcccagaaataaagtcgcttacttatagtaagagctaagaagcagaagacaaagtttcaatttttctctaattacacggtttcaatgaacagatattcaattatactactcaaaaattagtctagatttcaacaaatatgaaaaaatcataacaaagagaacaccaaacgaacgagatgggattaggactttgagattaagcggcaaacctgtaggtgattcttctaatttgcgacggcgatttcaggaaaagggttttgctttagagcccccctgcagaaaaaaaggtctaaagagaagaagatgactacttctaagaaatctcttagggtttatgaaacgttaacataaatttctaatttgaggcccataacctaacattgattccggcccattagttgttatgttttgtctgcccattaatgcggtaattacggcccaaatattcaattttggattccttattatattatatagtatctcgatcctttcatataatatgtaaaaaagttgtaaataaatatgcaagtccatttaattttgttttcatataagaaaacttttaattgcatatatattgttatttgaagagttttagataaaacttttattgtcaatcgataattttcatgttcatggttttgtatcagattactgaatgagtttagtcattaaaaatcttagaaatcaaatatgtaaaatatacaaaagacacacatagaagcatggaacccatctgttgcaagagaagaaaccaacatgatatgtaatttggttttatttaatttatttccggtttaatgtcttgttaaccggttaagtgatttaggttttcaatttgtctctttatagccttacaagtttaaccaatcaaaaagaacaattttctcaaacgagcccaggatcttcgagctgataattctattttctcaattcatcttctaagacttgtggtttctccttccttggagttcacagagaattgggatttatcctcccttgtccggtttctatg

SEQ ID NO: 31188 - DNA, 3003 bp, Unknown
  misc_feature (1)..( 3003): 2750-1469P.txt file - cDNA_ID_3039601; gDNA_ID_2214490; Annot_ID_183632
gttgaaattccccgagtcaccagcaactagctatgcaggcagggacttgatacaggctttactggtgaaagatccaaagaacaggttagggacaaagagaggagcaacggagataaagcagcatccattctttgaaggtgtgaattgggcattgataaggtgtagcactccacctgaagtaccgagacagatggagaccgaaccgccaccaaagtatggaccgattgatccggttgggtttggtagtaatagcaaaaggatgatgggaccaccagcagtatcagcagcagcagcagacacgaaatctggtggtaaatttctagactttgagtttttctaaagcttccaagatttggttccgtagtagccatttttagtcttttatctatgtcgttatatattgtaaccacgcctctagctttaatagatcaagagtgagggtttaattcttatagtaacttaggtcttgtttggtttttgtatcggagattaaaatcttcttccatggaaccaaaacttttgtaaggacatggaaagccccaagtcgaaattatttaagataatctcctttggtactagtactgctaggtttctcggaatcctttttctacacatagcaactaatagatcgtaatgtcaatgtcaatgtcactgccatttttgggtacatctatactatatgaacatttttgtggtcccaaacggtactataatctaaaaccaatcaacgatccaaaatgttatctttcttttttgtatattctaatcccaaaactgaactgattttggcattcgtgtgttttgtttcgtttaaaagagtcggcataactattgcttgatagtctatagtctataccaagaagaaccccatccatgtgcttcagacaaagaagagagaaatgatgacttgtcagatcctaactcttatctctcagggaatccgatgaaaacggaccccatagacttttacataaattctaccgaccagtttcatgccaaaaagagacaattcgaggccaggtcctagattgtaatcatcaccttatatcacttatacatatgattaacgaacaagcatgagattagtctttattcatttcattagaacatgtagctgggaactacatgaacaaaaaatccccacatttcataacaaaaaagaaaagccaagtcctagggaatagggatcatataggtaaaacgataaaaggttatactatgatacacttttttcatttatacgttaattaatgactggattagtgttttctctataatcttctcagctatagtatttaactaattaaacaaggaatagtttctacagtgattttctttaaataaagacttatgttgaaagaaatcaaaatagtaaaccatagttgaaacaaaacatccattttaataacacatttcgtctttttaatgtccaaagcagccatcagccatgtggattaattggtgctttatgataagactccaaatcgttgcgtaggacgttggtcttattattactccacttgatttttgattaagccgactttaacgggcttttccacaaggcatcacctacttgtgccttggcccattatcaaaaaacctagtagaatattctcacgtcatctttcccacgtatatgtgcacgacgtttttgttattttgtacgtaaacaagaggactggcgtttttatattccgataattaaaatactgaatataattatttaaacgatttgcatttgtctgtgtagagatgttgttgcaacgaaaggaacgattagagagaataaaacgaaagtcgcaattaagaaaacgtgtctttgacagtcacagtgggtcgacttaacctttcgacgtcagacttaacaatattttattacattcagcacgtgaaaattgcgttgtttccgattagttttatttttttaatgggagttgcttattaatgttttaaatttggagggatttatactttattcctgaaaaaacataaacgaagaatgaatctaatcttttgtttattggtgagtaactaactacctatattcaatttcataccggaaaattttgtattatgtactaatatactttgttagactcgtcgttaacgactaaacgaatcttgtaattttccatagctttcttgacttccactgttgtattgcgcgtttcaagtgttttcaataacttatatttgctcttctctctctctctctctctctcttttttgttgttgttgttgttcactttgatgaatcttgacaaagtttacaaagttgactctatttaagcaaccaatggcaaaagatgatcgagtgaaaacctattatgtgtatatagcactaaacattatttgattaacatccaaagatatatatgagtttatacagtttcttagtttttaaatcggtggattcttttttaacaaaaaaggtttaagatcttgtagattgatttttgttcgtcaaaaaactttattatagatggatttttggtgagtacagataggccacaaaaagtgaatttaactaatttcttaatcagttatttaaaatcgtcaagtatatatggattatcattttataatgatttgggttacaaaatatcaaagaacagccaacaacaaaaaaagaaatcgaagaacaagatcatctatagaaaaaaagacaaatattactgaaaaagaaagaccaaagaccaaaagtccaaacaaaaataaataactaatatttttgtcgctgttctattttaagaacgaggcaaaaaaagaacagaaaaaaagaagaaaacgaatcttctaagaacgtaacaactatcatcaaatcaaaacctcaaagaaccttccatggactttctctcattccatacctttataaactcatacacaactacttatctcttcacttcattagtctccaagaagaaaacatctctcactctctaaaatacacactctcatcaaaaaccttctcttcggttcagaagcattcaagaatccattatg

SEQ ID NO: 31189 - DNA, 3003 bp, Unknown
  misc_feature (1)..( 3003): 2750-1469P.txt file - cDNA_ID_3039621; gDNA_ID_2214491; Annot_ID_133477
agttattccgctatttatcatacatattagtcaagcctaataatgttttcctccgccttttcaatacttaaccaaaatttccgccaaaattcgtcaataatggtgaaaccgtaaataagtagtgtatttttgggtgtggtttaaactttaaacaaataacgtaatatcatgtaaaaccgcttgttatcataagtgatatttttaacataagcataaaattccactatttttcaaaagaattatacaataaataatctaacttatttacaattttgcaatctatttttttttaaatggtaagagttaaactatttagtgcatatgtacccttttttcattgtagaaaaaatgaaacagtaaaagatttatgcaaatggtagctgaacaatatttagcttactagtgcccattgtaccgacaaattcagcagcaaggaatataaagatattttggttgaaccaaagcaagaagtaccgtaaaagagagtactttggtggataaacaaaccaaagaatgagaaaaacattattatttattggtttgttaatcaaaagtatggttaaatgagaatcaaatacccaagaatctgataacttaacccatcaacaaaagcagaagctgattctggttctgcacaaagacagagagatgtgcacttacaaaggtaatccttgccgcgtcccctaagttctcagaagcttcttaagtttactaggctccattacgacaattaggtgaagaaatagaagaaactaacaatggtccataaaaagggtataacaatagcttagcaagtcttctaggttggttctttcttaggaactactggagattggtgtcttcaaatctctacacaatgtccacattgttcttattgagtagattttgcactggatttaaagtcatgaaaatggttcatccttaactcaagtcgatagaagtgacacaagaccgtcacaagatgtgaacataggaggaatgtagaatcatttgtcctcaaactaacaaaacttttaacagaaacattcattacagaataaagaaactagatgaattgttgtgctatatagtcacaactctagcatgatagtcaactagattagaacgaaaaccataaccaaaagcttcaagatttcaatccatgctatcacatatccatcacatgagaaccggacaagtgaatgccaatgccaaatattataagaaaatctaacaaagctataatctgaaatatcctcataagcctcatgagtcaatgatataacagagacataaattgttcgaaaagccacaagtaggaacgtataacctgagcatagaagtgcatacaaagcaattttcaatcgccttttatcacatgaaagcatgcaattctgagctgctgaaaagggaaacaaaagataacctggtaaaagccaatgacaaacaatatgatgattattttagtaaaaactggactagtgaatgccaatgacaaactataggacgattagtataagaaaagcattctgttagaaatattaacaggtgcagagagctctcagttctttcacttcgtattaacacagcaaaaacttccactgccaatgagaaaagcaaaaacgtgccataagatttcaggtgtgtgtcaagcagcttttggttttcatttcacaatgaccaatgcatacactttcataacgaattcaactccatttataaatcttgttttccaacagcatagatcaaaggctaacatcaaattattgaaaacaaggaaaccaaagccaacaaagttataatctgaaacatcctcatagcctcatgaggctgtcatatgactttgaaaagacacaagcaggaacgtataacctgagtataataaaactgcatacaaagcaatttccaattgcaatttatcacagggaaagtatgcaactcagagatgttgaaaagggggaaaacaaatgatcacctgataaaagcagcgtccttagacaacattgaaaagaagaactagtaagatggcttataagcccaatgcgtagaagagaccactcaccctcaagatccagcttataagcaatcttaccattccttctcttcaatgtaaaagattcattaaaccaactgcaaacatctccttcctaaccatcatgaactcactcatcaacactctactactccactttattgcttgcacataacaatcaccatagcttaaactaactttccacattaaacctctagaactaaaaatgctcaatttcaatactcaataaccagaaaagttacaaacttaacaaaccaaatcagatgtagtttcacctatcatcaaatgaaaaacagagacagagaatttgggtttctactctaacaactagaattctcgataacaagaaaagttacaaactttacaaaccaaaccagatatagtatcacctatcatcaaattcaacacatttttagatagttactctcacactcgtaatcattgtacataatcgaaaaagagattagaaacaaaaatactcgaattcaaacttaagcagtcacagtaacttcgtgcaggagcttaccggagatgaattcatcataaaccggcgacggtagcggcggagcaaagcaaaaatgcgatgattcatggaataggtctcaaaagtcacgagaggatcacgtgagatatcttgaaaagaatcggacggctaagaataaagcagactaattctcttatctatctctaaccgttaaataaaaactaaagttttaaccttttaacctgggactagggttttcagatttcactactcttgtcgtgtaagacttgagcaactatataatctcaacttttctcaatcactatccgctgcggtctcgccgtgctgcccacaacaatctccgacttcgtcttcctcatctatcatcgtcgtcgtcaaccttatttatctcttaatttatcattaaaaccaaaaaaccaaaaaaaaagccttagctttcgtttcttcaatcccagcaaaaaaaatg

SEQ ID NO: 31190 - DNA, 3003 bp, Unknown; identical to SEQ ID NO: 31189
  misc_feature (1)..( 3003): 2750-1469P.txt file - cDNA_ID_3039621; gDNA_ID_2214491; Annot_ID_183675

SEQ ID NO: 31191 - DNA, 3003 bp, Unknown
  misc_feature (1)..( 3003): 2750-1469P.txt file - cDNA_ID_3039646; gDNA_ID_2214491; Annot_ID_183668
taacttatgaaaccattttctcagtttatcatgataattgatcctctatttaaaaccctaaagtttatattttgtttgttcaaacacagtcggtactcaaaatagatgaaacataaatttgattttatttctaaaccacttggaaaaacatatactattattcttctcatgcaaaggaccccattataaaactaacatggcttttactattggattcactgtagtgattaagggtgtatcaccaactgttttgaatttttgtcaacttaattagttattaattaagaagtgggtaaagctaacataccaaccttttactacacaattatcttaaaaaatccttaaatttataagaatagaagaaagctaaaacgaataaggaaaaagaacagcaatcgagtgaaatgatgaacatattcaactcccaccattttgtttatatggatgagttccaaaattttggggcatacattctctaacagtattgagatatttcaataatagtatttgcataatgaaaagtaatattgatcatttcagaagattatatgctctttttatttaactattacgagatacatggttttattttgtaacatgttatttttaccaaataaaatttgttaattgttttactcatatcattaagctattttcaatggaatctaatatattggacgtgtgacattatcttatattttctgtaattatttagcatgttaaatattgatttttagtatattcatgtatggtaataacaaacaattatattgaaagagtcgtatactcgtatgtatgactgtttatatcgtaatcgtatatactgcaagttaaattcaacaactgtaattactaattagataaaatcaaatatctgtcgggcgtaacatgcgacccaacaaacgtcatgtgaatattttaattcttctattagtttgttaacctaatcgtgattgggtattcatataaatacacattttcatataaatacactttgtatatggtaagttatcattttatacaaaaaaccaaagaatgttttcttctctattatatcatcatatcccataattatgggaacccaaaaaaaaaaaaaattggaccctccattataaatataaactattgtcatataaattttagacataactgattttgtcataaagaaattgaaaggagaatctccgtgacggttggatatagcaataataacaactcttaataatcatagcaacaagcaaataaaagcagcacatggaagccatttgcgcaaggataattcttgtaagaacacattacctaaaagctaataataatgagaaaaacagcagaaatattcgaaaccatattaaaaaagaatgaaacatttcttaaataaacctaaactagattcgattttgcatgtttgatccacttgatgtatgaacaaaagaaacataaaacagtaagcaaaagtcaaggatctaatgtaaagtcataaggaaaaaaactaaatttaaacaagttgtaactgcagatcatgttatgtcttttaactagtaaatcctacgaccaattagattagagcaaccaattcttttatgattttgatttttgagagccaatttttatttgtattgaaaataatagttatatttttcactcctataaatttattttctactaatgaaattgttgtttataaaagtattctgtgtgtaatagtctataaaaaatatagtacaattttacacatttttaaaagttaatatttttgatattttgtatagtaaatacaaaaaataccaccacacaatacattgatgattcgaagtttcgaaccaccattttcattgaatcagctctaatattaaaaaaaaatgatttttttgataaaatatataaagaatgttagttttgttaaaccaatatatcataaatacgatagtatatatttttgtattttattgagcttgtaatcagtacatggatgcgaatccgagtgacgttgatattggtacaaactacaaagtatagtagtctaagtatatgtccatatatatataataaatctgttatattcaatgattaatgaaacctggaaactggaagtgcaaaaatgcattgattactttaatcgaaaagaaaaacaaaatgcattgattatagtatttataaaactgcagattttgcagagagcaggaaacagagaggtttggttttgcgttgcgtgagctgtttcctctttaactctctcttcttctacctcttgaccctctctctctctctctggtgatgcggtttcttccttggaagccatgaaaacacaatcagcttcaccgttcttcttcgtctccttcttcttcttcttcttcttcttctcttctctgtttcttctctcctctgctttaaactctgatggagttctcttactgagtttcaaatactctgttcttcttgatcctctctctttattacaatcatggaactacgaccacgacaatccttgttcatggcgaggtgtgttgtgtaataacgattcaagagttgttactttatctctcccaaactctaacctcgttggttcgattccttccgatctgggtttcctccaaaacctccaaagtcttaatctttccaataattcactcaatgggtcattaccggttgagtttttcgccgccgataagctccggtttcttgatttatcaaataacttgatctccggcgagatccctgtatcaatcggaggtttacacaacctccagacgttaaatctctccgataacatcttcaccgggaaactaccagctaacttagcgtctcttggaagcttaacggaggtttctctgaagaacaactacttctccggcgagtttcccggcggcggatggagatcggttcagtatctagacatttcttcaaatctaatcaacggttcactcccacctgatttctccggcgacaatctccgatacctgaatgtctcgtataaccaaatctccggagagattcctccgaatg

SEQ ID NO: 31192 - DNA, 3003 bp, Unknown
  misc_feature (1)..( 3003): 2750-1469P.txt file - cDNA_ID_3039669; gDNA_ID_2214491; Annot_ID_183656
atgacacagatgaagacagtggctgtgaaaattatacaaaactatgagataaaggtcgttgaaggacacaagatcgagccagttccttctattattcttcacatgaagcatggtcttaaagttacagtcactaagagatctaatttgctctgaatattatgcattactattgtactacatttagtatgaaaataattattagaattttacaaaatacttgaataagaggggtaatgtttacaataaaattaatatttactcttcttagaatactaggaggcttccatagtttaagaatagtcgaatgttacatttctctttagattcatccaaattttctcgaattcacaacaatctatattttttttttcttttcaatttttaatcttttgctcttatcgcttctgctccttgtatatacgaaacaacattagtaacgttcgattatacctactctagctaactaagtaaggatcataagtttttgtaaaacattagtatataacgttactaactactctgttatatacaccgtgaatctccatatagtgtaatactaatgttgacttattagtgttgactttacaacatgtcttttcgttttggtgtaaatactaatgttgacttattacacatgtttatttgtaattagctgcatgagacgttacgaaacatatctttagtgacaggtgggataatgatttcccatgataacaccaaaacttgaacttctttttttcatcatcatgttccacgtaaactctcgctttcgttataaattaagctataacttcgaactcccatgttcagttcaacacatttacaagttcttcgatctaatggaaacccatttcctaattttatctctcgccttcctctttttcatttctcttaaacttttgtttggtaaacggcatagcaagtttaacctaccaccaagtccggctaggccacttccgtttattggacaccttcacctcctaaaacagccgcttcaccgcacattcctctcattctctcaatcactaggtgatgccccgattttctccctccgcctcggaaaccatctcacggttgttgtctcttcctactccatcgctgaagaatgttttacaaaaaacgacattgttttggccaataggccaaagttcattctcgggaaacacattgagtacaacttcaccactatgaccagtgcgccttatggtgaccattggcgaaacctacgccgtatcggcaccctggagatcttttcgtcacacaagctcaacggctttttatctgtccgtaaagatgagatccgacacttgttattgcgcctctcaaaaaactcgcaacatgtatgtgagcttcttctacatatcaaaacattttacttagccagaaaatattataacctattgatttgtgatagtgccgtcactgtttcattatataggtttatacttggccatgtgcatgtgcaaaatgtagattgtagacgccaaaaatattctataccaaatgaagattgtgaagtatgattttgaaagtttgaggattaatcatttgtttatgtgattataattaaaatcagggttttgcaaaggttgagatgagacaattgttttatgatttgactatcaacaacattcttcgaatggtggctgggaaacgattttatggagaggggacagaacaagatgaagttgcgcggcgagtgacacaactgattgacgagattgtgtacagggctggcgttgggaatgcagccgattatataccgattttgcgttggatcacagattttgagaaaggggtcaaggagttggcgagtcgggtcgatgagtttttgcagagtctggtggatgagagacgtgtgcataaacaaaagggtaacactatgatggatcacttgctttctctccaagaaactcagcctgattactatacagatgtcactcttaaaggaatcataattgtaagtttgaggaattcatatactatatgtaacaacactaatcaaactttatgatagcttattattgattttaagtttacaggttatgatacttgccgggactgaaacattagcagggactttagaatgggcgatgcttaatttgttgaaccatccagaagtattagagaaagcgaggaccgaaatcgataccgaagtcggttttgaccggttaatggatgaagctgatactaaaaatctgccttatctccaatggattgtgttggagaccttacgtctttacccggtagctccaacaaatattccacacatgacgtcagatgattgcatattggcaggatacgacgttccacgtgggtcgatgttattggtgaacgtatggtccatgcatagagacccgtctatatgggaagccccagaaatgttcaagccagagaggttcaaaaatgaaaagcttaatcagaagttgttgtcgtttgggtttggacgacgagcttgtcccggggttggcctagctcatcggttaatgagcttggctcttggatcgatggttcagtgtttcgaatggcagagaattggtgaagaatatgtagacactagagaagaacctatggccatgatgcgtcctgcgacaccgttgctagccatgtgtaaagctcgtcccattgtccataagtttctcgatgcttttgcttgaagtgtaactcttctttccttgacttgggaataaaatatgtagtaaaaaaacttatcatgtcaaaaaatctaatagtatagactgaccgtttactaggtcagtgttggggagccaaaggtaaaaagattagagagtgattgtttctcacgggacaaaagacgatgacttcaaaagtcaactccagtcttctttctttttgttccaccaataatttcaattctctatttctccttcaatctcatcttcttcctcaatccagtcttcacatagaccacacatgttttttcatccattgacctcaaagacttgactttctctctttctccttctctgcatcaaagctatg

SEQ ID NO: 31193 - DNA, 3000 bp, Unknown; identical to SEQ ID NO: 11352
  misc_feature (1)..( 3000): 2750-1469P.txt file - cDNA_ID_3039677; gDNA_ID_2214491; Annot_ID_183651

SEQ ID NO: 31194 - DNA, 3000 bp, Unknown
  misc_feature (1)..( 3000): 2750-1469P.txt file - cDNA_ID_3039681; gDNA_ID_2214491; Annot_ID_183650
aaaagagctaaacgatgtctttttttccgtttgttggattactaaatgttgctgtgagtggtcatactacttttgtttaaagtttttttttttttttgtttcttaaaataaaaaacgccctatttaaacttaaaactactactttgatcacacgaaattgagttatcattccaactgttaatgttactctagtgtttgattcattggaagctacactcgatgtcttaaacgagtggcttaacgtgcttagtccattcaaatcccatttgcactgattccattattgtgtttggtctccaaggaacaaatcatggtagcttcatgatcgttcctttgtacaaggtttgtcgatttctttcaaactcttttactacattcgttaaagatcgctttataattaagctcgattcacctagttgtgcaaacaatcgcgtggcttgttgctgcgctcgtaataatgatcaacggttatctattgttggagttcttctccaatgaggtcatggcatagtctataccggtttttgtgactgtgttcacagcttcgtatggtgcattcatcatctatctcattgctcgtggcatgatcactttcactccttggcgatttaaagcggagtctagtcattgagagtgggccaaacaaaatagtgtagtagctatgtcttgtaatccttaggatcatgagttctagctttctcttttgtattatatgtgttgttgttataaagcagctctagttttgttgaagaaggctcttctatgtatcagtagataggtcctggagataataattaataagatctttcatcatttgctaatgatgtttgttgtaatggatttaacttaataataataactagttttgtcccaaaaacaaaaaaaaaacttaataactagattatagcctatgctattaatgttttttttttaaattcgaaactataatatatttaaaagaaaaaaaaacagcttcacgatgtataacacaatatatgataacacatctcaaatttagagatgtatagccaacaacatgaactatcttaatcgattataaaattttattcaatagatttattcaagaacataagatataaaattgtagttaaacctagatgattaatacattatttgctctcatagggggctctccactctcatagagggatccccggggatccatttatactctaatttaggtgtttctttaccatgtgtgaagtaaataccatcttctctagcatcccaaaagttctttttaccgtagtgaactatcagacctccacctttatatgccctaaatcttgcataaaagttgtaattataataactacttccttgctttaactcacaatcaaatatagttttcaagacactatcatgaaaactgaatgcgtaagtttgtccatgtctcaggtaaacgtagtcggtgtcgtcgtgttctgatgtacaatgaatcctgagaagttttttcggaccaagagaactcttaaaaattacggagtttttttcgttgaatttcgcattattcaatcctgcacataatataataacaaggaaaaaataagaaaaacaattcattgtgaacttttttttaagatttatttgttctttagttttaggggtgatatatatataaagataaaagatgcttatttatacaaagtgttttgctcatgctttaattttcttcctgttttggcatcttattaaaggaatattttgtttcaataatatttggtgctgttctggaaaaaagctcattcaacgttcaacttttacatttaagggacatactggattagtaatttgggatgatttattccataaaaacaatctcaccttactggactggtcatcattttctgaaatgttttaaaatccagtctcattgaaatctagtatttatcaaaacattccaaatctgtggttattcagttgataatttataaaattttcaaatctcatgttattggaaaactgggattttatcgtaagattttagtaaaaagtttcatatgatttgagagacaatttatagttaaaaagtgtgggtagaacaatcaaacattctataataataaaaaaagaacaatcacacctcatatatgattatatttatatactcaccttgttatatttctatgatctaacaatatagaagaagtcaataatcaaataacgtagacaaaacacacatatatatattgatttgttactagagtgtcgttagtatgcaattgttcaatatacataatttatgttattagataacatttagacaattagttaaaatatatgtatttttttgtaatctaagggttgatttgtatattttaaaagtttctatcaaaagattgatttttgtaagtttcctgaaggaaaaaaaaaaaaaagacaaaacacaaagtggaggagaccaagctgacaaaacaatgtccgaaacggcttagaacggcttaaaacgccagcaaatttcgatctgaccaattgcagacccaaacaactcgtcgaatcttttttttttccttcttctttggctaatcagaaataataatacacggagaagaagaagaagatttgcgttttacgtgctctcaactataatctgcaagaccgagaaagattgatttcccttcttcttcacgtgcatgtttgtttctttcttctctctttctctcgtatagtttcgatctatctatctatctcacttagggttttcaattttaccccttttttctctgttccaattctctaacctctcttcgtcaaagctcttgctcattacatttccgagacacccatttgatcaatttcgtaagatttcaggatttttctcctcatgggttacatttgaatttgaattttcttcaagagaaaagttttggattccataaagttcgtaccttttggtgattgttcgattcgtagcaagttaattcgtgaacccttttgatctgaagtttcaaattttgttgctttttcagggtggaaatg

SEQ ID NO: 31195 - DNA, 3000 bp, Unknown; identical to SEQ ID NO: 11375
  misc_feature (1)..( 3000): 2750-1469P.txt file - cDNA_ID_3039701; gDNA_ID_2214492; Annot_ID_183719

SEQ ID NO: 31196 - DNA, 3000 bp, Unknown; identical to SEQ ID NO: 11366
  misc_feature (1)..( 3000): 2750-1469P.txt file - cDNA_ID_3039705; gDNA_ID_2214492; Annot_ID_183717

SEQ ID NO: 31197 - DNA, 3000 bp, Unknown; identical to SEQ ID NO: 11364
  misc_feature (1)..( 3000): 2750-1469P.txt file - cDNA_ID_3039724; gDNA_ID_2214492; Annot_ID_183708

SEQ ID NO: 31198 - DNA, 3003 bp, Unknown
  misc_feature (1)..( 3003): 2750-1469P.txt file - cDNA_ID_3039734; gDNA_ID_2214492; Annot_ID_133480
atcgattattaacgaggcccatttaatcaaggaaatcatggaaattgaatttaccaaatttgggcctatgaatcatggaaattgaatttatcaaatttacgattgcattttttttttcttttatatttttttttttatataagaaaagaaaacgattgtatttgtaactaatgtaaattaaatatttgaatatcaaaatatactgtaatactatgatatttcactattgtcattaatattgttttttttctttgttgtgtgtttcgaccacaaatgacagatattgttttattctatatgaacgtatgatgtctagtaaacgtgctggtaaagatatttgggtaatattggcatatgtatgtttgtcctaagtttttcatttatataattgtagtagtcacctatgttatatcatcgaagtatagaggtagagttagagattgagagaacttgtatcctccgaattttttcgatattagtgaaatctgcagcagaagaaagtggacgtaactctttttgagtaaaaccactatatatcttgtgtgcacattattttttctactttaatttcgtgttcttgaaaaaaaaattagatccttaattcctgacatatatatgcaacaaatgctaagccacattagtcacctagtgggacataaaattaatacatcaataggggcattattagcaaaccttataaaattacttttaatttttaaaaaaaaatcatgtgtacaagtgaccctcccaaaacctatgtacgtcggccaatgtgcataatattacggacacgcttgcaagaaattttacacaatttcttagttgcataaaactactccgaccaattatctagctagtcctctacaattaatctaaaattagagagctttctcaaataattgtagtctacctaaattttctcattgcctctttctttaaatagcttaacaaaaatcactggtcacatatgtagtcagagtatgttatatatatgcatatattgaaacatcatcctattcaatctcacaacaaccaatctacacacaaaacaataacaacaacaacaacaacaacaacaaacaacaacaaacaacaacaaaatgtttacaaaatcaatccttttaccttttcttctggtaatcatcttcgtctcagcatctcaagctagtcgtcaactctgggatagtggaatcagcgagatgtttggttccaaatccgggtttcatcatggattttccgggttttcggggtcctctggaggtgctggaggtgctggaggatcattcggagatatgatgaatgctggaggtgcacatacatgctcggcgcaaggagcttgtagcggtaagaagctgacatgtcccgaggagtgctacaaatcaaccaacgttaacaaggatggttataaaagcaccagccgcagtggaggatgttcatttgactgtacgaccaagtgtgccgcgacttgttcaaattaacatgttaatttgcacatatatattatatgttcgtatagtatgttgttatgttatgttatagcattatatagtctatatatatgtcaatataataaaaccggcaaggtatatgggaggtttgtgtctccctttgtaattttgtatggatcttgattagaagctttctatgaatctatgtacataatatgattttgaataaaagaaaatttagtgtttcttataattgtgtgagtaaatctctatgccttatacatgccaggaaatttgagaccgtactaatgtacatagcgcgatcaaggaattttggcactatctatatagagttttagttcatgtctttttaagatcaacaagacattagcatcacatggctataatacttcagattattaaaataattcatctaatactttagattggtaagcatataatactaacgttttatgaatgttaaaacttaaatcccccaaaactttaaagaatcaaaacaactaacttatctgtataattataaacatcaattaggttcatttagagatcccaatgattataatcgatataatcaaattgaaaggaataaacatagatcttggtaatagttatagctagtattttaattcacattacggattggtgtttatctggcatctgtgatctactataatttcatttcattcgttatgcttattctaaactcattgcattcctttcttctccaattaaaatttatcatatgaataacatgcctttttcaccaatttaaaaataatgattacttgttatatttagatgtattataaagtaaaatatttttattttatttacataacccatattaattattccaaaatatatgatgaataaatgatgcatagtataaataattgtgatttgaatgattttgtcagcggtaaatgtcactagatcactatttgtgtttggtgaaagacgaattatactttttttgttgttcaaaaaagtacccttttcccccaaaacacatttttagactaagattataatttatcatttatcaaaaagtaataaacttaaatttgaatcatcgttgtaatattagtattatatatatcgaataagaagctatttaaattcttaaaattatattttttttttaaaaatcagatttttcatagcaacactttaagatagggggtactagtagtatgctttgatgatacaaatagcttaaacaaaatatttgcaaagaaattaaaatacaatcttagtagcatgattcgctatcacaaattctcaggttaactaaaattaaagatcctccccacatacaaaaagattgtagtctcccttattttgctcattaccctttcttttaaatagccttttaatattcttcatagaatcaatttcaaatctaaacttaaactctggcctctcttatatgacaactttaatgaataagatcttacttcttttcttcaataaatatttcctctgttcaatttcttgttttattttatttttgaagaatatggttgaaagaatg

SEQ ID NO: 31199 - DNA, 3003 bp, Unknown
  misc_feature (1)..( 3003): 2750-1469P.txt file - cDNA_ID_3039734; gDNA_ID_2214492; Annot_ID_183699
aagtttggcccaatcgattattaacgaggcccatttaatcaaggaaatcatggaaattgaatttaccaaatttgggcctatgaatcatggaaattgaatttatcaaatttacgattgcattttttttttcttttatatttttttttttatataagaaaagaaaacgattgtatttgtaactaatgtaaattaaatatttgaatatcaaaatatactgtaatactatgatatttcactattgtcattaatattgttttttttctttgttgtgtgtttcgaccacaaatgacagatattgttttattctatatgaacgtatgatgtctagtaaacgtgctggtaaagatatttgggtaatattggcatatgtatgtttgtcctaagtttttcatttatataattgtagtagtcacctatgttatatcatcgaagtatagaggtagagttagagattgagagaacttgtatcctccgaattttttcgatattagtgaaatctgcagcagaagaaagtggacgtaactctttttgagtaaaaccactatatatcttgtgtgcacattattttttctactttaatttcgtgttcttgaaaaaaaaattagatccttaattcctgacatatatatgcaacaaatgctaagccacattagtcacctagtgggacataaaattaatacatcaataggggcattattagcaaaccttataaaattacttttaatttttaaaaaaaaatcatgtgtacaagtgaccctcccaaaacctatgtacgtcggccaatgtgcataatattacggacacgcttgcaagaaattttacacaatttcttagttgcataaaactactccgaccaattatctagctagtcctctacaattaatctaaaattagagagctttctcaaataattgtagtctacctaaattttctcattgcctctttctttaaatagcttaacaaaaatcactggtcacatatgtagtcagagtatgttatatatatgcatatattgaaacatcatcctattcaatctcacaacaaccaatctacacacaaaacaataacaacaacaacaacaacaacaacaaacaacaacaaacaacaacaaaatgtttacaaaatcaatccttttaccttttcttctggtaatcatcttcgtctcagcatctcaagctagtcgtcaactctgggatagtggaatcagcgagatgtttggttccaaatccgggtttcatcatggattttccgggttttcggggtcctctggaggtgctggaggtgctggaggatcattcggagatatgatgaatgctggaggtgcacatacatgctcggcgcaaggagcttgtagcggtaagaagctgacatgtcccgaggagtgctacaaatcaaccaacgttaacaaggatggttataaaagcaccagccgcagtggaggatgttcatttgactgtacgaccaagtgtgccgcgacttgttcaaattaacatgttaatttgcacatatatattatatgttcgtatagtatgttgttatgttatgttatagcattatatagtctatatatatgtcaatataataaaaccggcaaggtatatgggaggtttgtgtctccctttgtaattttgtatggatcttgattagaagctttctatgaatctatgtacataatatgattttgaataaaagaaaatttagtgtttcttataattgtgtgagtaaatctctatgccttatacatgccaggaaatttgagaccgtactaatgtacatagcgcgatcaaggaattttggcactatctatatagagttttagttcatgtctttttaagatcaacaagacattagcatcacatggctataatacttcagattattaaaataattcatctaatactttagattggtaagcatataatactaacgttttatgaatgttaaaacttaaatcccccaaaactttaaagaatcaaaacaactaacttatctgtataattataaacatcaattaggttcatttagagatcccaatgattataatcgatataatcaaattgaaaggaataaacatagatcttggtaatagttatagctagtattttaattcacattacggattggtgtttatctggcatctgtgatctactataatttcatttcattcgttatgcttattctaaactcattgcattcctttcttctccaattaaaatttatcatatgaataacatgcctttttcaccaatttaaaaataatgattacttgttatatttagatgtattataaagtaaaatatttttattttatttacataacccatattaattattccaaaatatatgatgaataaatgatgcatagtataaataattgtgatttgaatgattttgtcagcggtaaatgtcactagatcactatttgtgtttggtgaaagacgaattatactttttttgttgttcaaaaaagtacccttttcccccaaaacacatttttagactaagattataatttatcatttatcaaaaagtaataaacttaaatttgaatcatcgttgtaatattagtattatatatatcgaataagaagctatttaaattcttaaaattatattttttttttaaaaatcagatttttcatagcaacactttaagatagggggtactagtagtatgctttgatgatacaaatagcttaaacaaaatatttgcaaagaaattaaaatacaatcttagtagcatgattcgctatcacaaattctcaggttaactaaaattaaagatcctccccacatacaaaaagattgtagtctcccttattttgctcattaccctttcttttaaatagccttttaatattcttcatagaatcaatttcaaatctaaacttaaactctggcctctcttatatgacaactttaatgaataagatcttacttcttttcttcaataaatatttcctctgttcaatttcttgttttattttatttttgaagaatatg

SEQ ID NO: 31200 - DNA, 3003 bp, Unknown; identical to SEQ ID NO: 25688
  misc_feature (1)..( 3003): 2750-1469P.txt file - cDNA_ID_3039750; gDNA_ID_2214493; Annot_ID_183743

SEQ ID NO: 31201 - DNA, 3000 bp, Unknown
  misc_feature (1)..( 3000): 2750-1469P.txt file - cDNA_ID_3039754; gDNA_ID_2214493; Annot_ID_183741
cttggagtgctcctctcgttcctcatgtaccaaattcattgaacgatgatcaattgattcaccaattccaccattagagagatgatcgtcattaccatagatcataagaagccctaagttcttgtgtttcatgtggtgatcaggagcttctggctctttgcaaaacacacataagccattcaaccagctctcgtttatctcttcccacgatatgcgccgacgactcttcatcgtgcaagtagctttgatctccaccgaggacacgattggctctgataccagtgataacggaaaacagagtaacgaaatagaatgcttcgattaatgaaaatgacagattgatacaacgttcatgaaacgcgatatcaacttctcatctacaagagttcaacatgaaactccggcgaacgatgaggaacgattctcagagagaatccaaaaggaaactataaacaacaaatccaaaatcttcttatcttctgcaaatgatcttcattagctatatatctctgcatctcgattcttcctctaacactcccatcgaccaatcttctcttgccacgtctcacagctactgtctccactcatgtattgccacgtatctaaccatatatcaatgcctagtttcctatatcagattgacaccgaagtattgaggacgagagagaagagagaagtgcttcgttatagatgcaaatcttatctctgtctccctcaaaacccaaggagagggaagataactattttaatgttgattttttttttttaatgaattttaaaaaggtaaaaataccttattgcttttatttttataaaaaaattggtgtggccttgtgggagctatttttagttagtgcatataatatgatgctattgaaaatccctaaagcttattaccattgttagtttgttaccattcacaccttgagtgtttgattgatgggttatttcaacacattccacgtttgcgaccaacgtttgatcttatttctttctattaccaaaaaaaaaaaaaaaaaaaaaactcgaataagattaaattggaattactagtcggtttagataagatcataagagagaagtcgaagttgttttggaaaaaaaaattccgatagatgtaagcttatttgtggttgaacttataaaaccatgtatgtaaacgagcacacatttagtctgtaacctgtttattctaatttcttataacggaccacagtcacatgtttatctctaattctacaaagttgtctattttcaacggtggtcaaagtatggattagattttcattgcacccaccaccacctctctttgcaagcacctcccaagaaaggtacgtatatcagatcagagggtttactttttcataatgttagtctttgatgagtttgtgttcttttgtgaagaatataatgtagtctttcattattttggcttgtgtctttcaaaactctcgtgaaaaaatgatgctttataccaatatacaccttctcatttcctagcggatttcattatttcatagttttgaactttgaacgtgaacgaaaagccaatagttatatctatttaaaatgcatcaataaacaatactctatttgtgatagtatgaggtgagagagaagaaatgatgagcgatgcagaggggagaggagacatgcgtgacggaaaagagactcaaaaacgacacacagttggaaagtgaggagataatatagcattatttttagggtttagatcagaagagagaagtttcgagagaaagagattaacggagacaaacaaaaacccttccttcactccaacacaatgaagtcaacgtgcttttaacatgtggataccgatatctcccacgctcttcctctgcttcttggttttacactcgcccttgtcttttgccctttgtacccaaatatatattcagcataatcgtgaaatgacgactatgtagaatgataatgcaccaaagactaagatattttagacgcccaagaattaaatttggatacacaaaactaatcacttggtggtgtcccgtctcaaagctcgatcccaaaaagtcaacaacatgcaccatgaccatgagtattctgtattcactaccaaatcgacactactataactataacgtcaaactaatccatatgctttgttttacttttatagccccctcgattacgaaacacgtatagtttggtatcaagacaattgtagagattatgtatggtgagaaattcatatctttgcagtcaccttaaacgcaatctatttgagatttgtgaaatcaagaaagtaattatataaaaaaaaaagatatataacgaatcgcgaaaaattattactaagtttattttttgggagataaatgatatattccccaagtaatttacgtaaattattttaaatgaactattaagtcaattatatatttaaaagaaatcttaaaactgatatcctaatttatgaaaaaaaaataataatttaaatctgctttcccaaatattaaatgaactattaagtcaattctttaaaaataacagtttaatatttttttgaagatcaaaattactacttactatcttaaacatatataatagtcaatcaaaaacaaattcaaaattaaaaaacccactagcacatcataaaatttaatttagctactcttaggaaaagtgttattcaaaataaatttcccaatttatttttctagatttgctgtttatcatttattttggaaagcgattaattttggatattataagtttcatgaatcactagtgtaagttagcgagtatgattccggagcgtaagacccacgcgcagtagacgaagacggaagcaagcaccttctacttcctcttcctctttgtctttaaacccctcgtcgtctttctcccgtgttctaacctcattcctccataacccctttcttccttttgaatctctccttcttcttcttcatccccaaattcgaaaccctaaccctaaaactcagtttcaaaatg

SEQ ID NO: 31202 - DNA, 3000 bp, Unknown; identical to SEQ ID NO: 11378
  misc_feature (1)..( 3000): 2750-1469P.txt file - cDNA_ID_3039766; gDNA_ID_2214493; Annot_ID_133505

SEQ ID NO: 31203 - DNA, 3000 bp, Unknown; identical to SEQ ID NO: 11387
  misc_feature (1)..( 3000): 2750-1469P.txt file - cDNA_ID_3039766; gDNA_ID_2214493; Annot_ID_183732

SEQ ID NO: 31204 - DNA, 3003 bp, Unknown
  misc_feature (1)..( 3003): 2750-1469P.txt file - cDNA_ID_3039770; gDNA_ID_2214493; Annot_ID_183730
aatctcttcaaaacccatcacatgctttctaccactaaaacaggcccatcacatgctttctacctctaaaacaggcccatcggatatgttcctatattttttgtccgataaagttataagaagcgcaaggcccataatatttttagttattaaaaaaattagcagacgtagggttgacttaaaaaagactcttattacattagtcgacaagtaaaaaacacgtggcatatattgtgcgttcgtagagactgtaataaagacggagagattcttctagagtcagttcttcttcttcatcctcttcttccccccaaatcctctctcgctagggtttctcattccgatccataattctagatgtcgaggtattcttttgattgagctccgcttttaaccaaaccatcttagattttgttttcatgattggatcactgaattgaaattcttctcttctgtctttagatttcttctcaggtaattttgctctgctttgtgaagcgttttcattgatcggattttagcttctcgtatttaaattgatacttgtgtgcatctgaaattcgtttggattaagccattccgaattttgagttacttgtgagttgtgagttgttacattaccctctcatttattttcccactccataaattggtttcagttagaaattgtagtagctacaaggtgattgattgcatcattatttgaaccttcgttggtttgtgttggcttatataagcaagttccgtcaaaagattaaaactttgggttcagtctctgtgtgtttattagcagctagactttgtattgcctgaaaattcatgattgagggatatgctttatgtactattataagttctgagtttgtagaaacaatattttgtgttttggggaaaacaccacaataactttctattaatgtattagaaaaagaaagttggaacctatgttttagaaaattttttctctatatattgaagtatgacctataattgaatcttctgatgtgcactaaactgaggcaagcgggatttcctggagtctttggtttgcttacttggaaaaaactgtagataactgattactaacttatacccacttttgcaggtttttaactgagacctgtcaaataagctaaagcttcttctaagagcttcaaggaaagcattgcattgttgtggtcttgtttgtgtccacagaaggaaagaagagtgagaagctcaggatgtcaagcagtcgaaatacccactggtgtcacagatgtcagcgtgctgtccgccttcacggccaagagcctgtatgcttttattgcggaggtggatttgttgaagaacttgatatggctcaagccagcccctttgatatgtttagatcccacaggggtgttgtagaacgtgatcagacttttgatctcatggatgctttctctgtgtttatgaggaaccgcttagctgaaaggagccacgacagagaaatcagaggaagaaccatcagttcaggtcctgaaaactttcctggtctggcccctttgttgatctttggtggtcaagtcccttatagactaactggcgacaatgcagtcgaagccctcttcaatggcggctcccctggcattggcatcacacgtggtaacaccggcgactacttcttcggtcccggccttgaagaattgttcgagcagctttcagctggcactactcgccgaggcccaccacccgcaccgagatcagcaatagacgcattgccaactatcaagatcgcgcagaggcatcttaggtcatcggactcgaattgtcccgtgtgcaaagacgaattcgaactgggatcagaagcgaaacagatgccgtgtaaccacatctatcattctgactgcattgtcccgtggctggttcagcacaactcttgcccggtctgtcgccaagagctaccatcagctagcggaccttcaagcagtcaaaacagaaccacccctaccagaaactacagaagcagtagtagtagtagtagtagtaacagtcgtgagaacgggaatgaaagaaggaatcctttctcttccttctggccattccgttcgtcaggttcaagctcaagctccactcaaaaccgtggaggcacaagaaactcggatacaagcgatgagaaccataactaccatcaacagcaacatcaacaatcatatatgggttacagtggctggccttttgattactaaaagtctaaaagtgagctaaaacaaatctttggtctcactttggtctctttacttaaatatgcttgtgattctgcatatgccttgtgcttcactctctatctctctcactctcttttatcaacataaataatggagaactgtatttgttactgtagattttctttctctgttaaaaacgagttcatcattttctatatgctttgttaaatatgtcattttagttgggtttttgaaaatggttgaaatagatttttgagttgatcgataaataaataaatgaaaacgtctggacactcttgagcgatctatcagtatctcgtgatcttcttcaatactaataaaaaaagggaaaagaaagagaagagagtcgtgctcataaattaacggtgcagagcgattgaacaaaaacaaaaatatcttccagaaaaagccatttttgattgcgtataatgaatacacgaaattaaaatcattacttgccatatatagtacactatttctcagcttcactcactctcgagactcgtgtatgttgatttacggtttgttcaagcaaaggtgatcatcaattcccaattttttttacgtcactattttcgattcactccaatggcttgcgtgttgctgatttcttgattttgtggttcttgagttagtctccatctgataagtaagtaaattatgtgattgtgatctgggttttgctaaagttttgatttttattattgttgtttagagaatgatgaatctaggatctctttcgttgagtacgagcaagtcgagtaagccaatg

SEQ ID NO: 31205 - DNA, 3000 bp, Unknown; identical to SEQ ID NO: 11376
  misc_feature (1)..( 3000): 2750-1469P.txt file - cDNA_ID_3039778; gDNA_ID_2214493; Annot_ID_183728

SEQ ID NO: 31206 - DNA, 3003 bp, Unknown
  misc_feature (1)..( 3003): 2750-1469P.txt file - cDNA_ID_3039813; gDNA_ID_2214494; Annot_ID_183780
ggttgattgaggtattgattgactgaagagcacaattctgcatcaccttcagctcttggctcctgcaaaataatttagaaatagagttctgagagacaaacaagatcaaagatataagtgattaaggtgaacaaacatacaaacatatctttaagaaaacaaacaagtaacctgcatccagaagaataacttgcggtcatcactgttgaacttcagaatatacaccctgtctgaggattgattaaccttttcaaatagagcttcatctgggaaaacaatttgatcctataaataggtatggtcaaggagaaaacttcgtaactggaacatctggtagcaacaattaataaatccttcagtttttgttctattcatgcatggcaaaaaataaaaaaacctcctaggtggatagagctaagaaatttgaccgtcttgggtcacgaatccactggtatagcaaagacttgatactaggagaatctctagtccttttctaaaattcaaaaaaacaagtgcagaggatacatcttctactgtattctggtttcgatcaagccactggaaatgaatcagtccctcgtcaccctaaaagaaaggataacaggattaaaaaacctaggttaacatttacagagaaccagtaataaacgtgttctgacaccaacaattagattccgatatgctttaacttcaataggaaaagctgatacactccaacgttcaatggaaacgaataaattcaaattactaaatggaaactaaaagcgtcgacattactctagctatgcggacaagtccttttcgtgcatcagggacaactcttgttccctgcaaagacatcttcccagcacgaaactcaagcatgatctcctgccaaaattagtccaaacataagtgtaagaaccttcgtaattagtctaagaacaataagagaaagataaacaccacctatagttacctgcatcacgggaaacgcttcgcttgaactcataatcaccacctctttctagtgaacactattcagtaaacagagaaatcagaataaattcagcttggtgctcttagatcaaggcttaaaacaagttcttctgcaaagtttattgacaacaatcatatgtatactaaagataacgaaatccgtgaaaattgcaaaaccaaatctcgaacagagcagattgaagcgaagataacaaaacgctagggttaccaatcttcgtagaaattgaaaaaaagagagagagagagagagatttacaaccttaaggctagtgtgttgacaaggttaaagaataccttagcagaggaaagttcgcgagtaatggattttggagagaaagaaaacgcttctcgtttttttttttctttcaattgcgtcgtctcttgtgttttttctttcttcttgtataaacaagggcccctataaggctacaaacaacaattcatccgaacaactccaagcccaatccgaatttttcttcattaggcttttaatttttgggtttgctgcaaacaaaacctgtaagtcaatttcgtttacaaatctaccattcatatccgaactatacaagttaatcatatgaactctaaagtcatccgcaaaataaacttcggtcatatcgatgacgtgacatcgctaaaaaggacatgaatttcattagtttcttgtgccataaaacataacaaaaaatgacatgaaaattaaagaaaatatccattgaaatatcgatttgggggaaacattaaggtttagagagtagttcatttggaagaattcgatatgggaaatgatggtatcgtgatccacttagattacagagtggttcgattgaggtcatattattaatctatattaagagagtcaaattgatttagagggtttttcgaaataactatcttttttatataaattttaaggtgcaaatgattgcctagaattaagaagttgaaagaattgaatgagcattcatctaatattttaccatttaaaatgaataagttggaaaaataatacaaccatttcaagttggaaaaatgaactaattattaaaaataaagttataacttgttcatctcatatttcgcagaggaatgagttgaatatcgcagaggaatgagttgaatagtattcaacttttttttttcaactcaaattttctattttttttcatcgttatccaaccatttgcagccttaatatattcagttcaagtgaatgatcagatcacttaacttagaaaactcacattatttattgcaaacttaatcacttgattattccataatctaattaggctaattctctaccaaacctctctcatatcacttaacgcagccaatatctaaatagtctgctaaattctcaatcatccatctttctatacaaaactaaaaagttaaattataaagtctacaagaaaagttggaaccctagtaaacaaacatacattttacaaacagaaaaaaagcacttgagaaaaagtaatacaatgaggtccatacacgtctgatttagctgtaatgttggtacgtccaaagaaactcaccgtccaaccacatcactacttaaccactacgaaatttccatcttattattcttctttatcatttcttattaaattcaatttaacttcttattttaataaccaaataaaaaagtttcaacaagaataaaaaaaaagtaaagtgttattcatatattcgacagtgacgaaaacaagaaactccaatcaaacccaaaagcccaaaacccagaagaacaaaaaatctctcttttgaaaattctccttttgcaaatcattcaagtgaagcacaatcatcttcttcttcttctccagcttcatcaatctcttctagactttttgcgtttacctgaaaaactgttttgatcgtaagtatctgattgcttcgatgtcgctgtcgaatcagattcccgtttactctcgatgaccctttgcttcttcttccactttttttccacagttttctgataactcttctcagatg

SEQ ID NO: 31207 - DNA, 3000 bp, Unknown; identical to SEQ ID NO: 11406
  misc_feature (1)..( 3000): 2750-1469P.txt file - cDNA_ID_3039817; gDNA_ID_2214494; Annot_ID_183779

SEQ ID NO: 31208 - DNA, 3000 bp, Unknown; identical to SEQ ID NO: 11403
  misc_feature (1)..( 3000): 2750-1469P.txt file - cDNA_ID_3039833; gDNA_ID_2214494; Annot_ID_133537

SEQ ID NO: 31209 - DNA, 3000 bp, Unknown; identical to SEQ ID NO: 11410
  misc_feature (1)..( 3000): 2750-1469P.txt file - cDNA_ID_3039833; gDNA_ID_2214494; Annot_ID_183772

SEQ ID NO: 31210 - DNA, 3003 bp, Unknown; identical to SEQ ID NO: 24852
  misc_feature (1)..( 3003): 2750-1469P.txt file - cDNA_ID_3039843; gDNA_ID_2214494; Annot_ID_183769

SEQ ID NO: 31211 - DNA, 3003 bp, Unknown
  misc_feature (1)..( 3003): 2750-1469P.txt file - cDNA_ID_3039855; gDNA_ID_2214494; Annot_ID_183763
aggagatggatccgatgttacatttattaccggaaaccgaagtgtcggagatggatggaccactttccgatctgctactcttggtaaacatctttgactcttttaaaaatcttgtttatataaaacaagactcaagtggtatagtttggggcatagtgtagactttaggaccgtagaatttttgccttttttttgtcaactaggaccatataatttaattttaaataattatatatgaattttctatgaaattaaaaagtaatattttaaatcttacaatctttggtttaggaaaaaaaggtgaaatagttgtgaacataagtaatcttgtatggttcttggagccatatttgttgcaatgacaaaaattaaaagcgataactaaagtggttggtactaaatcgagatagtaatgcttttcaaacttgcttttgtcacagcggtttccggcgaaggattcttggcgagggatataatgataacaaacacagcaggacccgagaagcaccaagcggttgcactacgagtgaacgcggattttgtggccttataccgatgtgtcattgatggttaccaggacacactttacacccactcattccgacaattctaccgtgaatgcgatatttatggaaccattgattatatctttggaaacgcagccgttgtcttccaaggctgtaacatcgtttcaaagttgcctatgccaggacaattcacggtaattactgctcagtcacgagacactcaggacgaagataccgggatctcgatgcaaaactgctccatccttgcgtcggaggatttatttaatagctcaaataaagtgaagagctacttgggacgtccgtggagagaattttcaagaacagttgtaatggaatcttatattgatgagtttattgacggttcgggttggagcaaatggaacggtggggaagcacttgataccctttactatggcgagtataacaataacggtccgggttctgaaacggttaaacgggttaactggccgggttttcacattatgggttacgaagatgcctttaacttcacggcaacagagtttatcactggtgatggttggttgggaagtacttcgttcccttatgataatggaatttaacatttttttttgctagaaatgtatagggtttgtcttcatataaaaatctaattacaataattaataaataaaaatctaaataattctatggtttgagttatttctcaaagctgtgtattaattaagataagctggcaaaatatgtatctttcttgaaaagtctaaagcatgtctttcttggctttatctgagtttccactttttaagaacgagaaacccatgcgaccatgtctttttgaaagttccaacactttaaattaaaacatgcttgacaagttgtgttctgtcagattcagtggcatattttatttttatgaagacggtgctgctaatcaaatgcttaaaagacggtgctggtgatacataactaacgattgcatttttgttttaattctttgtttatatacctccttaattgtattcagagttgaaaaacaaatttgtatacacatacggtagccagtcgcatcttcttggctttgcaaaaagtgggttacaaagatagcattatacacatagacggatccataaattattgtacatcgaaagataatttttaaaatgttaagatagtatatgtttggggcaggttttcgtaaatcgtaatccaccagatcattacatttgtttgtagtcgaaaacgttgttgtttttggattactattgagcaaaaagtagacaacccaagcaaatttaactcaactgtgttaggtgttgatgattttgcttaggaatggacagaaaaaaagttgtaatctccaatatgtaagctagcatctgttattgcgtgaggcaaagcaaacaacgactagcatcctcgcttgtgtcactccaaacaactttagagctaacttaagtgataaaaatatggcacaagtacttgctgcaacagcaacaccattcacgtaatataagttacacgtattaataagggattcgtctaaaattcggtgataaaaaaactaagatacaaatatactattacaattgttttttttgttttttttgggttgaattgttcaatagaattatgtaacattcccgtgacaactcttttcaaatgggatttgagatgtttcccaataaaaaatgtttacgtctagtcacgagtgtgtctcttcaatagtcatcacgtgatcataacttggcatttgctcactctgaagttttacatatatccaccaaaaccattgttgttgcctcttttcgagtctggtgatgtggtcacttactcacttactcacttacctatatgatcttaagccctaaaaagataaggaagcaccaaactgatagagaccgaattaataatactatttacttttcattattgtcttttattagttttattgttttttcttatagctagattttcctttgtgatttgcttgttcgccaaggtgtattcctatttaacgaagacctatgagtttaatagagatcatccattaagatatcaaaagtggagttgttattttactcgaataaacgaaataggagattgacttcgttttgatttttgaccaacaactctagtctagcaataatgtatgatacaaaaaaaatggttgctaaatttagaaggctcaatttcttttcaaaaaattgacatcagcccacaaaactctcctgtccagagcagatatgttcaattgtagaaattgcaacaaaacagtaacaaataaaactgaaaccatggaatgaagacaggggagagaagacaagaaagagccaaaaataaaacgtaaaaaggattcatctttccttttaacctctctgccttggccgccttctaaggcagaggagattcatttctttctctccccaagaaaaacaatacaaaatttcagaaaatttatagtaatttcagtatg

SEQ ID NO: 31212 - DNA, 3000 bp, Unknown
  misc_feature (1)..( 3000): 2750-1469P.txt file - cDNA_ID_3039865; gDNA_ID_2214494; Annot_ID_183758
tacaccggcaaaagcagagcaggtgagcagatttgaggaagagacgtgggaagaagatgcaattgacaactcaaatcctaagggtacaaggaaagaagccgttgaggtgatcctttatttcggtgttattgacattcttcaagactatgatatcaccaaaaaactagagcacgcctacaagtcactccacgcagatcccgcgtccatttcagctgttgatcctaagctttattcccgaagatttagagactttataaacaaaatattcattgaagacaaatgagaatgaatttaagtaacgtgcaacacctacacaagttcaaagaaaaagaattttacggtacatcagaatctcaggcatgggtttggcatttaattttttgggttttgaatgtcaaatttttaaacccttgaggcccctacacacgatgagatcgcacggcaccccgcaatgttgctcgaatccaggatgttgaagaggttgccggctgttttgatgaatttttggggttcactcattttttaaagaggaagagagttttggtgcttcctcaaaagatagtgtagatattaggataatgtttcttcattttattgttatatatggcgagccgagctgagaaatacatggacaaaagagtaaatgttttagcattttgtttctgcttatgattcattactcttaatctttatatatatatcgataggctttttgtaaatagtttctttttgtaatattgttttctactaggatgatccaagctaacgatctataatacctacgtttttcataaatagttgttcaaattataattatacaatttctgttattgcttcaagccatccggcaacatgaaattaacaagaggaagtccttataggaaaaaggttaagtttgtccaccggcagcttgcacataaaataaaattatcaggtgaatttcaaaaatccgtctcgaacatatacaaattttagcaaacggcatgatccatcaataataaaattaatgttttggtgagtgaacctaggttgtgcaaatgtgtactactcaagtagcgcataattttagtgaggggataaattacactagaggaacacgagtacgtagggtggtacaacgagtacaatccaaattggagaagtcatcattgttagagaattaggcagttggtaccacaaattttgtgctgaaacttttcgacaaaaacgataaagaaaacacacgttcttttaaaattattttatgacatgatcttgaatcaattcccgtttaggctatatataatgattcaaaccacacttgaaattttatttttcctacattaaatcaaaatctccatattgataagattgtgaggctggtttacacgggattgatgaaagcctcaagagtaaaaaggtcacctctctcccttcaaaatttttaggtgccaaataggtgcctcgagggaaaaccatttcggcacctaaactacaagctgacatttgtatattcttgtgtctttagcgaggaaatcatcacaaactgaattatgacgtagaataaaacaaatttaaacaaaatacaaatttcgatataaaactagaaaattcatctaattcattggagtcaaatcattttaattagctttaaacaatctgtcttcaattgaactttggccgtatgacgtggtatgagtgagttcatggccatagaagcacctctaacttagtgtgaagagtagaaagaggagagagacgacaagtattaagaggttcgcacgtactctctctgccgacttctaaataattaaatagaattaaaagtaagctacacaaagttgttatacgttataatcctttttgtcttaataaagataaataattgttacacgtacgttataatcttggattcattatggagttgaagagttatatcatctttattttttttctctgaaaaattaccttcaaaagtcatttttttttgtaactttactttcgatatccacaaaatacagagaaatcctgtgaagtcaaaataaccttcaacataactctcatatatttatttatgaagagtatttatttatttatttacatacattagattttaaattataagaatttattttagtctcctcatcgcgagaaatttgatttaatattttatttaggtttcataatttataaacttgacgatggtgatgacatgctatattgcagagtattttttatttaaggggaggtaaatggaggtaatggataaagttacaaaacatggtgatttggtttcctgccgaaaaacattttcctaatttttttcaaattttcgaataaccctttgtttataactgcaaaattgggatcttgaaccaactcttttacctatgaatttttgggtttctaacgtaattatatttgtagcttgacaaccaatctctcaagtagccccttctcttcaaccaacctatgaattatttaagttactatgtgttcttcattttggttttgggatttggttttataacttatttcttgttgattaagaaaactctcaaccaaacaaaataatggagggtgagagtgagaatcaaacccagagtggaatggataaagagcattagcatcatcaaaactttaaactcaattttctaaatttgtctaacagataattgttataaaaaaagctgtaattctaaaaaccacaacaccagaaatattaaaaaaaaaaaaaaagataaaaataacatatagaaagaacaactaagcagagaatgaaaataaaaaaaaacaactaaaaagaagttataatttataacgtatctgtcgttaaatctgttgaatcgttcttacaaaacacaatcgttacaaaagtcaattgggttcccacgaatcggtggggcccatcacgacgaggtctcttcacataatctcatctcttcttattgatttcacataaagtgttttgtaagaaaatgtttcaatgaaagatttgtctgaaaatttcaggagaaaatg

SEQ ID NO: 31213 - DNA, 3000 bp, Unknown; identical to SEQ ID NO: 11396
  misc_feature (1)..( 3000): 2750-1469P.txt file - cDNA_ID_3039869; gDNA_ID_2214494; Annot_ID_183753

SEQ ID NO: 31214 - DNA, 3000 bp, Unknown; identical to SEQ ID NO: 11417
  misc_feature (1)..( 3000): 2750-1469P.txt file - cDNA_ID_3039872; gDNA_ID_2214494; Annot_ID_183751

SEQ ID NO: 31215 - DNA, 3003 bp, Unknown
  misc_feature (1)..( 3003): 2750-1469P.txt file - cDNA_ID_3039876; gDNA_ID_2214495; Annot_ID_133563
ttctctgttttttactcttctccagattcgtttcgcagagaaatcgaaggtcttagctcttatgagccagttattacccctctgtgctcagaaatctccaatggttagtctttttatttcacctttttaccaactcctgaagaaaacagagttttgatcttttcatcttaatattagaaacagagttagtgtataatctgcataaaacttacggttatcgattcttgtttatgcacgcaggaaccatttgttgtgacagaaccggtttgagatctgatatttgtgtaatgaaaggtgatgttcgaacaaactctgcttcttcctcaatcttcctcttcacctcctccaccaataacaacacaaaaccggaaaagatcaaaccttacactagaaaatgggagactagtgtgatggacaccgttcaagaactcaacctcatcaccaaagattccaacaaatcttcagatcgtgtatgcgatgtgtaccatgatgttcctgctgtgttcttctccactggtggatacaccggtaacgtataccacgagtttaacgacgggattatccctttgtttataacttcacagcattacaacaaaaaagttgtgtttgtgatcgtcgagtatcatgactggtgggagatgaagtatggagatgtcgtttcgcagctctcggattatcctctggttgatttcaatggagatacgagaacacattgtttcaaagaagcaaccgttggattacgtattcacgacgagttaactgtgaattcttctttggtcattgggaatcaaaccattgttgacttcagaaacgttttggataggggttactcgcatcgtatccaaagcttgactcaggaggaaacagaggcgaacgtgaccgcactcgatttcaagaagaagccaaaactggtgattctttcaagaaacgggtcatcaagggcgatattaaacgagaatcttctcgtggagctagcagagaaaacagggttcaatgtggaggttctaagaccacaaaagacaacggaaatggccaagatttatcgttcgttgaacacgagcgatgtaatgatcggtgtacatggagcagcaatgactcatttccttttcttgaaaccgaaaaccgttttcattcagatcatcccattagggacggactgggcggcagagacatattatggagaaccggcgaagaagctaggattgaagtacgttggttacaagattgcgccgaaagagagctctttgtatgaagaatatgggaaagatgaccctgtaatccgagatccggatagtctaaacgacaaaggatgggaatatacgaagaaaatctatctacaaggacagaacgtgaagcttgacttgagaagattcagagaaacgttaactcgttcgtatgatttctccattagaaggagatttagagaagattacttgttacatagagaagattaagaatcgtgtgatattttttttgtaaagttttgaatgacaattaaatttatttattttattaagttttttttggtaagttatttattttattaagttttgtagtatatcgtcgttattcgttaagataataatcaatttgttttcaatattttaggaaatatttgaagcacaagaaaagaaatagtaggtggtcctattggacctatataaataaactaaaatatttattgaatatcaaaattttgtaattgataaagaagtttggacttcatcgccgctcactcctctctcatcaactatcgcctttctcttgttcgccctaatttcagccgcttcttgccgttttcttcgtcggagaccagtggccggtggcttccgtagcattggaactggtttttttgtccttgtagtttatgctttgtcttgtagtagtagagatctcgtccttgattcagttagttttggatagatctgagtaagtgcttggttgattctgcagatctattggccctcgtttggggaatttttcggtttgtttcaagggatgacttttgtttcgttgaggttgcggtaggagcggttagatctgttgatcttttcccgaaccttgcctttccctccgtctcttgtctccttgcttcagccatcaattcccatttggattgccccatttcttttcagaggtttcgttatgtttttgttgtgatagtcttctttgttggcagtcggtctctcctccttagtgtagtttgttgtggttgttagctttctcctacctttgtggtgttctctcacgatgaaggttctcggaggctaggcttctctctttgtcctgcttcagatcttttttgatagctttttgaagacttctatttagatgtatttagacgcctcagtcgtcaccgtcgcacccggaggcttgttcgagtttattccagtttggttggcttgctgggttatgaagttcttggttctggtttcgagagattggctctctttatgataggaggtggcagattttttttcggggtggccgtgggcagccgaagtaagtctcatcgcaagtgcttatgaggaggaggtcttatttgccgcttgtagctattgttttctttggtttttagtcttgttgtctctgtttatgtatttgggttcgttctcttacgtttagggtccaatttttgctgctttgtgttttagtttcttttgtttccctttcatagggctatgcttccggggatatcttcgttttcctccggctttgtctccgagaactttaatttcgttcgtcggctttgtttctcttgtttaggcatcgtgtaattccctggttccacatcaagtttatcaatcaaatttcagtttgagtgacaaaaaaaaaaagaagtttggacttttgttgtcatatgtgtttattataaatagcccaagataagaaaggctaagtggcccaataacaaacaaatatatatatcgaaataggcttcttcgtctcacacgttattgaccagaagagtgaagaaccctagttcccaacaaggtgacgatg

SEQ ID NO: 31216 - DNA, 3003 bp, Unknown; identical to SEQ ID NO: 31215
  misc_feature (1)..( 3003): 2750-1469P.txt file - cDNA_ID_3039876; gDNA_ID_2214495; Annot_ID_183813

SEQ ID NO: 31217 - DNA, 3000 bp, Unknown; identical to SEQ ID NO: 11426
  misc_feature (1)..( 3000): 2750-1469P.txt file - cDNA_ID_3039901; gDNA_ID_2214495; Annot_ID_183816

SEQ ID NO: 31218 - DNA, 3000 bp, Unknown; identical to SEQ ID NO: 11436
  misc_feature (1)..( 3000): 2750-1469P.txt file - cDNA_ID_3039914; gDNA_ID_2214495; Annot_ID_183808

SEQ ID NO: 31219 - DNA, 3000 bp, Unknown; identical to SEQ ID NO: 11424
  misc_feature (1)..( 3000): 2750-1469P.txt file - cDNA_ID_3039922; gDNA_ID_2214495; Annot_ID_183803

SEQ ID NO: 31220 - DNA, 3000 bp, Unknown; identical to SEQ ID NO: 25513
  misc_feature (1)..( 3000): 2750-1469P.txt file - cDNA_ID_3039926; gDNA_ID_2214495; Annot_ID_183802

SEQ ID NO: 31221 - DNA, 3003 bp, Unknown; identical to SEQ ID NO: 26981
  misc_feature (1)..( 3003): 2750-1469P.txt file - cDNA_ID_3039929; gDNA_ID_2214495; Annot_ID_183799

SEQ ID NO: 31222 - DNA, 2655 bp, Unknown; identical to SEQ ID NO: 26982
  misc_feature (1)..( 2655): 2750-1469P.txt file - cDNA_ID_3039933; gDNA_ID_2214495; Annot_ID_183797

SEQ ID NO: 31223 - DNA, 3000 bp, Unknown; identical to SEQ ID NO: 11445
  misc_feature (1)..( 3000): 2750-1469P.txt file - cDNA_ID_3039965; gDNA_ID_2214496; Annot_ID_183841

SEQ ID NO: 31224 - DNA, 3000 bp, Unknown
  misc_feature (1)..( 3000): 2750-1469P.txt file - cDNA_ID_3039971; gDNA_ID_2214496; Annot_ID_183839
aaatggcctcagagaatggcgatagcaataggagtcgctcgagggatacagttcttgcatatgggagtagcaccaggaatctttgggaacaatttgaagatagagaacatcatgcttgatgaaacactcacagtaaaaatcagtggctatactattcctttaccatccaaggtataaaactttgttttatttcttcttctattaattgaatctaagaaaatttaatggcatttctaggttggagaagagaggcctcaagccaaaaaacctcggaggttgttgttgtttcttaagatatgatcaaatgtgttctcttctatcaaattttgaaacttgttaatgaataatgtgcagtaatgaagatagagagaaagaagatgtgtaccagtttggagtgatactactacaaatcatcacagggaaagtagttgctgcaggatcttcagagatgggaagtttgaagcttcaggtctgttctgtttcagtcagaaccttttcatctttaagaatccgacacggcttacaaatttagaacctcaatgttattatttcctgcagctggagaacggtttgagagatgaaccatcagtattgagcagcttagcagatccatctgttaaaggatcatatgcttatgagtcgttgaggacgacagtagagtttgctatcaactgtctttgcgaagatcagagcaagcgtccttccatagaagacgttgtgtggaatctacagtatacaattcaagtgcagcaaggatggagaccaagcagtgggaatcatgaatcatccatgaaagcaatatatgaatgaaatgatcataaagagaggcaaaaactgtagaaacaataataagtttcaaacaagtcaagatgtagtttcatggactacctgaaatatcttttattagctaacttagtaatctgtgaataaaaagcaaaaggagttgaaaaacacacaaagacatgtaagagagtgtgtccagctttgctcgacaacattgcagactcttctgttgtattcgcgcttgctttcgctgaacattcgtgcatctcttaaaacaaatcagcagtctacaatcttgctaacctgcttgatgaagacatcaaaatcttcaaaaaccttcacaggttctttataacaagaatctctgtgcctggaatactatagaaaatcccaaaagttactgcaaacctctcactatgctcacgtctaacctctccatctcaaccacactccgtgtttcgggcaatctccaatacagaagtctctacctcatccagcattctataaacttcctttgttatgacttgtatcgctagctaaaaacaagtgcttgtgttccacataactataataaccatagctatacccaggttaggtaagatgtcgaaaacagcaagtggctttgccaagttacctcacctagcatacatactactgatcaatgcattttcgctcacaaaacaaattttgttacaataccattggcttttactagcttcttacttcttgaccaatctcttgagcctccaagatagataggcacaagaagacaggatcatgacaaacgctcgatgatcacaaacacatacacaccagcttccttcattcgagtttgatatgtgagctctcgtagacgcacgttccatggcgtcgagaagccaccgcagcgacggtcatggatattggcactttcgatgagcttggcgtgtggggtatttgtttatgtgtctatgaaccatttattggcaaaagggtatcgaccaaacaagatggtccatgtggatgagcctggttataagtttttggctgtgttgtttgaagttgttgtcattgccattgttatgatatgggacacttgaaaaaaacaccaattgactcattgatttctcaggtttgtaaagaaaggatgttgattttgaattgtttatagcaatcctcgtattgtagtgtactttgtagtttgtagcatcaaaaataacaacaacaatagtagaagagatgtttctctttttttttttttcgccagaagagatgtttctctcttattccattttgacaaggtttatcttaacggtacagtataaagatgggcctataattgttgagttgggcctgtagtggccttgtaggtgttgttattggcttcatttgggcccgccactagaacaccaaatggaccaatgggtgatttattttggatatcagtagaccaaaaattatatcaaattataaatttgggtctgatttgtatcagtggactgatatctttgatactcagtatcatgtgacgttgcagcatacggttggtcaatattttcgctcaaatcagagaaaaaaaaaatctttagtaatcttatgttataatatattaatttttgaatttgcaaaaaaaatttttttatacttaaccggtctcaccaatataatcatatttagtaggagtatcataaaaaatctcaaataaaaatcaaatattataaataatactaaaaaattactcatgatactatataagtatcaccccatatcatgctcttagaattgtgaaacttataaaactggtctttttgttaggcaatggtgaggcttttttactttcaggtttaaaaaacatgttgaagcattagagtgttgatgaatataagtttccctagtaaatagtatcttcagtctcagtcgtggaaggtgtagaaatgggaaaatctcatagaagaagtaattatgagtcatcgtaaactagaaagaagacgaaaagatagcattacgatagtattgatgacgttctggtttcgtaattaaagtgttttcatttcccaatacaaatgacttttgatatttcttctctaataaagaaagtcgcttataaatctcaatcatagcgagaagttttcatttcttctaaacttattcaaaaccctagtttattcttacaataatccttctgatttagctatggaagattccggcatgaaatgtgtctttgtaactactaatatg

SEQ ID NO: 31225 - DNA, 3000 bp, Unknown
  misc_feature (1)..( 3000): 2750-1469P.txt file - cDNA_ID_3039975; gDNA_ID_2214496; Annot_ID_183838
tctgactattaaggaagctccggtaacccaagctggtgatgataaaactaaaaagaggaaactgaaaagtttggatagtaccaaaagaagtcataagaaacgatctcttggggatcagtcaagtggaaaaggagaggttgagtctttggcaatgtcaccaacaggaaaaggtaacatctgtttttttttctttctctattgtggtctatggagtatatagctgatgttattggagagtattagtcaagttacatttgattgtacgatcagcttttattaagacattataagggtgatgttattcttgaagtaacgttcgaaactgaattagctgagaggcgtgagactgtgagagtgcccttaatctgtttctatgctccatagatcttgaaaagggagaaaaaagtgctgctacgattgaccaagagaatgatcttgcacttgtggatgatgagaacgagagtcatgaagaagatgttcgtgtaggagcaatagtagaaggtaaacattttttttgtgtttactgatttacatatctagatattcgtacattattataccttgattagctccaagtgcttcgaaaaatcttttaactgctgaatttttagacatcaatcaatctgctgatgttgagaacgaagggctcaacaaagatggtgttgatggaaaatatgctgatgaggctactacatctgtgaaggctgctaagaaaggaaggacaaagaaagacaaggcagccccgactaaagaagatactgaagttgcttctagctcaaggaacgttgatcacgatgttgttatcagagagccgcaggagaatgtaagttagaagtcaaagaagaaaaagtcttcgagcattgtggtagaggaggcttaagtatttgtcatctgatgcatcattgttctcgtttcttcctttattttttcctctacgttgctgaactttagtgctttttctagtttaagaaacttgtttcttctttctcgtgaggtttttggtattacctatgaggattttctcaacgtcaatgtatctaatgcttatttgtcatgtgttgaagttgtaaagttgatcccatgaagcatattttaacgaactaacgatgccattggcttttactagcttcttacttcttgaccaatctcctgagcctccaagatagataggctcagcctcgcaacctcctctgatatgtgagctctctcagacgcgagttccatggcgtcgagaagccaccgcagcgacggtcatgggttctccgccgatgatgactagtttggttaaacgtatactgtacttcgatcttatatgaaagtaaggcccatgggcctggcccaaagtatttgcgacgcataagtccaacatataagggagtaagaccgatgggcctggcccagattatttgcatctgccatttagtgcattgtaaaatttagggaatagacttatacgtacaaccaaacagattcgtcttcttctggtgcggcaagaaatcgccggagaaacttccgaccaacgtgtcggagctgataagaaatagtgtcatgtcacaaattcagagaatcttctcgatcgaattgccttcactggttcctctgcaacttccatctcggatgtaagtcgctccactgttatcacaggttgcagagttgtggaaatgaattgtgttgttattcatttcatgtagggagactcatctatggtatgttgttccagatgaagtgaaaagtatatctcttttaaaacactactctcaaattctgtcaccatctgagaatgataaagttcttcagatgcgaggtaataagcttcagaagaatgctttgcttgctcgcacattggttcgcaccaccattgctagatgtatgttattagccattggagtttcctagttaagttttgtttgcagagcattgactgtaatgtttatatttttattttctagatcagacaaacaatgtggtcgatcctaggaccttgatattcaagaagaacatgtatgggaagcctgaggtgagactgggacagttatttgggattacactagactcatcgtctcggcttatatgtgtttaactttcaattacaggtagattggcagagttataagaactgtgatagcccaccattgcattttaacatctcccacacagattcattgatttcctgtggagtgactgtacatgttcctgtaagtcttttgttaaggcaaatacatacagttttgtcaatgttttcttgttttataaatttgaacacttgcagtttactacgattgtaggttggtattgatcttgaagaaatggaaaggaagataaaacatgatgtcttagcattagcagaaagattttactctgctgatgaagtgaagtttttgtcagctataccagacccggaagttcagcgaaaggagtttattaagttatggactcttaaggtagtttctactaacaacagataatactatatttaagattctgtaaatcgtttcttctcgaaagttaaaaactgttgtgatggttctgtttccaggaagcatatgtgaaagcattaggaaaaggcttctctggtgcaccttttaataccttcacaatccagtctaaggctggaacaaatggaggctacaatctttgcaagtttttttttagactttcatcacactctggaattgaatagggtgcttttatcaaatgcgattagttgttgcattgtacactttgtaaaaatttcctttgcagtgtctttttcatttccttttaagaaaaggtttttgcaagtatagtgtataaatagacagtagcgatataattttgagacgcttgaattgttttctttagacatctgaaatgtctgtcgattcacaggagaagacaaagaaatgcaacggagaatggaagtttgccctattggagttggctgattctcattatgctgcaatctgtattgaagatgatcaagctagtggaggtgcagttacagttgacataggtcctatg

SEQ ID NO: 31226 - DNA, 3000 bp, Unknown; identical to SEQ ID NO: 11446
  misc_feature (1)..( 3000): 2750-1469P.txt file - cDNA_ID_3039977; gDNA_ID_2214496; Annot_ID_183836

SEQ ID NO: 31227 - DNA, 3000 bp, Unknown; identical to SEQ ID NO: 26986
  misc_feature (1)..( 3000): 2750-1469P.txt file - cDNA_ID_3039984; gDNA_ID_2214496; Annot_ID_183834

SEQ ID NO: 31228 - DNA, 3000 bp, Unknown; identical to SEQ ID NO: 11451
  misc_feature (1)..( 3000): 2750-1469P.txt file - cDNA_ID_3039988; gDNA_ID_2214496; Annot_ID_183832

SEQ ID NO: 31229 - DNA, 3003 bp, Unknown
  misc_feature (1)..( 3003): 2750-1469P.txt file - cDNA_ID_3039992; gDNA_ID_2214496; Annot_ID_183831
tcaatgcctagtttcctatatcacgttaaaatatataacacattgttaattgctttcgcagctttcagcttctcggactcacttgcttcatagtgttcccaatcctctaatcctacaatacaacaatgctttagaaccctagttttggaggcaagagatagtccactgcaatgatttagaacccttaattctattgttagaacgtccatgaagcaattaagcaaagattaagctatagaataaacttttctaactgattcaaagctctaagacgaatttcacaaacaagtaatacgcataactttaaaaccccaaccttgttcatcatcatattccaccggcaaaaatcaatcctgatgcacgaaattaccaaaacaaacctctcttcgacaagaaccaatcaccaattcagttttatccaactcaattctcaacctccaatgatgtactcgtcccgaaattaggacataacttgtgattgtgaaattgtgaggaatctcttataatgctggatctaaagtgtctgtgattgtgaaattcttacagtcctcaattaatcacacacgtccccgagccctaacttgcacagcaaacaaacacacagaaaaagaggggtgaaccaaaaaagccgagaaacggttagtcaactaacaaatcctctaaccacgttacttcctagtgttaaagcccatttagagcccatttctgttttcattttcggataacaataagtcaaatcaagttaatcaaccacagtaaacaaatccgaacgttgtaaaaaaatcaacaacggtcatgagtgaatttaagttaattttttatcacgtgattaaaagaaacgtaacggctaataccaacaagtaacaacgttcaaaattctctacttctatataataagaaggaaactcaagtacattcttccccaaccgaatggccgactttctcatcatatttggaagagttacagaacgataaaaatgagttcacaagctttttttttttatctttaatctctcgtagtgctaatgttaaagcggattttttgtcacgaaaagttcgtatccaaccgcttcatattacatttgtaaacaacattcttcagaattgtcttttttgagtcctaattaattttcggatgacaaaaaaaagaaaaaaactctaagtacactcctctcttgttacagccaaataaaatgtttgagatttttcaaaattcagtctaattatatccctctgctaattagattgtcgtcaatcacgtgatgttaatgtttgtaggagatactcaatttcaaggttagatagcctctctctatcttattcatctcagatttggatttacttcttttttttgcagatttactatttgcagaaattacctgatcactgttttcaatatgtatttttggttttctctttattttatcttccaacaatttttattatttttaaatattccaacaaaaaatttggattcccaattcaacttcaatggtccatgtgccttcaatattatgttagaagtcaaaatattccaacctgtgtactttccattgtttattaatattttgaagtattaaattgtttttcttaaaatatcacatttataaggttattatcaaaaatatcactatatattagttttttttgtcatcgcgattttaattagagcacaaaacgaggcaaatttgagaaatgttgtttatataagtgatatgaagcgtttcagtgcgaacttttcgcgccaaattatgcgcttttatatttacattacaagaaattaaagataaagaaaaattagttaattctttcttgtcgctctgtagttttccaaataagctgagaacgccgacaattcttttggagaagacaccatattcaccagatttgaacagttcgtaaaaaaatgctacaccttgattatcggccaatcatacacttcatcacctagattgcagcttctacttcgacttcactattaatttaatatatcaaaactactatcaaaacttttggatttatcagagtatcatagacacaaaacattaaggtttggattaactattttggttttagagtatagttttaaatgatatggtttatagtttagtgtttagggtttagggtataaatttaaatcttaacaaaatcttctaaatataataattaaaaatttaatactttaccaagtgtcattagctcaattggtaaagatcctacgtgaagtttagaagtcgccggttcgagtgacacttgggacgaaattattattacatgttgtggtttcggccttgagagaattatagatttcggtttagaacttcctgatatttaagaaaaaaaaatcacatttacggattagaaagattaagttaattttccggtttttgttaaaatccgaaaatattctgctaaattaatactccaaaaacaataaagcttttataccttttagataaaataggaaaatggtcttaaaaccaatggcatgaaaatttaaatttctcaattattagtagatatacaaaaaaatcgttgagataaataatacaataataaagactttataaaacagactaaattaatattatagctgtattttgcctttttaaaatagaaagtttcagcttagctgtatttgttgtttttatcaaccagctttagctgtataagtttaaacaatgactttcttacagaagatgcattaatatatctcattatgttatcgtacataagatgcattaatatatatcatcatgttattgtaataatactgtgaaaatagcatatagcccatagtttatgtgccacttgaattatatgacatgttcactcatcaaaaactcacgactaaattatatcattatgaaagaaatattaaacaaattgcaaatgggaggacatcacgtttcagtatgtatgtgtctatagatatgtaaaggcaagaacgatagcaatatcccaaaaacctcttaaaaatagtctccgatctaagcagacatg

SEQ ID NO: 31230 - DNA, 1592 bp, Unknown; identical to SEQ ID NO: 11442
  misc_feature (1)..( 1592): 2750-1469P.txt file - cDNA_ID_3040000; gDNA_ID_2214496; Annot_ID_183829

SEQ ID NO: 31231 - DNA, 3000 bp, Unknown
  misc_feature (1)..( 3000): 2750-1469P.txt file - cDNA_ID_3040023; gDNA_ID_2214497; Annot_ID_183874
ttgatgtagcgagagagatccttcttaggaggtaaagctccaccaataccgaattgcttaggcctcctctcgaatagagggtttgaaactttctcctggagaaatcagaaatcaaaacacaaaacttcagcaagaaagaaaaaaacaacaacaaagaacaaattgaatgttcgaaaacctaaaaaagaagaagagaattggaaatgaaacataccgcggtcttcttcttagcagctaccttcactcctttcttcggggcctaaaaccaaatcgtggcgtgattagattgataaagtaaccacagaacatttgtgacattgctctctacgcaaatttctagatggattcataagctatatcaactaccaaatctatcaaaagctaaatccaaagcagataagcaatgatggtgttaccaccgagaggaaatcgaaacccatgtgtgttcatcttcaagcgagaatgcatccaggaaacactaactctatcgtgaaggatctaattcgatgattctactatgaaagcaaacaactaacagatcccaaatgaaacgaaatgaagatggaaggaagagagatgataccattgtcgtcgtccaaagctccaactccaaatggtttctgcgaaaggacggctgagtcgaagagtatcgttttctagggttttgccttttatatatataccatgtacattgatagggcttctctattttctctaattaaaataataattaaaaattgccagcaaaccgtaattacaaatatacccttattaatctttcaatgtgttacggtctttttaaaccggtggttaacatggcggaaaaaatgagaaaaaaccggtttaacattttccaccagtgatgaactttctcaaaagagtttattatatacgaacctagctactagccaaagtcttacttttctcaaaaccaaacgttaatgaaactaccatttgatgtatacatatgggtagaaaacaagccaccgacacctttgtcactcattgggtgagctcttcctaaagaagatggtcttttccaaattccaattcagcagcatgtgtagtagtagtttcgtggatctgtatgtattctcgaccgcggttacaactaacgatttataactaaggcgttttagttttacgaatagtatttcgacctcgtgttatcgttcccatatgggagatttatatctttctctatgagatgtttgtgagactgtatgattttgtacatttgagtttttggaattgttttcgtcaatttaacaaaaataattggtgacaacaaaaaaactatcagtcttagtaatatgtgacgtatttcttatcaaatttagattgaccatgtaaagagtttagcaattaaatccaattacattgcttgtgtacttattcatgttgtaataaattgtagatttacaactatgacaatcctatataacagaacaaaaacaaatacgtatttgaactttctagtttacactttacacgaattacacgtgataaataacaggtagatttatgtcaatgtcatacatagcctaaatcaactaaaaagtaaacaatatagttcaaatgtatatatatactagataaggtccgcctatttaggcgggtgtacccgaaattttcaaatactcgaacggatataaactttaaaacccgaaaaactcaaacccaaacccgaataggtatgcaaacatatctcaaatataagtatatattagttatatttatacttatatatagaaaatattagaatttttttggatattttagttatttttgtgtatttttagatatattcaagcaaaactactcatgttgttttgggaatttttgaaaatttcaagtaatttaatagatttgcacacaaaatttgatatttcaatatataaataactcgaacccgaacccgaacccaaaccgaacccgacccgataatatttttttgtttaaaaatacatacaaccaaaatcttatttctacccaatttctttaagtaataattatattaataaaacctacagtctaatttctacagcaataaaacttacagctacagtcatcacacctacaacaaaaattctacagcagtaaatctacagttacagacaaaccaatcacccacgtaatctcgtaagttaattttacatcatgcaaattaatattaaatgagttaaaattaataaatgaaaataattgaaaagttaaatcctataagctaagctatttttctcaaagtgttctattttcacttatgattacatgagttaaagacaaatttgttaattttgcttttgttgaataaatgttaattgtttataaatatatagacatataaattagtatatgtaaatttgtttactttttaagattttctatttttttaaagaataaaaaagttaaattttgaatgacacatgtaaacatctaatcgtttgacttgacactgtgccaagtcaattttgaaaaccatactttatataataagatatatatatatatatatattttttgtcctcatagttcaattgtatatatctcaataatttttttaatcagaaaaaaacaaaatacatatatatccactaattctgatttgataatgcgttcacacttcatatttatcatgtttatcttttataaagaaaataaattagtcaggtcaggtttttagtaagatatatgtttatgataatatctaaactcgaggagatgataaaactaatattactcaggttgaaattaaaatctaatgcttataaggatgaaatgaaacaaaattcagggagtaaaaagatataaaaaaaacttgcaattgaggtctcatattcttaaaccttaccaaagaaaggcgagattaattaatcctagttagtcaagtaaatcatccaattagataagatcacgtgtcggtcgatgtacgcttgaatcctcgtttcgatacaataattgaagtgtgtcatgcagagattagagagatgtgtataaatg

SEQ ID NO: 31232 - DNA, 3003 bp, Unknown
  misc_feature (1)..( 3003): 2750-1469P.txt file - cDNA_ID_3040027; gDNA_ID_2214497; Annot_ID_133601
cgtcaccttcttccacttatggataagcctcttcttccatatttgatcagataactgaagacctttaatttgactgattaaacgaaactataatgaattaaagtaaaaaactcgcaaagtgaactttaaactaaaggtttatggatgattggtttgttcttttttatttacgaattcttggatatctaataaaagagaaacaagaagcaatcattatttgatgttggattggtgaaagaaaagtctttgtagtgtagctgtttttctttgttgctgatgaggtcagcgattattaggtccaaaactcgtgcgtcaagagaattgagtgagctctctcctttttttgaaatattgggcgaaggacactcctccatgcatttaagttatcaaaagcattaattagacgatggttcaataaatgagtgagcatttagtgggaaacacgagtgtgatacggacacgtaaaagcattaatgcatgtgtttatagatttggtgatgacttcattgtctgactctgtctcctctttttacaagacaaaagatttgttgctgattcatctctgcctctctggtctgtgtgacacacactgcctaattagtgttattctgtatctcagctcttgcttactagcttatcttagtacttagtagtaaaacattaatgggtcattatgtatatgtccaatgaatcaccactttaaacattaatggatcacttgctagcatcttcaattactatataacaatttaactagctatagtaagaccattaatctagagatcatatttacctatcctgagtccatgtgtggactgaggaggattatacattaatcatagaccatatatataatatacacaatcaactaatgaaagagggaggaatggtatcaacatagggaccttttttttttccatgttagagaaagttaggacaacacgcaaagccctacgtgcactctttcattattcctctcttcttttgcccccaacagtctttgacgacccaccttgcccttttgacccttctctctcacgcacatgtatgttattaattcaaatggttcttttatgcttcggcatttatcatcatgatatacatacatatcgatcgatagaggaaaaaaaaaaatcatttatgtagtagaaaatttacagatatatatatatatatatatatatcgtataatgtatatcaatatttgaatttgaagagtttcaatataaactgaaacaaagttaagtgtagattattattagtgaggaactagtggatatccagtttattttggtatataccggtaattcattctaatgaagtgaaagaatatggatactgtatttttttaccatgccatagagtagatgctagctaaagattagtcgtaagagaggtctaaggtcttgcttgtcaacgcgtgaccggcttcataggatcctagcaataagacaatatggtacgcctagcaacctagcacttatatatgtagagtttgtgaaatttagggcagacaagcccccacactaaaaaaacagtaatatggaataaaaaaaagctttcaaaacttagcagttattagacaaggtattgtttggccctagctagcgatcgtttagctctcttcactctctcacttttttagttcaacccttcttttgcgtgagatgccatcatggcatggtatggttcttttgccttacgtaaaacacactcacgccagcacacacacacacacacataacatatacggatgtgcgtgtgagctagtcttccattaatgcaatctttgggcctatatatacaaacctttccataaccaaagttctcatactacaaacgcccctcatgtgcttggaaatgcgggtgagaatctccatgttggagaagcagggcacgtgcaaaccaacaaacacgaaatccgtctcatttgcttatttgcacgtacttaacttctccaacatgagctcttcacccattgatgttatatatcccttaaaccttattgataatgtgtttttcgttgttcttgactagctcttcgttgtttgtgtgtatatgtgtgttaaatcatttgtgttcgacggttgattaaatctttatagttctcatatatgtaagtgttgctttggttattttgaaccttattgtgtgctgaccaaaatgtagcgtttctagatgggattgacggtgcacaatgcacatgaaactaaaagggtaatttcaagctctgtcttcgccatatatagttctcattgagctctttggcttgcattaattacgagagtgttttcgaacttgtggttgtatacttcactgcatggaccgttattcgtttcaaattacctacagagttatacatttagcttttgtgatggtttttgcagcatatgtaacgcattgatcagaggttcatatacacaaaatggaacgaatatatggagagtcccatgatatgtaagatcgaattaatcacttgtttgaagatcagaaactgtactttagctactttaatctctaattttgtcattttcaatttttattctggttttacaataatgttagttttatcttcatttttataaatctttttttatatgtgtaaaaatggcaaaatgataaaacataggaaacttataattgagacctttatgattttaaataaatttattattcaaaaattttaatttcaaattttatattaattgacaaaatatatttcaataaaactgttcagaactataataggatttaaaaatgttaagaaaattcgtatttttttccttcattagtagtgtttataatagaaaaaaatcaatcaatatttctaaagttgaaaataaaataacagtgctacgatatattttaaatacattttattaaaatatttgatctaaacagaagaaattgtgtggggaaaatcgacgagagcttatcaattcatctcacactcttcttcactctcttctctctacacacacacacacacacacacacaaaatg

SEQ ID NO: 31233 - DNA, 3003 bp, Unknown; identical to SEQ ID NO: 31232
  misc_feature (1)..( 3003): 2750-1469P.txt file - cDNA_ID_3040027; gDNA_ID_2214497; Annot_ID_183873

SEQ ID NO: 31234 - DNA, 3003 bp, Unknown
  misc_feature (1)..( 3003): 2750-1469P.txt file - cDNA_ID_3040033; gDNA_ID_2214497; Annot_ID_183869
ctcatctactgcaaacgaggatctaagcttacacctatccaaggtaaatctcatcatgtatatattgtaaactaggattggagttcaaggtctcgtctaagcttttgtttgatatatgtggacaggtgcagtggcgagagtgacatgtgagagaactgatgaatatggttacgaagcggaggatgtgacggtgcttagccaagcgacggatgcaaagggttatttcttggcgacgctttcttcgtcggaggtgaaggattataagaaggtgatcaagatcaaagagtgcagggcgtttcttgagctttctccatctgacacgtgttcttttccgacggagattaaccgtggaatcagcggagccattctccaaaactatcgtctcctagaaaacaagcttaagatgaagcttttcaccgttggccctttcgtcttctcctctgaggaaactcaggacaagtctatccccaacggctactaaatttaacaatgttttttttttttctttttcagtttctaatgccctaatgggtcatattggcccatatatcataatatatttatgtatttagtggctttttgattgcataactcacacatgcaacaattactgaaaatatactgaatatctattaatgcacgtgatttttaacttttatacacactatagataaatcaaagatcaaaattgcaatataattacggaatccaatatcttctaaatttgaaattgtgagtaagaatatatatttatgctgcataattatagtgtttatacagtgcataattacctccgtacgttaatgtagtttccaataagcaaactatcaaattattacactttaatgggacaagtgcttcgtataatagtgattattaattactacagaagggcacaagacaaaattgagagtcaaataattaataaacacaactcgaaagaaacttgccttaaatatgaagaaggcacatgctttttccgcgtaatttgaacaactagtgctagtgggttttgcttaacagcttaagtagatacattacacaaaattttgaaaattgagtcattaaaatatacaaattatcttaaatatgcttgacttttacaaaagtggtttaaattttcttgagttacgcaaacgggccaattcctttggcattgcatgaattttcttcacgcgttatactttcatatcaaataaaacgtcgccgttcagagatacactttttattcagtccttggacttggatatggaacacggtttttagttgatcagaagtcaaactcattgtcctatcttgccgaatttagaggatttatttaaaaaatattaaataaataacgcatgataatgataatttataaaaagtataaccaaaaaaatatctcttaaagaaaagaaagaaaacaaaatgtagttttgagtttattggttatctggatttcggaagatatatatgattcataattttttaggagttaaatttattttttaagactttaaaagaaaagaaaaaagttagtagacattgtttcccataaaaaaacaccaggtctcttaagtctcaagtctaaaccatttttccttttctggtcagataattctatcacacatgcttgaatttgaatagaaagacaacaaaagatggtttaaaaaaaaaaaaaaaaaaaaaaaaagacaacaaaagacaacactgggaacatatttacccaaaattcgataatggacaagctacattcaatctatgcttatgttttcgttgcatgcgaatgcatgttgtattacgtttatgagggttgtgctctacgatgtatactcttcacatgacaatatgtacactaatctacattgataatacatatatttgttaagttcaaatagcattatcacaaatgattaagctatatgtatgttgtggtgaattttccataaataatttgtcatctgtcaataaaattttaatgtatattctataacggaattacggtcagatacatgtgtaggtaatgaattaagtaagatattaatatctgtcgacaaataaaagcatcaatatgtatgtacattctcttaaaactgattcgatttcattgtgtcactgtgtatattgtatagaaacatatccaaatacgtatctcatgcctgtcctctaacttaaaaacaaaagaaaaaattatcataccagccaatttaatgcacaagattaactaattgatcaataattggatacgttacaactctataaaatcatatccattacgctttgggcaatggcaaattggcaatggaagtaaaatcaaaagttaaacaaatgaattaccatttgaaacactccaaattggtattcgtgtccaaaataatttttccaaatgtcccatcattctaaagtttttcaccttatgcatggaaccttcctagtatatatacagttctaaaacgaattttatttgcaatggtctatcagagattataatgtcaagatcttgactttttgctgatgtgtagtgtaatgtgctgttttaccaacatgttatatatataatcgaattttttcttgaaatgcctaacgttggttgacaattttatattacgaaaacctttccctgattatgcatattcaaattgcggtaacagaagtttggtcaaaatttgactttcatgtaaaaaaaaaaaaactcaattgaccttaaacttaaattaaacacccatttatatataattatcacggatggaatttactccttaattacagtgattatttatctaatttttggtgagagacagatctatgcgtgtgaatattatcacaatatggtatatatgttgaattttttgacaccgccacaattatatatgtagtatgtacacacacattatcattgacttgaatttgtatgtatattcaaattcaacgttctcaaaaccctatatatataatccaaaacatttagcaaaatatctccaaaccaaaacacaattaagctaaaaaaaaaaccaaaggatg

SEQ ID NO: 31235 - DNA, 3003 bp, Unknown; identical to SEQ ID NO: 25528
  misc_feature (1)..( 3003): 2750-1469P.txt file - cDNA_ID_3040037; gDNA_ID_2214497; Annot_ID_183864

SEQ ID NO: 31236 - DNA, 3003 bp, Unknown
  misc_feature (1)..( 3003): 2750-1469P.txt file - cDNA_ID_3040042; gDNA_ID_2214497; Annot_ID_183862
aaccggagctccgatcagattatttattccggcttgaggaaaccaaacaaaaaacaaagagcaaaagtgaacagatgatgatgatgattaacacagctcttatttggccttttttcgttttttaaagtttttactcctacttaaacaaacatcaaattaagctctttttttcttttcaattagtagctgtaattaacacacattttataatagtgaggaaataacagcttagggatacctcaaaaaaaggtttgaaccacctgtcacatgaaatctactgtcacatatccttgttgtggatattcactgattttttttaaaaaagttttgcctttggtaatgatacaactattcacttgaacaaatgttgatattggcagctgttagtttgcaaaaattaaatatgctaacatgcgcatataagaaatgaattatacgaaattttgattcgactctctgaaaacaaaaatattaggaaaatggtcatgtacctcttgcttaatttaacactagagattttattcaaaagaaaaaaaattaacactagagataatcagaacataatgggccagacatcaggcctttttacgaattacatatgggccacattggatactccgcaatcacataaatgacgtgagaggaagaggttggtggtggtagttttgtgagtcgtcactctttttatacttttaaaacccaaaaaaaaacgtacaagaagcagcgtgaaacattcaaattttgatggttctttgtttcttaattagtactagtattaattaaagtctgcatttatacgaaattgtctgattataggtcctaagagtaagagacaacacaaatcgtcaatttaatctaaaaaaagggccaaacatacgtataactgtttaaaaaaacttttttagttgtttaaaaacttataatcatgaaaagagaatccagcggtcagaatttgttcaggggttgagagtattactacagcttaaacacatctctgccatttattgcaacagcaatcatctcgcttgtaaaccgcatctgattgcgtcctctgaatttatttccccaaataaactctgtatgcttcataaatttgagcattgactttcccattttggatatgatcatattgttgttgtcggatgagaaattcgtacgtagcaataatttaatgttttcccacatgaacgattaataatttcggaatgattaaaaaagatactaatatatatatatatatatatatatatatatatatactttaacaacaacaaaaaaaaacagataatatatactactatatcgaacattacgttatcgaatgcatatcgatccgtgctctttataaagaaacctagagtgtctccgtctctctcactacattctccactgttcacattctctctctctctctggatctctagacaccaatacgcatagtgagcagagatcgtgatggagataaggtattggcggaggttaagaggataccaaaggctagatggttctgccaagaaggcgagctcgggccggagaaatgtaaagcgggtcaaaatggatcccacacggaagagacggttttggaggatcaagatagtgccgaagctaaggatcttgaaaaaggcgtcgcctaagaagcttttaacgtggcttcgagatgcttacgtcaacatgatgctgcgcctagcgaattctcgggtcgtcggatcatcgtacgggtacggcgaatatgggtacgggtcgggtttggcgtcgaaggagtatgacgagaagaagctggtggagatttacaaatcgatattgatggctcaggggaatctcgtgcaccgtgacgtacctaaactgtcctcaaattcgattttactctcacccattaggtaatttaaatccatatacataaaaaataaatggttatcgatgtcaaagttgtgatatgtattaaacttatactcttattaaatatcaaattaataaaagttgattccgaataaaatcaagatttgcatttacgtcgtaacttctaaccacctcaatttaaaattcttagttagttcaggggacgtgttgtcattgagattaatgcgtgtttaatatgatattgttttggttgaccatttaggcttttaattcgtatctttacgtatagttgtgattcgtaaatccaagtaacgaccaattttataacattgtacaagttacaagtattacgtagttgattgttcaaagcaccgagttttaacgaaccgtcattgcttacatcataggcaagtcaatgataagaaacctaatcaccaagccgtaatatatagcgtgaagggaagctgtctgggttaatagttttcatcaaaaggtgccaaggctttgtatcatgcgcaggtgtggtccattgtgccaactgccaaccccggctcatacatccaaaagaaaagagttttttaaaattaaaattaactgatatctattaaaattaattaagtgatatagtactatactgtatagcagaaaatataaaagatgatggcacttatggaatgctgatgggaccagaatttggttggtctgattcgtctggctgagaaagaaagtataatttatttatttttttagtaaacgaaatttgttattaaaaaaataagagccaagtaaaaaatatttttaaaatcgtatatattttattatttatttttagcttccggtaaacaaaaaaacacagcctttgttctgtttctctgcgatttcttcgatgttcctcttcttcgttttgattttcagatttgtttaactcggtcgttgcgttgacttcaaatttcttaaaagagagagagagagagagaggagatagttcagaaaatctgtcagacttgggatctttctcggcaatgcgacgcttgttcgccgcgaaatccctctcccgagaggatacaacctttttgtcattctcttcttcttcggtgacgcgtttcctcaaggctcttcttcctctccgttcagatccaagagatg

SEQ ID NO: 31237 - DNA, 3003 bp, Unknown
  misc_feature (1)..( 3003): 2750-1469P.txt file - cDNA_ID_3040052; gDNA_ID_2214497; Annot_ID_183857
aatgttctttaatttataatctagctagtataaatcacatatcctatttcatatgcgagatatgaacaacaaagtagtatacttaattgaatcaataataatccaaattaaatttatatggtttagatcatagagaacctaaatatctaaaactaacaaagtctaaaccacctcgattaattgggaataggatgataatataaagtctagattttgttttagttcaaaaatcgaaacaaaatcttactgtaattaacttactacgttcccttactgaagattgatcaccacacggtaaaaaaaacaccgttaaaaggttaaaccaaaaatattgctaagaagacattatttggttagttgaatgaaaaattagggaatgggaagtgtgaaacctacctaaaatatggctatgtagatgatattcattgaagagagagagaatatagaagtgtaaaaagagaaaatggtgccagctatgaattagaaggatcaaagctttctctgaagctgtcatctatctctctctttccttatagtgctctgtttctctccacattcacacactctccctctctctctccattattaaatcacttgttgttgtctttcttttttcaaaccttggaagcaaggaattcttttttgatgatttaatcgaaagcttcttcctccaaacaaacatcaatggcggtttatcctaacgttaatggcgataagaagcactggtggttcactcacagaaaggtataagcgatctctaacctggaaatacagttcttgattcaaagatcatcatcaatcatgttaactttttttgggttttctcagcttgttgataagtatataaaggatgcaacaactttaatggcaagtgaggaggcaaacgacgtcgcttcagctcttcatttactagacgcagccttatctatctccccgcgtttggaaactgcgttagagctcaaggctagatctctcctcttcctccgtcgtttcaaggatgtcgccgatatgcttcaggattatatccccagtcttaaactcgacgacgaaggatccgcttcttctcaaggctcttcttcctccgacggtatcaaccttctctccgacgcctcttcccctggctcctttaaatgcttctctgtttccgacttgaagaagaaagtcatggcaggcatttgtaaaaaatgcgacaaagaagggcaatggaggtaatataacttttaactctcttttttgttttacttattactttcaagcaaaacgcaatcgttgatttttaaacgctgtttcaggtatgtggtgttgggtcaagcttgttgccatctaggactaatggaggatgccatggttctcctacaaaccggtaaacgcctcgcctccgccgagttccgtcgccggagtatttgctggtccgacgatagcttccttctcctctccgaatcctcctctgcttcttctccaccacccgagagcgagaacttcacccatctcctcgctcacatcaagcttcttctccgtcgtcgcgccgctgcaatcgccgctctcgacgctggactgttctccgagtcgatccgtcacttctccaagatcgtcgatggccgtcgccctgcgcctcaaggattcctcgccgaatgctacatgcatcgagccgccgcttatagatccgccggtagaatcgcggaagcgatcgccgattgcaataaaaccctagctcttgaaccctcgtgtatccaggcgttagaaaccagagccgcgcttctagaaacggtcaggtgttttccagattcgcttcacgatctagaacacttgaagcttctctacaacaccattttacgcgatcggaagcttccgggtccggtgtggaagcggcacaacgtgaaatacagagagattcctgggaaattgtgcgttttgacaacgaaaacgcagaaacttaagcagaaaatcgcaaacggagaaactgggaatgtcgattattacggcttgatcggagtcagacgcggatgcaccagatcggagctcgatcgagctcatctattgctatgtctcagatacaaacccgatagagcctcttctttcatcgaacggtgcgagttcaccgatcaaaacgacgtcgattcggttagagatcgagccaaaatgtcgtctctgttgctttaccgtttgattcagaaaggatacaccgccgtgacagcgatcatagccgaggagcagaggaagaacgccattgctcacgctcaaaagattgaagaacgcaaaccggttgaaaaatccggttctattaagagaaccggaaacgctgaaacgaaaccggtaaattccaatgcgtaccaaggagtattctgtagagatctcgctgcggttgggaatctactaaccagggctggtttcaaccatccaatcccggttaaatacgaagcgctcacctgctaaaaaatattgaaccgaattttttatcctaccatgtcagccactggaaacgtcgtcgtttccgtagattcgtcttcggacagaaaaacaaatcattcagccgtcaaaaaagaaaataaaataagaaaatatatatacatttgatgtatgaatacaaatgaaacaatgtatttaggtttggaagattattccaactacaagaaaattttgtcactttacttttatcttcaatgttcgtctcctttgtttcttcttcatcttcatgtgcatataaaacgacagaagcttgatttgcacgtaaattaaaatactagtatcaaaactttttttttcattttattatcaaaattatctcttaagctattgagcactaatttattttttattattgagttctcgagatttgcctagaaatagtcgatgagtctggctcacgtcagtaatattcggatgagtccttatctataaagtttggctgccatttgatggtattgggatgattaatttaattaggcaaataaaatatagatggtgaaaactaaataaaaactattcacttgctgtataataatg

SEQ ID NO: 31238 - DNA, 1020 bp, Unknown; identical to SEQ ID NO: 11457
  misc_feature (1)..( 1020): 2750-1469P.txt file - cDNA_ID_3040056; gDNA_ID_2214497; Annot_ID_183853

SEQ ID NO: 31239 - DNA, 3003 bp, Unknown; identical to SEQ ID NO: 25541
  misc_feature (1)..( 3003): 2750-1469P.txt file - cDNA_ID_3040073; gDNA_ID_2214498; Annot_ID_183894

SEQ ID NO: 31240 - DNA, 3003 bp, Unknown
  misc_feature (1)..( 3003): 2750-1469P.txt file - cDNA_ID_3040084; gDNA_ID_2214498; Annot_ID_183906
gcaaggacaaacctggaccctctatacttgaaatactctgcagaaccaaactcaggtctcgaggagaaattaagctcttgctccttgaaaatctctctcgccaccgaagagcttgagaccacaacgcacttagaagcaccgagacgtatctccatgagtgggccatacttgtgagctaaactttggaatgagacaggcaatactttgcctatcaaatgaaggtggccaatgaatggtaaagctggagggctctgtggcagcttcgtagcagccaatgaaccttgctctttcaagaaccatttgaagagagcataaagcatgaaaggaaaagctaaggatgtgatgagaataattagtttagtgtttagttttaaatccattgcaggcaggtattgatacaatttttgaagtatgcttgtatttatatccagacacagacgaatcttgtttattagatgctcattgtaaagaaaacaaaacaacagatgtgaccttttaccaaatataaaatgtgtgacgtaacatatatgaaaattgtttgatgggaattaaaaaaaaaaaatgattagaagtttttattattcgaaggcacttcctagattgtgacaattacagatacacacatacaagaacatctgcaatttctaccaacaaaccaaacttctgtacaactgtttaactacaatatcctgaatcaagaagacatcctcatcatacaaaaagcctaaaagtaaaagggatccaacataaacccgtgaactatctaacagttatctcccatatgatatatcatcagaagatgaatttcttcttcttttttatcattagaaaaatgatagaatctccctactatatatcatcacagagatgattacctctttctagtgaatcaccagaggatgatgaatcatcatcgcatcgacattagcgtcctaactcttttctccctttctgctcttttagcactaggagtgctcttcattttctgaatctcttccatcacaaccttctccactttatcaatagagttgaggagcttcttctctggagtgagggcatcttcttcccctgtgttttctcttgtgatgtcgagcaaaatctgatggactttagcagttgagggtggccaaggacgcttgaatccaatagatggaccgggagtaaccatagaatagtcgtgctcgagatgagcacctgacaacggtactagagaatcaagaaccccaagttgttgtggagttggggtctcaatatctcggccaacaccttctcccatacgagctctccttctctcaatagcctgcatataagagtttgtaaatagccagactaagcaagccttttggtaacaggttatgacttatgatatagttaacaaagaggctaagcaagcctgttacagaagactaatctagcttataagcagcagattctgaaccaatatgcaaatcacaaaccagatataaacagatcacaaattagctatatatcaatgaaaaaaactccagttaaatctaagaataagcagacaaatccaaaatgagactaggtttagtgaactaaccctaacaacggcagaaatatcacggaggggcgttcttggataccaagaaggtaagacagaatttgaagcacgagcccttccacgccttgtaacacccaagctcatgttctctcgtccctgtggcgatctaaattgaatttgacctcttctaccaccaccagtccgccgaataccgaaattacccctcacaagcccacctcttcccgtcatagatccttgaccaattgacccaagtcctcctgtagcttccgatggcactctctgaaccggagacccaaacaaattgtgctgtgttgctggttcgtcaagtaaaataccatgcgagcgtctattgagaaatgcggctgggtaatcaacttgcctctctattcgatctcgtgcttctggcatttgtgattgagcgctgaagaaatcaaacaactatgccattagaacacacccaaaatcgaaatcgcaacattaaaacccaagaactcagtcttgttctccattgttaatcagattttctcgaaacctcataaacaacaagaaaaagagatcaactcttcgttttcgcaacaaatctccgtcacatcacaaagaacctacttgaacaaatcaaaccatggatttacctatgaatcttcaatagattccttcgtgatagctcggaatggcttcgtgaacggtaaagtggaggggacaaaggagaaaaagagagaaaagcttttgagagagagacgatctggcaaacaaaatttagaccattttctaggcgggttttgtaattgaaaatgaaaaatttcgagctcgcacgtgtcaaagtggtttcacctgtgtgaaatattttgaatttttcatctcacgcgggataaatttcgttttttttcaaagcgcacattgtcacaattcgtcaaattctttgtcagatttcaattttgcccttctgaataaaactgggcttgtggcccaattctatttacgtacgcattgctttcaagatcgaatcctcaccgttaattgtcataggatccaaccgctgctttttactaataccagaaaaccggattggctagttggtacggtctaatgatacgataacttgctctgattatacgaaaacactcatcaagaaccaactctaattaatgttttcttctaattatagttaaaacggattgaaccggacaattccataattttagtcggcttccggacaggccttcgtgggtttggaatttgtggccgacaatgtattgtcggtttaagacttgtttagggtgtatatataagactgttgaacgaaaaaaaaaaaaaactcatcgactcgatcaaattcttaagacgacgattacggagaacgggagagaggtaatagaagagtttttcgttccgaattttgttttgtttcattgatttaattcttggaatttggggtttgtttttccgatttggtgatg

SEQ ID NO: 31241 - DNA, 3000 bp, Unknown; identical to SEQ ID NO: 11494
  misc_feature (1)..( 3000): 2750-1469P.txt file - cDNA_ID_3040092; gDNA_ID_2214498; Annot_ID_183902

SEQ ID NO: 31242 - DNA, 3003 bp, Unknown
  misc_feature (1)..( 3003): 2750-1469P.txt file - cDNA_ID_3040104; gDNA_ID_2214498; Annot_ID_183896
actcgattacaatctgttccacaaaaataaaaccactgaggcaaactgatgatctaagattcatattctttttccaggaaaaaaaaaatggctaagggtggttgaatatcatactgaatcaactttgctgttaaagatagctccgctaattcctgtatcctcactacactcacagaggccacagtccccctggtgtgacagacaactggtgctcatctctactgactttccatcaatttttgaatggtttaaccgatgaacatagctgtcaccaacataatcccagatttgttgtgttcgcaaatcaagagaatagcagtgatgcgtttctttccagtgcctaatagaatgcccttccttgtatctaaaattggaaaacagaatccactgtgaatgaacttccacctctaaagaagataaaagatgtggatataaattcaggttaactaaatcttagaaaggcaaaccaagaattaccttccacaacctacgaagccacagacaaggcatgcccatacattctcagtttttccacaaatagaacagtttaatatctcatcttgctgttgacacaatcgacaaacctacaaacgaaatgagcatgttgtgacacaagtgcaaggtatttgttaataaatggatgaatcagattcattttatggaacaaaatgtattagctgagggaacactgccaataaatgaacaccgaaaatgcaacactaacccatcatataaagtggaaattcaatgaaaggaatgaaggagaaccactcacctgacaagacagataagtccatttcgaagtgcaagaacactgaaacgagtgatcacaaagagtgctaactataccactggtgtcaggatctaatctctctacaggagtcaaatcccaaatatagatatcagaaaaaaaggtactgaagaattcaaagtgataataacatagaaaacgtcttctttagcacaaaactcaccaagacatattggacacgtaggtaactcggtaaatccagtaggtgcttctgcagcaacctcatcaaattctgtgtgttccaccgacattacatatagaatatgacaaacctcagcctaaaacccaaagaaaagtcaatttcatgcaatcaaatgaacataaatacaaaataaacgataagctcgtttccatattataacctcagatggtgcgaactttttcccattcaagttgttgtagaaaccatcagcttcggattgatcagaaaatgtgataagaacactatatctatcttccattccatcgttcctgataatttacaagaatcatcaaatcaacataatcattctcgtcaaatcaagtaatcacaacaccaatgaatttcttgaatttgatcatctaacagataatgaatggaactttcaacgaacctgatgaagaggatgtcggagacttgggagatgcgggaatcacagaaacggataaaatcgagagaggagagataattgggaacagcgacgatgaagagagtggtggatcgggagctagggttaggcagagagctatgtgaagatttgcgatagagatggatcaagcctttgcggtcggtgagtttgagagatggttgtatgagtttaagaggaggctgagctcttttcgatgcgtaagtgaaacctgattcttcttcttcaacggagattggtctctcggagtcaacggaatgaactctgaggatgaacatcgccagaagcgggaaagagctcgacgacgaaagcttaagctactcggagagaagaaaagagacgacgatgcttcttctttctgattttttgattcgtcgttcttccgatattgagatgcttcaattttgtgttttgactcttattaatgggccttagccagtgtcatttgttcgataagtccgcccaacatgtcgatatgatagtgttttacagtatatatttttcccaatttatataagagcagaaatatgggcttttggttcggcccatataataaagacgacgataaaaaggccattatgagacgaagtaaacaataatatccctgaatgcttttttgagctgtcagcagcattcttatcaacaaagacgagacgacagtgactgttccgagtagcaccgctaaaacagtaagaggtgtgtgttggggtgagagtcacgcaaggaaatttcatgcatgttaaatctgtgtttttttgtagctaagtttactgagatttatatcaaattactttattgttcgttgttcttgttgatgtttagttttgaaatgtgtatgttaaaagatgataaaagggatcttgcttttgtgtttgtactttctttgttatacttattagatctgctatgtgaaatgagtagtgttaactgattgattctttgttttagtttggatatagttcgaggaatgacaacgattgtgttctaatgagccatggattttacagtttcttttatgttaatgctgtgttagaactttttaatgatgatatttgaataacaaatttgttgaaactgtgaacgtgatatgttatactctagataatgtcggaagtagagggcgaaaaccgggctatcgtgtgtgacaatggaactggaatgatcaaggtaaggagaaaataagaacactctctattattaatttgtgatgcgtcgtttgttttccaaacacaatttacgcatttgtattgcgtttacatttaaaaatatcataattttgaaatataattataacaaagtcaaaatgtcaacaaagaaactttctattttcaattttcatttaacaatacaattttttttttttctagtgagcttcttctatgtttgagtattgattcggaaaaatatgcaaaatgtaaaagtaaacaaccaattaatgcacattataaaacaacgtggcagatctaatgattggtaaaacatattgaaggcaggatatgctggagaagatgcaccaagtgttgtgttccaagcactgtgggtcgtccaccacatacgggagggatg

SEQ ID NO: 31243 - DNA, 3000 bp, Unknown; identical to SEQ ID NO: 11484
  misc_feature (1)..( 3000): 2750-1469P.txt file - cDNA_ID_3040112; gDNA_ID_2214498; Annot_ID_183891

SEQ ID NO: 31244 - DNA, 3003 bp, Unknown
  misc_feature (1)..( 3003): 2750-1469P.txt file - cDNA_ID_3040116; gDNA_ID_2214499; Annot_ID_183927
aaagataacttttatgttactacaatcgtatgaattagttccaaagacaattcaagagttcctttatccacgatacaacgatcactgttcaaatcaacgagacgagctgcaccagagaactttccatcctttggcaatcgaatcttagcccgacctatggcaacttctccatctgatgttgcaggatctctagaagaatgttttctaaacaattctaggtaaagatattttgcaggagaatctaagggaatcgccaattctgtattatacttccaatagttgcctttggaaacccatacctgtgttgtgtatggttctacagggtctgtccatgcaataactttatagtagtttggatgttgcaaaagattttggtcatcggttgtgcatgcacgtaatatcttcacgattagctttgtttctatgtgatgatcaatctttctcttcccttcgcgaatcagtctccttttttgtctccctaagtttgtcattgagactctggctgttaggtcttgtgaattttaaatatatatatatatatatatatatatatatatatttctaggggaaactaaaaaaaaagagtatccttttatttcggaaaatattttataaattgcgtttgagatgaacaggctaaacctaacgaagtttcatcataatccaaacaatttaaataagtaatactaaaaagattctgagaagcttaagagtaaacacaatatacatcgtatcaggaaaaatatatatagttagaggcatatatatcgaacttatttcttttagaaaaaaattaagtcactagctatggcttttgcttggtgcgtacgcaggtcagcatctaagttggcttccgcatgtggtcaagcccggtctatctccgccgttgtgaaccgtccgtctcttgctctcaacccgtctccgctgagtcctttcgtctctcgtggctttctttacacgatggctgttgataagctgagctctgagcaaacccttcaccttgtgattgactccgagctcaattctgctttgcaaaccgatgatcccaatttggtaaaactttcacatctttgctcaaaatttcattcctaacaaaacataaattagtatcgtttagctttactttgcgaataagtttctgataatattcttacgagacttttttttttttttgttctgacattctattggggtttgtttgggggcagaatgaagagatggctccaggaagcttccctttgaaaattagagacaagcctggagatcagagtgtaacattgacagcatattacaatgacgaacgtattcatgttgatgtaggaatgccttatcttggtgatgatgtcattgatgtgtttggtcctaataatgatgaactaagttttccactagttgtgactgttatcaagaagaacggagtcagcatagagtttacctgccaggcttatgctgattatattgacttaacagatttaactgtgcatgattatcagtatcaaatgggagaaactgactggcctcgtttcaagtaagctctttgaattcaataattaatattttttagagatgggcatgagcatagacgtttattggtgtgtgtttccatcgcattttgtagaaacttggacgataatctgaagaaggcgttccacaggtatctggcgaccagacttgacgcaaacataacgaaactcttgcataagtacatggtgagcaaaataaagagagagtacttgctatggttgaagaatgttaacaagtttgtggatggatgaaaggtaataagtttggatattgttaaaaaaagtctcttcttgtgttagttgatagcattcaaatgtgtttttagcaatttgcataatcttttgagaacatttgaatgtgtttaaatgactttcaagttctgatgtgagtttgatattcacttatgcttcccaattaataccaatccaaacttaaatccaaagatatagataaaaaaagaaaagaaaatgataaggagtagaggatcatctaatactatatatcagaaaggtgtaggtataaaatgttcttcatgaatcgtatttttggtgtgtgtaaatttctctttgtccacataagaaaaagaaagagggattgaagaagaagagaatgctagtttcttccactctgtttatcaaacagtgcataataatctatataagtgttaggaaaaaaaatgggtgtgtttgcaaaatagtcactttttcaaacttaattaggaaaatagtcactttactattcataatttgcaaaatagtcacttttcactgtttgattcgtacacttggattgtacatcacttttagtgtacaaatataaaatgtacgctgtgtatttttatatatatttgtacactaaaagtgatgtacaatccaagtgtacaaatcaaacagtgaaaaagtgactattttgcaaattatgaatagtaaagtgactacttttccaattaagtttaaaaaagtgactaaatagcaacttaagccaaaaaaaatctatgttcaagcacaatgttttgagaatttagggtaatgactttcaagttgagatacgagtttggaattcacttttaacaatatgttcttcatgttcttacttataatttaccttactcaataataataaacatatttatttatttttgtcatttattcacttcaataaaaatttatttatattggcacctgatctgattaattaagtaaatcaattaagaaaaaaaaaactaaaaaaattaataaaaatattttgaattttacagattttttgtaatgcaatttgttagatgataaatttccccctaatatttttggcttgatttagaatgttatttggttcgttgatttgaattaaccatcgaaccgaaccgggctgatacggagcctcaacttcaatcgctgttaaaaccttaaaacccttgaaactccattttcttccttcactcacagaagaagagagaatcaatcaaatcaaatcaccatg

SEQ ID NO: 31245 - DNA, 3003 bp, Unknown
  misc_feature (1)..( 3003): 2750-1469P.txt file - cDNA_ID_3040126; gDNA_ID_2214499; Annot_ID_183920
atcgatttaaacacatctactaaatctatagttcacaagtagagaataaaagaagcatcaaagtatctttagatttcctagttaaagtcctgattcttctgttctgtcagagaatctcaaagtgattcaaacgatcaaattcttgagctatatttgtaaaaaccaaagctattcaagtggtggataagcacaaagcgttaagattatgttaaaagtaacattaaaccactaatggagattgaagtgtaccggagctctgttgatggcaccgacggtggaaactgcggcggccatatctcaagactgcgacgagtatgcgtcacaacacaagaagctgaagagaggaattagattggtagaagaagaagcttagagagatgttggtgtgagcaagaaactgagagatttataaagcgagtgatcaacaaccaattcgttatctcttcgtcttcaaggcttaactctctgatcgccacacgatgcggattggccaagttgccacgaggaagatgattaggaggattctattttgattggtccacgtggaatatgtttatgaggttgtcgtcaaatggctaatctgtgccaatggatttgttttttttttcaagtgaagattataacattatttattaccacatatgctttggaaaatcattgtttttttttttttttttgaggattgaggtaagccattcatatgtgatcaagatacttctacactcttcttcatacgataacattccaaaattttggataatgacattgcttatcgataataatgttccaaataaccgatgtaaactgattggtggagagaaattggcttagccaatagaatataattctaattttgttatatacaactctagatacaacaggtatcaagtatgtggttatcaaattaaccatattgtactaaaccgctaaaaactaattaatgcaactttttctttacacaaaatgtaaaaacaagtgatgcaatgcatacgtaagatttgataaatatatagtttagaagatgaagtaaagatagtcgaggctaagatagcatcatgcaaaatatcatatgctaaaatatgaaataagattatagtgtttaaattcatagtgaaaatatgaatatatcagaaattcatatgaatttacttgttttaaaataaaaatgataactatatcatagtttattgttccctcaaagttactataaaaacaactcatctaaaactatatattcacaatcacaagcaatcgttttctacactaagctataaaatgaaacacttcacttgtctgatcattataatttctcatcctcttcattattttcagttttctcaaccattctctcatgtggaacgagccatcatatcatcaatggacaaaaccaaattttaattttaggcttcattcgctgccgacgaagcaatatgtacatgttctacatgcaagacaagagaacaaagattactgatatgatattaaactattattgatccatatataagacatgttgaagaaccaaacgattgataataatgtggtggagctactcgcacaatgctaaatgttaactgtatgtgacaaaattagcaaaagtttgcgtgccaggtttgattcttagtacacatacatgacttttaacatactgaggttagaaaatgaagtacagtaaaacctttataaattaataatgttgggactgcaaaattttattaatttaaaaaggttttaatttatcgataaattaatattttttaattatagagaaattttcctaatttggtaactttttaaaaagttttataagatttttttcattatagaaaatatctttctaaaatcaattacaagtacaaaattatatcatgtctagaaaacaataccaaattttttttgatacagtaacacattagaactaaatttcaaataagaataactacaaatttaagtaaaaaaaaatcaaaaacatttcttacatataatgtatatatatagttgatacatttatgcaattattaatttatgatattgatgagactatatatttacataggactttcaaaaaagttattatcttattaatttatcgatgtgttacactttttacattggtcctaacttgggatctggtgaatttattaatttatagaggttactaatttatcgagtattaatttatggaggtttaactgtaaaaagagttgaggttaccattgcaataaaatatgagacaatgtgtagaggaggataaaagattgaacaaaaagaagaaagccaactagtttttgtcaaaaggataattttccatgtgcatgcaagtatgcaaccacatcaaaatcataaataaacattgtctaaaatgtttctaataaaaatagatgtaaagaaaattcatcagtttaataactagggtttaagagatatttacaaatactaaccattaacatcatatttaatatgactttgtaaaatctatgatcaaataacatgcaatttttttaatatgtaaaataaattatctcaaaatatttgattgaatatataccctttaatttagcattgattttaaaaatccaacaattttctatagtatattttgtaataatgttattggttcctaaaaaagatggtcacatcattcattaaataaaatgaaataaagaagtgtttccttcgtcgcattgaataaaataaagtaaaccttccaaagacttttcattgtcttcgcctgcgagcgctaaaattatctccgagcattctcaagttgggtgattcggtacggattactgatttgggagagaaaaaccctagattggaattagattctgggttcttgggctaaaggtttcttcatctccttcgaatcatccttttgtaagtccagtggatgtgaaaacccagtactcactgattctttttattaggaattttgtaaggttttgggtagagttttcacagttttgatgatactaaaatgtgggccactgggtctagagaatg

SEQ ID NO: 31246 - DNA, 3003 bp, Unknown
  misc_feature (1)..( 3003): 2750-1469P.txt file - cDNA_ID_3040159; gDNA_ID_2214499; Annot_ID_133634
tgtgccatacatttattaattggtgtagcttacaaactttccaaattatatttcaggaagcttgtaggattctacctgaaatatgcggtccagaaacctaccccaaagttgcgcaagtcctgttagaaagggataaccctgaaacagctcttatggtcttgcgttggtctggtcgtgatggtgtatcagaattggtttcaattggtgaagctgtcacagctcttcgtgtgagagtggaatgtggtcttttgagtgaagcattcacataccaaaggacactctgcttgaaagtaaaggaaaataatttgaaaaatggagctgtgaaacatgcgtctgatgatctagacatctggagttggacggaatggatggagatacttgtcaatgaattctgctgtctttctattcggagaaacttggttgatcgaatcattgagttaccgtggaacccagatgaggagaaatatctgcacagatgcttattagattcggcaactgatgacccctcatcagctgtgggtagtctcttggttgtcttttatcttcaggtaagtaattatattttcaaactttaaataacttcacttgaacaatgggctgagaattgtttttcagaacgagaatagctttagcaacaggcaaatagatatttagacagcagcttaaacctcccgagctttaagctacatattgaaaattttaataagggatctcaatgatggctctgtatagaattagctcattctatagagactggtatatgttctcgtatttgatgtgtggcttcaacaatcttttataattcgagcttggtgtagtctgggatgttggttaacaagcatgaaattatttgaacaaccagggaaactgcatcactatagaccatgcttattttctggaaagttattatcttttgtatatggtctttctttgactagaaattactggttgttcacattgctgcagcgctaccgttacatccaggcataccaagtcgatcttaggcttcagaaaatcgaagaggctttcgtatccgacaatcaaattggggaagaagttatgttcagaatgcgatcacagagtcattggagaaaagagttagttgtaagtatttcagccaactttccatgtacaagtggatccttccatagttccttgttaaaggctacatcctcacatttgcgttttagtgcttaataacctgttgatgcttgcaggattgtctagtattctgaaacttgaatgtacaatattacttgatactggctttttttaactggacatttaaacctcccgtgtctctgctcctttgaaacaggatagagccatagatatacttccagtaattcagcagcagcaagttagatctggacaattttctgagatggaagatgcctctgaaggagcaaaaaaatctgatcttcctgatgcacctgacatgattacttcttcagttccctttgccactactaattccgtttttctccaaagtgctaacaatgccagagctagagagccagtggctaataatggcagtccttttcaacctggtcatatgataggaaacgcgtcccatgatctttcacatggaaggttatttacaaacgcaaatagaggacaaaagagtgaagttagaagcgtaaccaagaatctgaaattcggtgaaatgtcaactccgttcaaagatctaaatagagctcgtgggaacagccagctccaagggaaaaggactgaagaatcctctccagaagtaaatgttgatagatacatagagaataatatgagctctccttatctccgccgaatcacagctaacaatcccgtgacagtgaaatctagcagcaaccatctcaatggatcttcacagaaaccggaatccaccttttttggcacaaggatgcaaccagacaaagataactttgttgatttggatgatccaatggacatgtcttcgaggtattcctctcttctttatctcttagccatttgttcctttctgaatcgtgccattaaagtagaggacactggtattgtttggtataaaactattgttaccgtttggtttgaaaataaagtccagtttggtttcagtctaaggaactttgtttggttcttatgtccacggcttttagtcttatattggatgagctacatatcaattgtgtgtattatgaattgcagcttaaaggacaacaacaacaatgtcttggccacggagagcagaaataacagtggtggattgagatggcggtcagatgaaacaagcgatgacgaagatgaactgactagttttggttccatgccggtgaagggaaggaggagacgtagattcgcagcaagatgaaatgaaacaaacactcgaaaagaccatcatcaattatgtttaaagcatagagaaagagagagagaggtagagcaagttgtgtaaagaggggagagagactgttacagtgagcgttgttctcctgttattttttgtgctgaattttgtgtatttcttctctagtctaccttttttggacagttattttaaagatatcattgtgatgagcggagtgatattattattatgagtatgtttaatttcttatattggtgcagctgattgttgaatcgtagaagttataacaacacattgagattaaatcattttctttttacattcacaatttcctctcaaaattttaatttttaacttttttattatttaccaaaactaataaatggaaataagtagcataagcttgttccaagtttctgatatataaatagggttttcggaagagagaatagggtctcttcctatcgttccgtcactttttgttccgatttgtcgacaaggtaaaccttaaaactaaatctttcaatatagcataaccaatgatccgaaaacctaaatctttcattctctgtttctgccttggatctgtattgaaattcataatctcatattaggttttcgtgttacttaattccgcaggtgtttgttggatccatatcatg

SEQ ID NO: 31247 - DNA, 3003 bp, Unknown
  misc_feature (1)..( 3003): 2750-1469P.txt file - cDNA_ID_3040159; gDNA_ID_2214499; Annot_ID_183930
ttgaaaacttcctttttttcttttatatatttttactccataagcaaaataagtggtagcaaacaaaaccaaaaaatgaaaaaacacaatcgttacaagcaacgatgaaaatccgccagtaaaaacgaaaccgaatgatttagcggatatgttccttcttctactttgtgggtttcattttctggtaacgacattcttagttctaccgcagcacatcaaaatctaaaggtttttacatatatatgttttgtctggtgttgaccgtctcatggagattaaggaaagaaccagaccttgatgaagattgaaagaaccatttgcagaccaaatgctgcagccattacaaccgtgatatcattgttcgtctcgaggtaagaccgtagattcagggcaacaaaacacgatgatgcactaccagctaagagtataatcacccatctcagaaactctactggaataagcaatggaagctgcaaaatagaacatcctgagtgttattatgcttaaacagtatgaagtataaagttgtgatatcaagttaggttgatttatgtcattgtacatggtcattgaaagtgaagttaccaaaccattgtgtatcaagtatatgcatttgtctttagtgttactgatcatcaattgattaattttaacagcaaaagagaccgaagttactgaagatacttacagaggttggaacgaaaatgaagagagagtatccccaaaggcaccagaatcttagaagatcagctttggaccccatataacggagtgcaaaataaaatcccagaggcacaattattgcatatccatatattatagatgctgccaaattcatatagttcacatcaaagatccaaggagcattactgtcggttcgtttcttcacgagatatgtagcacaatttccgagagaagcaagcacaaacacaagcgtagtgcagatccagacaagtccatacctaacagaagcacacacgagtcattaatcaagaataatttgtgaaaggcctagcttttagccaatctttagaggataacatattatgatgctttctgttcatttgtccaagagaaaatgaggatattttaatcaatcgcctgaagtaacataggagtaaatgaatagcaagatcatgctttcggaaaggtgcagaagataacacttagaacggtaacaaattaacggcatgactgagcaatggaccgattaaagaaattcgaaagaactctctcatggtaagtacaatcaccaagaagagtgaaggagaaaaaggcattaaaagacttacaaatcagggtttgcatcaatcttgttgaaaaaatctccactagtaggatataaagagctcattaatctgttcaaaacaacgtccgtgtccacgtcgaagtattgggtatatgagtagacattaaaaaagcccttccagttgtttgatggctgttgtgctggtccttctactggagcagataagatatatcaccatataagacagaacaaggtgaaaacaaaggtatataggatcttgacatccataagaaaaacgaggttgactcacacaagtattctttcaaccattgtactgattcatggtgactacagataaaaatatctcctaaaaaaggaatctaaaaggagcatatatacctgttgggctctcaagagtttgataaccctttgtattgtttcctagattcggtggaaatatttgcatgcttgcagaagggcctgcaataatgcagaagacatacaacactcaatgtctttcactaccggaaaagttctttgcaaaagataattcaagcagaaactagcaaaagaacacaccttcattgacgcttgctattggtacatttgtgcttctcttgtcgtcgctgatcacagcctaagaatacagatgtttgtatcagacataataacacggggatagtcaatccattcactcaaaacatttatcttagcggattcaatccaaaatgaagctatcatgcaagcatttaaactcaaatacagttttgtttttcatacgaattgtctcctaaaatggtgaaaaaacttaaataaaacgccttaacaaatatagaaacccagaaatgcaaataaggaaatcgtccattgttctatgagtgtgaagactttaggcatcatcgtggacgcgaaaaaatatgacaaaaaaatctgaaaagtttcaaaattctacttcctaatgtaacacttgagacagaacaacaaacaaaatgatggcatgaacaaaaaacgttaattttcccttcacacaaacaaggatcatagaaaaactcaatcaaagagcttattgatggtgaaatgaaagaagcaatagatgtaatatagacttaccggaactgaaccaagcaaatggcttgattgtagattagcgaacgactcatccatcgatcaaagagaaaaagatatcaaagaaaaacttagaagataggttcttctaatctcattcaaaaatcgataagatcggaaaaaaggtcgtccctttttctgaatttttaaggtttctgggtttgcttctcctcctccgtcgtcgtggaagcaattgggaaaggaagagaaactaaagaaagaacgatccacgcgctttcttagcaagtcggtaaaacacgcgctgttcactttcggacacgtgatttgccgacttgggcccagacaatcacaagattcacacaagacttcaaaaacaaaggcccatatttaaattttgacccgaatcgtgatttgccgacttgggcccagacaatcacaagattcacacaagacttcaaaaagaaaggcccatatttaaaatttgacccgaattaaacaatccgacttgacccgtttgaggagaaattcactcaacagtgtttcctctcttcgtcttccctcccgagaaagctcaacggagccctagactggttttatcactctcgccaacaccaaccacgctttttctctctttacctccatttttgtattcgtcaccggagtagatg

SEQ ID NO: 31248 - DNA, 3000 bp, Unknown
  misc_feature (1)..( 3000): 2750-1469P.txt file - cDNA_ID_3040202; gDNA_ID_2214500; Annot_ID_183966
ttgattatgaaactgttgatgttcttgacgatgagtataatcatgggctaagggagacgcttaagaactacagcaattggccaacgtttccacagatatttgtgaaaggagaacttgtaggaggatgtgatattttgacctcaatgtatgaaaatggtgaacttgccaatatcttgaactagtttcatccgattttcttctctatttctagttgtaactccaaacattcattatagagaaaacatgcttggattctcttccatagttacagattcgttttctgttttccgcatttataaaaggttacagattctatacaaatctaagagtaggtttaaaacgcataaccatccactaaattcacctattttgtggtcatttaaccaatgatttttttttttttttttttacactaattgtccctttaaatatatatgttgaaacaaaacataattggaaatggagttaagtaactattgttacgttaaatgatttaattgattaatttagtagcattcttattcttgtagcacgtttattagagaattattgttcttctttgacataatctttgggtgaactaacacaaaatattcattttaagtactaaattctcatttgtaggatgaatatctcaaaaataacacaaatattctatggtattcatttgttacaacttatatgagtaacaaacgttcatgaaaattgaaaaatatgatgatgacgaggttagtttatgggttgtattttctttttattttttttttggaaactgaaaaaaattaaatgaacaaataaaacaacaagtcaacggtctcaaaaattcgattacataaaaacaaaacaataaaaaaatataagtcagactgtaaaataagttgataggtgttgattctgaaaatcacacaataaatttgtttaaaggggataaacaaatttacttaactctctctcgctatttagtgaccaaaggctcaatgaaaagaagaacaaagttggttagagacaaagttagggttttgctcaagaacaatgaagaaaactagggttttattattaagtttcggatccttagaatagaggacaactccctcccccctccccctatttatacattattaagacgattaaaagatatgttaaactttcaattcttcgaggcttgaatcttctaatttcctttatcttcgaagacttgctattttcaaaggagaaaacttctttttcttcgaattaggaagtcggctaggcggtctccctacttggggctaaagtcggcaaatgacctccttattttggctcattaacaggctaaaccgggataccccggtttgattacaatctcagtctaattcgtaattcctctggtttaagccggtattgtcggaggtgctaattcctgcaccaacaatagaaataaatgtagtcgatgaaaatgaaattttatagaagttagtagattttacttttaggtacgattctcttcaatgtgttccctctcgctgtgattgattgatactctgatggtaaaaatctctctttgtttgtatccgtcttattcacagccaaagatgaagaacaatttaacatttacaccaaaaaagatgaagaacctagcgaagagtgcattcgtgtctcacaagggagagctcaagagcattttcgtggtgaagaagcttcacttgacttgggtcatgtcgccaagagttttgctcagagagaacaaccgtctttagttgggaaatcgcatgataaggaatcaatgaagagaaaaagagacgaatgtcaaaaagggcaacaagctaagaagagaaagaagatgagtggtagtactagtgccaatacaaaaaaaaaaaaacttgatcgaatcggtttggccatcataaaccatagcataagtttgttcatcgaaatttttgaaatatctaagttttgaacttaactatgtttttgttaacaataataattacttgtatcaaccagaaacaacaaactgaaatttaggcagaagttagtggattttgttgcattaaaaataaaaatggccgatgcctaataattttttacagcccatacaagtaagcataattaaagctctaaaaggtaaaaagatacggtaaaagagactctctctcttaacacactgttcatctttgagagagagagtggtgatttccggttaaccggaatattccatctttttgttttatatagttttccgactttgtttggattctgtttttcttagtcgatctttatttctgtttatctatcttaatttgtcggctaagatacgcttttttcctttttgttcttccctctttctacagcttttactcttgaatcccgtttgcttttatcagaattagtcatcgacttgatgtttctccaatgatagagtaatatcttcgccgctatatcctcaaagtgaaggattaaagacctcttcgttaggttttaggtggagcttcttcttggaggtgggattgagttcgaagtcttctaagactaattcaacagttgctatggctaaaattgtggaaagaaggtctccgaagcatgattccaagtctctatctactaatcgccggagagaagaatcaagtcagatccaaatcttagtcggcaagaagaatcgagatgataagagaagagtgggcccacatatgtgcttaacaatacacgttatggggttacgtgtcattaatgttattgggttcatttaatctgggcttaaaagaggcttgtatcatgttgtaatattccgatctgggctttcatataatgaaatttggccgacaaaaaaacaaaaagcccttttaggtagtactaagcccaaatcgtaagagaaacaatcgggaatgacaataatgtcatcgaaaagcagattctgagatcgaaaagcagagatcctatcctattgtttgattgttgatctgattatcctggggatcaaatccggctagctataagaactccggtgaagccgattgttcgatg

SEQ ID NO: 31249 - DNA, 3003 bp, Unknown
  misc_feature (1)..( 3003): 2750-1469P.txt file - cDNA_ID_3040210; gDNA_ID_2214500; Annot_ID_183962
ggtcatggaatctaattcagggttagtcaaatggaagttcctgcttaagatgcattgattacattgcttatcatgagttaataaaagttctttacagggagtggtatgattcaattggatataagtaagtctaaaggttattatcttactgtggctaacttgaagaggaaggacgtagaggtaattataatcaagttatgactttggattaagttttggtttctgttgtgtttctgcacagtccacagtacactgttttacttgacataatgtttgttcaggtggaactggatattgatgtgaaggttgtcttgtatgatactaaacaatcatcctacaattgttccttcagcaatggcgagtgctcattcaaaatgaatgaaaggtcccctgttgaaaattatgctgtcgtaacttcaccagcactgggtcaggtatgtactcgtaatacgaaacactaacaatattgttactgttattattattatgactcttagctgaatgaatgtttgtctcactgccttagggagtatccatcgatgatgaatggtatatcgagttgtcatatcaacctagattgattgcatatggaagcttcacaggtaaacttttcaatcttttcaaagtcaacttgattattggatttaagcatttgttagtttctctgtaacaaggaagcaattacatgtagtattattgcgtatgcaggtgtgttgctttccttcatgctggtagctatacacttctgcaacaagttaaagtgttgtggtggagagggatttttatccgaagatgattcagtgagaacatgtctacttgcagacaaaggtgacaatgattgttgtaatgatgtcgaagcaagtaacaaaagtctctgtgccatttgttttgatgctccaagagattgttgtttcctcccgtgtggccattgcgtctcctgttaccaatgcggaacaaagtaagttttttatcaactaagtacaacttctggattgcataattgtaatggtaatgtgtttaccatattgggattgatctaaaatattgaacgttgtgatttgacaatatttgcaggataaaaagaaccaaggggaggtgtccaatatgtcgaaagaaaataatgcatgtgaagcgaatctatacagcttaagatgtattattatctgtccaatgtgatgttgaatcgttagagcattaataaaaatcatataatttgatattgacaaggctcaggtctttctttgcattaattcgtttcatctcttaaccatctttgtgacaacaccattggttaactaccatagggtaggcaatatagtgaaccattgtttgttgactcacatcacaaaatggttcgaaacccgaatcgataattaaggatttcataaattaattgttaatttctgaataaattcggattttgtatatttcctccgtttcgtaatataagtagttttggaccaatttttttgtttcacaacataaattgtttttaactttctatgtaaataatatattattttaatattttttgattatttatattatgtaatctcttttatgattagctaaactttttaaaaataaatatttttaatttgcatatttttatttaaaacaacgtatattgtgaaatgaaaagagtataaattattgattaaataattaaggactgtaatttattttattaaatttaatattcttttccaaattctccacatattttataccataaaaaaagaacaacacccttacacacataacatatccgaatcagtggttcttcgacatcacacgatggtatagggaaatgagcttccacgtcaacaagataataatctcttcgggactatacatttacaacaaaaagaaacaaatcttgtggtcaaagtttccatacgtagcttctcttctctacactcacgtccaccacaatcctcgtgctccttcctctaaacccgtccgattcacgtacttttactatcttttctcaatccaacagctcacagtccacaaacaaatttcaaatcgcgtcctataaaatcccctctcctctgctccacactctctcaaaaccctagaaaaaatggcaggaaccggagttgtggcggtgtacggcgaaggagccatgacggagacgaaacagaaatctcccttctccgtgaaagttggtctcgctcagatgcttcgtggcggtgtaatcatggatgtcgtcaacgcagagcaagctcgaatcgctgaagaagctggcgcatgcgccgtgatggctcttgaacgtgttcccgccgatattcgagctcaaggcggtgttgcacgtttttgttagttgacatggtcatacttaattaggagaaaccattacataatgtttttaggcactgtattttttttttgttaaaataaacattatgtaattaattgtgcaataatacattcaataattgttaagataacacatatgaataaacaatttcacataagtatattgaaattgctaagttcaatcaatatattttgttttagaatactaattaaacactaaaacttaacagttgattaattttaacttactatactgttaaacttaacagtttaattaacgttaaccgaaggataaaattggaatttcacgaaagaatctcttcaaataatataataaaaaaacaaaatcctcacagacacaaacaaaagtctgaaaaataatgttattattttatataataaagttataaaaataccctcaagactctggtcgtcattaccgttcaaacgacggagagaaaagaagaagactagccggagaaccaaaatcgaacgataaccgttacactaataaacttaccctatcatcttatctttcatggattcacttcctcacaaattctcaggtgttttattttatctttacttatcctataaatctctagggtttcttctatccaattcatttcttacctcataattttttttttgttatctctttctctaagaatcaccgaaatg

SEQ ID NO: 31250 - DNA, 3003 bp, Unknown
  misc_feature (1)..( 3003): 2750-1469P.txt file - cDNA_ID_3040214; gDNA_ID_2214500; Annot_ID_183960
aatgtatatatggctggtttttgaacttcatgagaacctttattgtattgattagaagtgttgtctttgtatacttcacattgatattttgaaatcaaagattcaatctttaattagtacctatgtttagtcaagaatttattgtagctttgattgtcattgaattctcttttagacaatttattgaactgattcatttctctcagggatggccatattatctcaacagtgggtcattgttgaatattacatataccgttaaaccacaaggttctgcggttcagcttgtggtcgatgaaggttagtaagtattgtagtgttttcattttctatgtctgcctgttggtttgatgttgtgtcactgaggctgtgatagcgttaaaatgatgagcacaacgaaaaacctaaaagattgacaataacgtatctaaacccatttcccgcgttgttttctcgcaatcgagacttcattcgtataaagtatctactgaaacgtagagcaaaccctaactagaaatgggaaataactttgaataaaagaggaaatataggagatggaactcttcttgtgagcgatttttttttgtttgaaagtgttaccttttagggatttaaactgattatgtcaaggctttctcaattcataggacatcaaggcgttcctcagtcggttttgaacgaccctgcatatcgttacaatgtttggtcgtggaatctaattgaaggttagtcaaatggaagctcctagttaaaatgcattgtgttgcaatgattaccatgagttaaataaaagtcctttacagggagtggtatgattcaattggagataagaaagtcttcaagttattatcttgctgtagctaacttgaagagcaaggacgtagaggtaaccactactgatcaagtatttggattaagttttggtttttccactcttcattgtgttacttgacatgatgtttgttcaggtggaactgaatattgatgtgaaggctgtcttgtatgatactaaacaatcattctacaactgtaacttcagcaatggcgagtgcacattcaatgcaatgtcccttgttggaaattctgttgtcgtaacttcaccagcagcgagtcaggtatgtattcgtaaaacgaaacaccaacagcgttattattatgactcttagctgaatgaatgtttgtcttactgcctcggggcttagggagtatccattgaagatgaatggtatatcaggttctcatatcaacctagagaaattgcatatgtaatcggcacaggtaaatatttcaatcttttcaaagtcaaattcatagcattggttagtttctctataacatgtagtattattgcatatgcaggtgtggtgatttgcttcatgttggtagctatacagttctgcaacaggtttcagtgcagtggtggagagggacatctaaccgaggatgattcagcgagaacacgtctacttgcagacaaagatgacgatggttcaagcatgggttcgtgtgacgattcttatgcaaacgatgatgctgacttagaagagtttatgggaaatgatggtgaagcaagtaaccgaagtagacgtctctgtgccatttgttttgatgttccaagagattgctttttcctcccttgtggtcattccgtctcctgttatgaatgcggaacaacgtaagttattttgtccacgaaggtctttaagaattgataatatacaactagacatatcaaaatcacttgattgatctaaactttgaaacgttatgaatctgcaatatgtgaaggatgcaagaagctgatgggagttgtccaatatgtcgaaggaaaatgaagaaagtgaagcgaatctatacagtgtaagatgaatcaaatataaatctctgacataatgttgaatctatagagcattaataaaagttatattggtattgccaaggctcatttctttctttgcataactatttcatttcgtccctgaccatctttgtgataacactcattgtttgtcgactcacattccgaaatgggatcgaaaccctgaaccggtaagtccagtgttggtgcgtggactaaatgagttggtacttcttgatgactttggaatatgcgtaaaggtgggattgcaaagtccaaatctatctccacctccaacacacaaccatctccaatgcacaaatttctgtatctttgttggtgatccaacttattatttttgttctttattgatttctcccacggttcttatcttcttcttccttttttattgtggttattgttcaagctcaaagaaattcaagcatgtatcataacatttttgttagttgacatggtcatacttaattaggagaaaccattacataatgtttttaagcactgtaattttttttttgttaaaataaacattatgtaattaattgtgcaataatacattcaatcattgttaagataacacatatgaataaacaatttcacataagtatattgaaattgctaagttcaatcaatatagtttattttagaatactaattaaacactaaaacttaacagttgattaattttaacttactatactgttaaacttaacagtttaattaatgttaaccgaaggacaaaattggaatttcaagaaagaatctcttcaaataatataataaaaaaacaaaatcctcactgacaaaaacaaaagtctgaaaaataatgttattattttatataataaagttataaaaataccctcaagactctggtcgtcgttaccgttcaaacgacagagagaatagaagaagactagccggagaaccaaaatcgaacgataaccgttacactaataaacttgccctatcatcttatctttcatggattcacttcctcacaaattctcaggtgttttattttatctttacttatcctataaatctctagggtttcttctatccaattcatttctcacctcataaatttttttttgttatctctttctctaagaatcaccgaaatg

SEQ ID NO: 31251 - DNA, 3000 bp, Unknown; identical to SEQ ID NO: 11525
  misc_feature (1)..( 3000): 2750-1469P.txt file - cDNA_ID_3040228; gDNA_ID_2214500; Annot_ID_183954

SEQ ID NO: 31252 - DNA, 2281 bp, Unknown; identical to SEQ ID NO: 11517
  misc_feature (1)..( 2281): 2750-1469P.txt file - cDNA_ID_3040253; gDNA_ID_2214500; Annot_ID_133637

SEQ ID NO: 31253 - DNA, 2269 bp, Unknown; identical to SEQ ID NO: 11526
  misc_feature (1)..( 2269): 2750-1469P.txt file - cDNA_ID_3040253; gDNA_ID_2214500; Annot_ID_183944

SEQ ID NO: 31254 - DNA, 3000 bp, Unknown; identical to SEQ ID NO: 11550
  misc_feature (1)..( 3000): 2750-1469P.txt file - cDNA_ID_3040280; gDNA_ID_2214501; Annot_ID_133672

SEQ ID NO: 31255 - DNA, 3000 bp, Unknown; identical to SEQ ID NO: 11540
  misc_feature (1)..( 3000): 2750-1469P.txt file - cDNA_ID_3040280; gDNA_ID_2214501; Annot_ID_183996

SEQ ID NO: 31256 - DNA, 3003 bp, Unknown
  misc_feature (1)..( 3003): 2750-1469P.txt file - cDNA_ID_3040284; gDNA_ID_2214501; Annot_ID_183995
ttttgttttgtggtataatcacaaaatcatacagtataataaagacaaccagatactctcaaaatcactaaactcggcattgctgtttagtgattatcaaaactatataaactgttcatagctaatataatgtggattttagtttgcgtgttaaaatattacttaaataatcaaataaatatattttaatcataaattgcaaaattagatgaacgttggttttcatgttaaatagaactatatttcctaataatgtacagaaaaaagccataaatacaaactttcactataaatagaaataaattcgttatcgattcacatgggcggagacaaagaatatatttagacacagaatatattttatacgatatgatttttagtctgttgtcctttaggtttgaagagaggtgggaatgattggatcggcttctcatctccacttcttccacagtgtccaacttgagaaccgaaaaataattggagagataggaatcgtttctcatcaaattcccacttacttatgttaagccacttaagtagtggaacaataattcaaaacttataataatattcttttacccaaaactcttttcatttgaccaaattagtaatcgagttggtaattactagttatgtatacattctgacattcactatccaagttgttttccaataagtagaaagtttaaagtatgcgtagctcgacattaattaattagcttctgttaattatatgattaaggacggttcataaaatagtatttaaactgctttttacaagtagtttgagttttagcaatcatgtgatgattcagataaatttatatattttaaatttatattgaagcaatcgttaaacgaagttgaaaatgcgttaataaagtatctgacatatggtaagtttaatgggtgtaagaacaatatccactatctactaataacattactcaagtgtaacgacatggtgttaacaacattacaacaaattttaagcatgtatataagaatatacatgaactcaattttccttgattaaactagtcatggaatcaagtaaagagatccaatattgaagttttaattatcaacaagacaaggcaatataaattctaatgatggtatcaaatatgaggtgggataatattgagagaacgagagatagaccgagatcaacggtacaaatgattaccaaataaggataattgttttttgacaattatatcgatcaatctttgattttaccaataaataatgttagttttcaaaatattcttagcaaggaatggtaaaattagccattagttcccaaacatttgtttagctcaagtgtcattacaaaattcatttttatttgctgagtattatatcgatgttattagtttcagttctcgttcaattctgtttgttgataaaaccttttatgctcgttcaattctgtttcgaaagagaagtatgaacctatttttaatattggttggaagttggaacagtctatagatcaaaactctaaaattgcttggtacggttaaaaaaaaatattcccaagatttgtaaaaaaaaatagtaacaatgaaacaaaattagggttttactgtacattcttaagtcttaatacggaagctctttacggtgtggagcccagctcagctcgggacccaaaacctttcctaatctgaagcatattccatagaatgtaccttttcaatttctccattagtttattttagtattttcttttcataaaatctcgttacattttcaaaaaacagttatatagacatagacggaaaaaaaaaaactaaattttttttgtcgaacactttgcagcatgtgtattggttcggagctcatgagaggcccgtacaggcatacaatcttttatatgtctcttgagtcctgactcttgtttttcacaatatatattgatggactactaaaaatagtaggagaacattagttgcttaaatggtttgaggagttatgtgaacaactgaacataacatttttgttaatcatacatgaagataagtcttttttgaaaatatatctcaattaatatatagagaatttgagaaagcgttagcgttcctaatttcatatatggagtatagcatagtttataacacgggactgctatagaacatctataataatcccattaaatttttagcgatcgatttacaaattacaaatctatagtaattgttcgatcggttgatggaattactacaacgagaaacaacaatttgattttgttgactagttaaattctaatatacatatatatatatataaaattatataccaatattagctttttgtcggtatttaccaacacaattaactataacaatagatattgtaataaatcacatatcatatagatatatcttattaacacgatatgtaagataattgctctaaaataaaaacttctatagtagtttatttttgtcaccaattgaatatttttccttttggggtggaaaatatttgtggtatctcaataagcttcttgtgtatcccaccccccaccatggcattcctacaatttaataaagccgtattttcactttcactctgagtcatttttattatattgtcattttcgacaaaatcgaatttagattgtgcattatatattctgacgaaaacaaagaaagattgttgcattaatttaatttaaaaaagttgattgaaaacgcaagtctcgttcatctcctccaaatgttctttttctttttttatgttctttctcttctaaaagtccaacagcgacaacataggtttctctctctaccatggcgtgtctatataaagcaaggtcgtcgattcataacgaccatctccattacttctccataacctttcaagaaacaaaaacaagataagatctcttcagattcctacactccaacaaatataagtttcattagattctttcttagctagagaatgaaactgattgagaagacgatgagcatgaaccagtttaggactatg

SEQ ID NO: 31257 - DNA, 3000 bp, Unknown; identical to SEQ ID NO: 11537
  misc_feature (1)..( 3000): 2750-1469P.txt file - cDNA_ID_3040288; gDNA_ID_2214501; Annot_ID_183993

SEQ ID NO: 31258 - DNA, 3000 bp, Unknown; identical to SEQ ID NO: 11542
  misc_feature (1)..( 3000): 2750-1469P.txt file - cDNA_ID_3040292; gDNA_ID_2214501; Annot_ID_183992

SEQ ID NO: 31259 - DNA, 3003 bp, Unknown; identical to SEQ ID NO: 26998
  misc_feature (1)..( 3003): 2750-1469P.txt file - cDNA_ID_3040296; gDNA_ID_2214501; Annot_ID_183991

SEQ ID NO: 31260 - DNA, 3003 bp, Unknown; identical to SEQ ID NO: 26999
  misc_feature (1)..( 3003): 2750-1469P.txt file - cDNA_ID_3040300; gDNA_ID_2214501; Annot_ID_183990

SEQ ID NO: 31261 - DNA, 3000 bp, Unknown; identical to SEQ ID NO: 11544
  misc_feature (1)..( 3000): 2750-1469P.txt file - cDNA_ID_3040308; gDNA_ID_2214501; Annot_ID_183987

SEQ ID NO: 31262 - DNA, 3000 bp, Unknown; identical to SEQ ID NO: 11533
  misc_feature (1)..( 3000): 2750-1469P.txt file - cDNA_ID_3040312; gDNA_ID_2214501; Annot_ID_183986

SEQ ID NO: 31263 - DNA, 3003 bp, Unknown; identical to SEQ ID NO: 27002
  misc_feature (1)..( 3003): 2750-1469P.txt file - cDNA_ID_3040316; gDNA_ID_2214501; Annot_ID_183985

SEQ ID NO: 31264 - DNA, 3000 bp, Unknown; identical to SEQ ID NO: 11547
  misc_feature (1)..( 3000): 2750-1469P.txt file - cDNA_ID_3040320; gDNA_ID_2214501; Annot_ID_183984

SEQ ID NO: 31265 - DNA, 606 bp, Unknown; identical to SEQ ID NO: 11567
  misc_feature (1)..( 606): 2750-1469P.txt file - cDNA_ID_3040341; gDNA_ID_2214502; Annot_ID_184036

SEQ ID NO: 31266 - DNA, 3003 bp, Unknown; identical to SEQ ID NO: 25568
  misc_feature (1)..( 3003): 2750-1469P.txt file - cDNA_ID_3040351; gDNA_ID_2214502; Annot_ID_184028

SEQ ID NO: 31267 - DNA, 3000 bp, Unknown; identical to SEQ ID NO: 11556
  misc_feature (1)..( 3000): 2750-1469P.txt file - cDNA_ID_3040359; gDNA_ID_2214502; Annot_ID_184026

SEQ ID NO: 31268 - DNA, 3000 bp, Unknown; identical to SEQ ID NO: 11562
  misc_feature (1)..( 3000): 2750-1469P.txt file - cDNA_ID_3040368; gDNA_ID_2214502; Annot_ID_184020

SEQ ID NO: 31269 - DNA, 3003 bp, Unknown; identical to SEQ ID NO: 21256
  misc_feature (1)..( 3003): 2750-1469P.txt file - cDNA_ID_3040383; gDNA_ID_2214502; Annot_ID_184013

SEQ ID NO: 31270 - DNA, 3000 bp, Unknown; identical to SEQ ID NO: 11554
  misc_feature (1)..( 3000): 2750-1469P.txt file - cDNA_ID_3040395; gDNA_ID_2214502; Annot_ID_184010

SEQ ID NO: 31271 - DNA, 3000 bp, Unknown; identical to SEQ ID NO: 11569
  misc_feature (1)..( 3000): 2750-1469P.txt file - cDNA_ID_3040417; gDNA_ID_2214503; Annot_ID_184060

SEQ ID NO: 31272 - DNA, 3003 bp, Unknown
  misc_feature (1)..( 3003): 2750-1469P.txt file - cDNA_ID_3040421; gDNA_ID_2214503; Annot_ID_184059
cactaatggtttaagttttttagatttagttacgtttttttcttggtaaataggagaaatatggtccaatggtgcgatctaatggcgaaagttcgaaacaaaagcacgatttcgatataaatgccgagttgttcaacagtcaatggttttgtaggtactttacacacatctttagccttccttccattgtctgttaatggaggctttgttccaaacttagtcttgtttgtgtgtgttctcttgtggtgaggtacttaatattttctatttgcagcttatgtaatgcaactatgacctgcgagcaggattattttgcccatgtctatgggaagaaacaccaagagaaagcaaatgaggttgctgatatggactactcgaaacaacaatctgaacatccagcagttgacaagaacaatttaacacaacaacccgacttagatatatatgtcgggttatcaaacgactatccatggttctgtaggtaggtaatcttacattgtttaggacattattgggtaaacctagctcaaaatgtattgttgtttgtgtgttctcttgcggtgagattttatgaagacatgcattaaatatgatttatttcgttccagcttgtgtgacataaacgctaccagcgagcagactttgttagcacatgccaatggcaagaaacaccgagtgaaagttgaacgttttgatgctgaacaacagaaacgacaatcaacacaacattccacggtggataagaaggactactcaaaacaacagatcgaagtcgatataaatgtcgggttatccaattgttatccatggttttgtaggtaatctcttgatcacatatttcacctttccactaccattttctatatcacgttagaagaacggatatgcgcttttgatgtgagattagtgatctgttaattatggaataattgaggaggattgtctacaatttttaggagtataataatgtcgttttagaaaaaacctatctatttaactttggatttgtcaatgacttattgaaactttgtgtccttagtaagagtgttcacaaaatctacatgccacctgagttagttagtcgtaactaggataattctaagtaggatatgcatcagctattattgagtaaagtcgtgtatatggttggttttgcaccattggtatgggttcatggatttctctttgattctgtactgtaataaataaagaagatttctgtgtttgttcttaacatttccctttgggtgagatttcaagagttaatgctttgaatatatctatttggttccagcttgtgtaacgtgaaggctacatgccagcagaatttgctatcccatgccaatggcagaaaacaccgagaaaatgtcgaattgtttgatgctacacaacaacaacaattagaaaaaactacagtggataaaaaggatacaactgtcaatgcttcggatggtaattccgaacaaaagaaagtagatttgcttgtctcctcaggtgttgcaaatggatattcacaggctcacaaaaagagaaagctagagacctgcgatgaaacatggaaaagggaggtagttcaggccgaagaagcaaaaggagggggtgagcaaaagagtgaatcaaagaaagccaaaaagcaagacaaagagaagaagagaaagaaggacaagaagcagactaagtcagactctgatttcgagcatgacaaggaagatatcaagcagctgttggtagcttactcgaaggaagagcttgttaacctcatatacaagactgccgagaagggttctcgattgatctctgccatccttgagtcggctgaccgtgacatcgctcagcgcaatatatttgtgcgtggctttggatgggacacaacgcaagagaacctcaagacggcttttgagtcttatggggagatagaggagtgctcggtagtcatggacaaggacacgggaagaggtaaaggttacgggtttgtgatgttcaagacacggaagggagcgagagaggcattgaaaagaccggagaagaggatgtacaaccgcatcgtggtatgtaatctagcatcagagaagccgggcaaggctggaaaggagcaggatatggctgaaccagtgaatattgatctaaccaagatggctaatcaaagtgaagcagtcttgcccgggatcgaactgggtcgcggacatgtactcgagaagatgcaccaccaacaacaacagactatggacatgttcggacagaacatgcctttttatggatactctcatcagtttcctggttttgatcctatgtatggtgcattaagtggtaatcaaatgttagctggtctaccaaactatggtatgtttggctcgggtatgatgacgaaccaaggatcaatgttgccaccaccgaatcatttaggcatggcagggcaatattttggtgatggggaacaggcttggcatcagagatagctgagatcatttggtaaggctttgttatctctgatatattaatcaggcttccaattttcggttaggctaattactaatctggtatcttcaacctatattatacctggcatctatgtaccaaactaaaccagcttttttgggttttcgagttgtgtgaatatataccaaactaaaccagctttttggggtttgattcgttttgaattctatagttttctgtttgaattctggtttactcgatttggttcggtttataccaaaattaaatgccttgaattcccctggatgcattgctaattgcaataccagctctacaaacatcatgccgtctcatttctaaaaactaagaaaccttgtcgtttttagcgttccaaaacagcgcgttgtctgatacttgaataaacaaactctacattgaattagttcttctggaaggcttttaaaaccctagctggtaccaatcttaaacccctctccgattttgatttctgcttgaaattgttttccccgagatctcaatttcgataatcggaaaacgaaaaagatg

SEQ ID NO: 31273 - DNA, 3003 bp, Unknown; identical to SEQ ID NO: 25572
  misc_feature (1)..( 3003): 2750-1469P.txt file - cDNA_ID_3040440; gDNA_ID_2214503; Annot_ID_184047

SEQ ID NO: 31274 - DNA, 3000 bp, Unknown; identical to SEQ ID NO: 11589
  misc_feature (1)..( 3000): 2750-1469P.txt file - cDNA_ID_3040463; gDNA_ID_2214504; Annot_ID_184077

SEQ ID NO: 31275 - DNA, 3003 bp, Unknown; identical to SEQ ID NO: 25582
  misc_feature (1)..( 3003): 2750-1469P.txt file - cDNA_ID_3040471; gDNA_ID_2214504; Annot_ID_184075

SEQ ID NO: 31276 - DNA, 3000 bp, Unknown; identical to SEQ ID NO: 11592
  misc_feature (1)..( 3000): 2750-1469P.txt file - cDNA_ID_3040475; gDNA_ID_2214504; Annot_ID_184074

SEQ ID NO: 31277 - DNA, 3000 bp, Unknown; identical to SEQ ID NO: 11584
  misc_feature (1)..( 3000): 2750-1469P.txt file - cDNA_ID_3040483; gDNA_ID_2214504; Annot_ID_184068

SEQ ID NO: 31278 - DNA, 3003 bp, Unknown; identical to SEQ ID NO: 25577
  misc_feature (1)..( 3003): 2750-1469P.txt file - cDNA_ID_3040491; gDNA_ID_2214504; Annot_ID_184066

SEQ ID NO: 31279 - DNA, 3003 bp, Unknown
  misc_feature (1)..( 3003): 2750-1469P.txt file - cDNA_ID_3040509; gDNA_ID_2214505; Annot_ID_184093
gggatgtggggttcataactacgcaagcagggcagaatgcttcaaatgcaagacaacaagagattatggtgcgtaaatatatatatcctctctttcttcttttaaaatgttattctattgatttcgaacttttgaattgatatattttcctctttttgatctctaggtggcgtctaaatggacgagaaagagctaatgaagaatctcttgttttaattatacctttcaacaagtgtttctactttctaacatgcatgacgctttcttacgttgacttgaaatcaattgaaagtttagactcgtgcaaattaacgtaagtacaaatagttgcaaacaaaattttgaaacaattaaggcatcaatgagaccttattgcaaaaacaatcgagatacatagattattgacgatattttattttttagtacaaatatacgatctttagaggaagaattcactagaaatttaaagcaaatacaaggtatttgcaaatacgaaagttaaattctactctttcgatataccattttgcagaagcaattttaaagtacgctgtaaaaaataaagtaagttttgtatttgatctaacacttgtagctccagcactaacaactattgtgcttctacagtcacaatattaaaaagtatgggcgtaacttacatccgaaatatagttcgaaaatagaaatttgtcacacatttacaaggagcacattgctcaaatataataaagaggaagggacattctccaaagaatttcatgaaaccattctcagatgttttcaagataacacgtgtcttttttattttattttataacatggcatacctacactagataaaaacgaagttagatggcgtttctagtctcctgaggctggtatacatattcccaactactgcaagatgcactatctattcttctctctctctctccctctttcaaattatgaattaagaaatctaaaagaaataaaaaagagaattgaagatagtgttgtaacctgcttagaccatctccaatagtatttcatttttcactttttccttcattttgaaataaaaaatgaaaaaatcttctccaatagtacttcatttttatcttcaaaatgaagatttgaatagtgtatcttcatatttgaaggtatactattcacaattttgaagatgtgaacttttctatttacaaaataatccttaaaattctaacaaaattttattttgcaccaaacaaattatttatttttattttaatccaatcaaactaaaatgcaaaaataaattatttatttttatcttccttttccttatagattatttgtgggagaattatatgtctacaattgtatcataaatatatattttaattaatgttatgtaatgtgattttctttataataatgtattttacataacattaattaaaaagatatatttatgatacaattgtaaaagaagtgggttaaagttataaaagaaatggattaactaatgtataattgtatttgcttattattataaaagaaattggttaaaattcataagtttacaaagtaaagggtattattcataattaataataaaatagagatagaatatatttaagaatattccttttgaagtagaaaatgaaagaaaccattggaaaagtcttgtttcatttttgtcttcaaatttgaagaaattctaattttgaagaaaaatttgaagctaaccattgaagatgcccttaaagagagacgatcgcctttaaccaccactacctggcccaaaccaaggtcactgtaggttcatcgaatcaagctatttttacaaaacttttaagtttcagtctatactatgttcaagaattattattcttacatttttttgttaccatatatagctacgtacatatcaaaaattgtactgtacatagagcatcagcaacatatgaaatatttcacttattgacggatcaatccacgaatgacatcggtcatataaatatcaaacctaatatatatgatccattatatgatttacatgttctgttgattagaatttagaacctatggacttttgagtttttttttctctcttcgacttcattaaagaaaagaaattcatatgtacagatagatttaatataataatagtgtgtgtaatcctataaaatgtaatttaagtaaaaaccaacaaaattgaatatatcaaaattaaaaaaatattgaaaattgagggctattacgtaccatcagactaacataattgacatgtatcagaaactagttttcaattagaagattatttttgtataatcgaattacaaaaatttcagttttcttaaaatgcatgcgagatttgaatttttttatatataaataataagttgatagcccttaattttaaataagttttagaatactataggacaagttttagaactttgtactttttgcaaaaaaaaatccaattcaataaggagatttctccaaaagaaacaaatctaactaatttactaaatccaagatgcttctaaaatgttttttatatagtcatgcaattacatttcattattttctatttagcttttctttgtcatctcgtattataggggactttcttgagttattcattgtaatttctcataaataaatactaaatagggatttgaccatctttgggtcatcggattattctgatactaaggtaaagctggcataggattttattgttcaaacatttataacttttgagtaaacaaaggatagtggtggtgtcagcttggcggagcatgcctgacatgtgcatctcatcaattctcctttatgtttatatccacacttggatctatattgtttatcttcacgcatggttttaactttactacaataatttttaaaaaaatatgtacaaaaataaataaataaaaagacaaaagtgaaaaagagatgtatgtgaagaatatggataaatagtgaagacaagacagttattgtcttgcccttgagacgtatctaatg

SEQ ID NO: 31280 - DNA, 3003 bp, Unknown; identical to SEQ ID NO: 27007
  misc_feature (1)..( 3003): 2750-1469P.txt file - cDNA_ID_3040513; gDNA_ID_2214505; Annot_ID_184092

SEQ ID NO: 31281 - DNA, 3000 bp, Unknown; identical to SEQ ID NO: 11599
  misc_feature (1)..( 3000): 2750-1469P.txt file - cDNA_ID_3040525; gDNA_ID_2214505; Annot_ID_133737

SEQ ID NO: 31282 - DNA, 3000 bp, Unknown; identical to SEQ ID NO: 11607
  misc_feature (1)..( 3000): 2750-1469P.txt file - cDNA_ID_3040525; gDNA_ID_2214505; Annot_ID_184088

SEQ ID NO: 31283 - DNA, 3000 bp, Unknown; identical to SEQ ID NO: 9217
  misc_feature (1)..( 3000): 2750-1469P.txt file - cDNA_ID_3040606; gDNA_ID_1972022; Annot_ID_178098

SEQ ID NO: 31284 - DNA, 3000 bp, Unknown; identical to SEQ ID NO: 9215
  misc_feature (1)..( 3000): 2750-1469P.txt file - cDNA_ID_3040610; gDNA_ID_1972022; Annot_ID_178097

SEQ ID NO: 31285 - DNA, 97 bp, Unknown; identical to SEQ ID NO: 9206
  misc_feature (1)..( 97): 2750-1469P.txt file - cDNA_ID_3040614; gDNA_ID_1972022; Annot_ID_178094

SEQ ID NO: 31286 - DNA, 3000 bp, Unknown; identical to SEQ ID NO: 9211
  misc_feature (1)..( 3000): 2750-1469P.txt file - cDNA_ID_3040626; gDNA_ID_1972022; Annot_ID_178109

SEQ ID NO: 31287 - DNA, 3003 bp, Unknown
  misc_feature (1)..( 3003): 2750-1469P.txt file - cDNA_ID_3040641; gDNA_ID_1972022; Annot_ID_178103
caacaatatttcaatgtagacgtaactgtcaaccactttgaaatgtaagtaacaggtgtcagtgagaatattgtgtcgcaaatgtcaaataaatgaatacgtaatagttaaagattcatttgatcggggcttactagtttagtaggacccttacaataaattagataaaatcatttatgtgaccgctaaaaattatacgtgggagaggattttttttgtataaagatgggcaaaagtagggtatgcattgttcatatagtgttccctttagactaagaaacatacacacaagtcacaaggccatgttctttgttaggtgttatattatccgaggatgtgaaaatacgagatgtcgggatttataattcccctaatgaatccaaaactttatgtatagtttactgttcggagtttattgaatgtcgtatttatctaattttctgaaccaattcttaacgaatccaaacgtataccttataaccaatacggtccacatgtcgtttaggttactacattattagaacgtaacttacacaaagaaaatcgaaaacaaaaaagaaacttgcatgattacgaagttggcagtgaattcttgtggttagcgtaatagcgtgatccaccatgccccctactttgagcatgatggatcacattaaaccgacgctgaaagaaatttaacggctaagccgacgtcgaaggaaattatggaccatgcgtcaaaatttgtttgggagcataatcacaaaaagaaaaggagaatcgtaagaattctgaccgaaaaatattttaagggggtcactccatgaaattcaaagattttgaattctttctccaagaacaaaccgggaaaaactcgaatctatctaccaattaaaccaaaacactatcgacaattgcaatatatgcccatatttgggattttattttacatatcagcaaccaaaaataggggttctgcacaaaatgcaacttagttttttgttaatggacacccattccccaaatcctcttttttggaagactttttatggacccattgcccaaatgttctcggatgcaaacagatctttaccataacttagaaggctttcctactaatatccaacatatcctttttgcttacgagatatatggagtgggccacttgtttgggctcaaaatatatatagagtaaaaccaataaggctatgtgtgagatgattgaagaaatagcttactagtggcccactccatatatggggttttaagctttgtagttagtacaacataaacaaattgtacaaaatcatgtatgcagtatgaaaagataataaaacgttcgtcatatctcttagaagctctctttcaagatatctcggaacatataaagcttgaacatattctctataaatatgttagggcctatctacaacctaactttgtttatcacttgccatttacccggaagcaatgtcaacaatttctacctcataagttttcggagagtatccagagtctgttagtatttgtttgttgttctattgtttcaaactggtggtgtagacgtgtagtgagtgataataaacacaagaagtttgttatcaaaattcaggaaccatatatttttctatttgtttttcaaaggcaaagaattgtattcaaaggccaagaattgaattgaaactcgaaacgtccacatcgaaatggtttggataaactgctaaatgttttaaatgactgtttccctcttgaagagtcttttctttgctagccgtagaaaataatccatctgattcggggccaaggacgacacccccggactcctaaattcattttttttttttaaattttttttttttttggaagttaagaatgaaaaacatatccccacgtcaaagctcatctatattctgaaactattagagatatcatacgtgttaaattaagagcgattttaaagaaaacattagttctgaatgaagacgtgtgttcaatggatgaaatgcgattcagttcaaaataataacaatatatatatatatatatatttatttatttatagatattcatatatatatataagaaaatatatagatatggtcatatggatatggttgtggacttgtgatgcgacaaaaaaaaattgaacaaagtggatctggttaggtggccagcatcttttacggaagggaaaagttggatatattacaatatttttggtggaccatgagcaaccccaccacaaagtgcatgtgaagtgaccacttttctgcgagctgatccaactaatcaataatggtaacaaatacaaaaaataaacgctctaattttatttcagtcaaatgtttttaataattttccatgtccgaaaactttaaaatcttttattattactaagttaagaaaattgcaaatgtaagaattatttgtttctaaatagataatattaataccaaattgatattccaaaacatattattttcttgtttgatttgattgataatctattaactgataaacaacaatgatagaaatatgttctctaattcttcttctctagcattcaaaaattcacatccaacaaaaccataaattttgtaattttagatacaattttacactaaaaattaataattgtaaagcttgtaattatattcccaaactttattctataaattaaaacttagcattcatattgttgaatatgacttttgaattttgttagtgggacccttttatacaataagtggcggctacaacgaaaaatcaaagtagggaccaaaatgatacaaatcgtaataacggggtcaaaataacataatccaaacttttaaatagcataaatacaacaactctcaagacctgtacaagctatttcacctacttcatcactcatcaccagcttcgcatcttcttctccggcttgatcttctctcgtttctagatctccgacgatcggaatatcaaatccgatcgattaattctgtcaatcacacaaaaaccgaaaaccaaaaaaaaaccatg

SEQ ID NO: 31288 - DNA, 3000 bp, Unknown; identical to SEQ ID NO: 9207
  misc_feature (1)..( 3000): 2750-1469P.txt file - cDNA_ID_3040645; gDNA_ID_1972022; Annot_ID_178102

SEQ ID NO: 31289 - DNA, 3003 bp, Unknown
  misc_feature (1)..( 3003): 2750-1469P.txt file - cDNA_ID_3040653; gDNA_ID_1972023; Annot_ID_178137
gcacctacaagaaaagagttacgtaatggttctttggctgagagaactgtgaagaaggaagaatcttctggggatgagcttctggagagcacaagctcacccgacactcttaacaaattcactcagaataaaagacagtcaaagaaggtgatcactgaactactctattttctcgtaatgacttcatatttgacatgatttggttacatatttatttttgtttggtacacttcaaaagtaaatattcagtaaaaatatttgatactgttattggtctcacattcatttgagttattttgttttttgcagtcatgtaaagagtccatctccaataaagaaaacaaggatggtgatgaaccctgggattccaaaatggattggaaacctttgaactttctggttgaagtggcaaatgggacaaagcccttgaagtcttctgcttctcaagggtcaggttcaaaatctgagcacgcgaatgtatctcgcaatcaatttcaagggagtaaaaccaaaactaagaataaaaagagaaaatgtaaacgtgaggatgacaagagtaataatggtgatcctacaacatcagaaactgttactcctaaaagaatgcgtacaactcaacgcaaaaggtctgccaccactttaggcgattcaaggaatttgccacaaccagatgagtcaagtgcaaaacaggagaggagaaatggtcccgtttggttctcacttgtggcgtccaatgatcagtgagatttttgctctcatatctgaaactatttcctttcatgatctttctctctttcttcattttgtttctcttctcttggtatattgacaagggcttactggttacagggaaggaggaacttctttacctcaaattccagcaaattttttgagaataaggtaggttacagtttaggtattctttgttttatatatcctgtgttgtcgctgcatcttacatagtccctcatttttctgttatgaggaattcttttgttggggaagataatccaatgtctcattctgtgatagggatggaaatacaacagtttctttcatccaaaagtacctcatgaggaagctagatctcgagagtgaaaatgaggtaagggtctttatatgcactatggcacgagaaaggatagaacgtttgaatataatggaacttatatgtttggttgataaaaaatggacatacttatggtttatgttcagatagagataaagtgtatgggagaagcggtgatcccaacgctgacgctttacaatttagtggatctatggctccagaaaagttcaaaccaccaacggtttgctgcattggtaggttcttctgcaaaggattttacgatggttcttgtctatgctcggaagctaccagagtgcaacatgtaaaggactttaaagactcatgttgttgcagaagaagattctgtggagacagggtaatcttttcttttcggtttatggaatctctcaaagcattacaagagagaacattactagaactacaggagcagtcgaatgtgttgtgaaattagtattaatatttttttctatagacgaaatatacactcatgagtcgcttttctgtgcaagaaaatacaaaatttgtttcccttttctttcttcttcttctactatgtgtcctctctggacttgcatgtaacattgttgtcactttctaatcaaatgttgtagtttaagatgttttagattgatttatatgcatttatttgggtactacatcatttctatggaaactaaggttttcaagaattactgttcaagtgttgactgtggatgacgaatgtagtagaactgtgatgacctatatggaggtagaaaactaccaaattaactacataaaacttatctgacaaaagacgaatgaagttcattatcactattttgtgttatcgtgagtaccactatgtggtgacaaccatcatgcttaatatgagtaacatatttatataacaaattgttatgatgttcaaaaaatgttacgagtatgcaatttaacagattctttttaattcatgctttacatatagccatgatgcttaacgatatccaaaagaaaacaaaaaaaaatcattgaagagattgcacctagactagattgcctctcggatgaccttgtacatgtgttgctcttaagaaacgtaatctatgcatcataactaaaggaaagttatacatgtgttttaatatcaattaaaattggttgattacatacttaaactagtaaatcacaatctatgaataatccggactctttttaacatagacacatgacacatcaacaagtagtgtgcaacatattctagaggatggtcatcttaggtagtattcattcaaatgattttggatcaaaaagtaattgaaatcccacgtttattggttcggttcactccttgattagtcaagtttcatattaacataattttcatcgaaattctctttagcattattcgaaaaaccaaatatactgtaatactagcaagaaaaacaatagttttgacatatcttgcttcataaccgaatatctcattacaaaataatccatttttcacgtttagataatcaaacgaaccctcacagaattttctacacaatgcaaaaaacaaaaacgaatttcatcgagtatatcacgagttatggtcaaatgaatcgagtctaaaagcacaacaaatatgaccaaagcatctaatccacatccactaacttactcatcccaccatctacactccttctttctctgccgtcgataaaatttgatccaacgattaatattcaaacctgagaaaagagtagcgatccgcgtagtcattgttttaaccaatcagaagccagatatgaattgccgtctaatacacatctaactatataaatcggacgtttccaatgatcctcttcacaatcctcataatcactttcgaaattacatttacgctttcttgcaatcaaattttccgatcttaagttcagaagacgatg

SEQ ID NO: 31290 - DNA, 3003 bp, Unknown
  misc_feature (1)..( 3003): 2750-1469P.txt file - cDNA_ID_3040666; gDNA_ID_1972023; Annot_ID_178132
ggaacggttgtggcaattaaaagagcacaagagggatcattgcagggtgagaaggagttcctaactgaaattgaattgttatcgagattgcatcacagaaaccttgtttcgttgcttggattctgtgatgaagaaggcgaacaggtactttgtccaaattcctcttctggttgatgtccaaaacgtttatatgtatctcttattgcttgtattgttaagcgtgcagatgctggtttatgagtacatggaaaatggtactttgcgagacaacatttctggtatgttttacttcttcactgagtcatctatagtggtgcttgttctctatgtgaatcagcaaagactacccaccgatgttcactgttcttaatgtgaattctttggagatgacttataagcagcatagatgatattgtgtgcttttaagttcggctctattcctcgtgaataacaatttacatacaaatatgtgttttggcagttaaattaaaagagcctctagactttgcgatgagactacggattgctttaggttcagccaagggaatcttgtatttacacacggaagctaatcccccgatatttcatcgcgatatcaaagcaagcaacatattgttggactccagattcaccgcaaaggttgcagattttggactctcaagacttgccccagtacctgatatggaaggcatctcacctcagcacgtgtctactgttgtaaaagggactcctgtaagatctcattcctgcattgcttctctaaagtttttttctcaaactcatgactgagagttatttgtcgacttgcagggttaccttgacccggaatatttcttgactcatcaattgacggacaaaagtgatgtatatagtctaggcgtagtgttgttagagctctttactggaatgcagccaatcacacatggcaagaacattgtgcgagaggtaattctgagtagataataagagcgtgtgttttccttttaggcgttatataaattgtgtggaatgtttgtttctgtcagatcaacattgcctacgagtctggttcgatattatcaaccgtggataagagaatgagctcagttccagacgaatgcctcgaaaagtttgcaactttagcgctgcgatgctgcagagaggagacagatgcgaggccttcaatggcagaagttgtaagagaactagaaatcatatgggaactgatgccggaatctcatgtagccaagacagcggatctctctgagacaatgactcatccatcatcgtcatcgaattcttcaatcatgaagcatcattatacatcgatggatgtctccggctctgacctcgtcagtggagttgctccctcagttgcacctagatagaaactttcttcgactcatacaccatacactgtttctttgattattcagtgtgattttgttgttgttctttctttgtacaggaaaaatgattgtaagcgatgtaacggtatatgttgcagacattttaatatgtctgcctttgtgagttatctgttccgcttcttatgtgttttgacttggatcatactggatttttttaccttcgaatcaatataacagtcttataattatacgtacactttcccaatgttatacaaccaataataataccaaaaaacacattacaaagatttggctcaattttgttccttattgaataacatatacatagctaattaatatcataaatactccttcgttgttgtttaacataaatatggcttcactaggggaacgagcgagctgcttaggtgcatggacattacttcgttggtcgaaccaacgagcttgccaccaatgaagacggctgggaccggctttgaacaccctagcctcataagagccttctctatctctcggcattcagggtccttatcaatctcgtggatcttagggttaacaccaagatcttggaagagaacttgaaccgcataggacaaacaacaggagctcttggtaaatataaccacccctttttcggacgacattctcataactttgtccattatcttgcataaggtgaagaagaagaagtatatggattgaaaggagtagctagagtctcaggctatttataacaggagggaagaataactgaataagaatccacatacagagatcacaagaagatcgttgaaaatgttcccaagtccgactttattatatatgagcaagatgattcgacgagaccgaaccttttcttcggcagcctttacccttttgattgtaaggaccaataatatgaatgatcattccatatattttctcttggatacaaagatgcggtctcaacgatcctcctacaagttgctaaaaagagagtgtattcgacgttgaatatagatagatagatgcttcatacttttggaccatttgatttattctgcagattccatgaatatcggacataaggaatcttggtgacccaaactatgcaacaagaaaatcaacttgcattcaacttttcatagctattccaacttggttgggtctcttaaaggcaaaagagctcacatatttttgtatccttaacaaatcttgccgtaatgttgtttcttttgttcagattatggttttaatgtttaatcaaagcttgtacaagtgtaacgtagtatacacataacgtaatcatgatcaaagaagggcaagaatcatatgagaccaaaaaaataatgacaagccaaggcaatgggaaaggaaaacaaattcagaaaactgaaatgaagatgaagaagagcagatgatggagaagagaatcagattgaccataacagtggatcgagcttgtcagtcgtttttcgtgccatatagatatgatgagaatcaaagaggggtatacaacgtgatgattttgaagggtatagttgtcattcttcttactgtagattctgattgaggggtaggtaatttgatttcgctgtagaaattgattggttttgggaaatattcaatccaaggatagtgtcgagcaaccatg

SEQ ID NO: 31291 - DNA, 3003 bp, Unknown
  misc_feature (1)..( 3003): 2750-1469P.txt file - cDNA_ID_3040670; gDNA_ID_1972023; Annot_ID_178130
tctttcctcaacgcttcgtttaaagctgtaacatcaaaaagcaaatattgaagaaatgcaccaaaatgcatacaaagaaattagcttcttttttttttgtgcttaccattacgaagctgagcttgttgttccattgcttgcaacctaagtttcagctctgtgttttcgtttgctagtccatttgtgtctctctggatcaatcaaaacaacattgaaatcaagatctgtctatgtatgtaaaacagaggaaagaactttcctattctgttgggatcaaacgaggaatcgccgaatatggaaacctggtagagagtaagctgagcagagagagtggtagcttcggtttgaagagattgaactttgcgctcaagttcttgaatgtatcgagcttttctctctttggatcgagctgcagattgtcgattcgctagaatcctgtaatcaaatccctaatttcattgcaattcttcaattctgtggaaagagaaacaaatttgaagaagaagaagaaggaccttttggcgcgtttgggatcgatgttccaaagctcagagagtttttcaggaggcatagctttcttagcgtccatgatatcaccggcatacatggcgcatccagcgtcaacggaattgctgtgacggtggcgaggacgagaggaaggaggaggaggaggattagcagcgccggaaacggagttggaggagagggaaggattttgaaagggattgggattagaggtgaggctatcgacatcgatgaaagaagagaagagatcgtcgtcggagggaaggtcgtcggaggaaggtggtgcggcggaggagaggggatccatgaacatgaacatggacatatcgtcggagcgagatcggcggtggaaggaagaagatggaatcggatcggcattaggaattggatcggaggaggggataatagtggcgccgggctttgggactggtggaggatctgatttctccatttttttaagagaatctgagagatgaatgctttggttgtgtgaataattatgattattattcgcaattgagaacaatgtcaatggagataatgatggagatgaagaagacgaagctctttctctctctctctctctctctctctctctatcaaatgaaatgaaatgaagagcgtaggagagaaactcgactctgtgaggagagagaagtgacgtcactaactataaaattgcgaaattgagttgatttattaataattaaaaagaaaactagttgatgaaaagtaaaaggcacattggcacgtgaaccatcgcagcatcttgtctccctcccttttttttttatttttttttcctttttctttgtattttatttaattattcgatttcatgatttaaatttgtttaactttaaatcttctttgtagcattcattacaagattctgtagttgcttcaacgaaatttattaatttaagctgttatggcattacatctccccacgtctgagtgtatatttttgtatctttgagtcaaaattttaacaagtaaaaaataggcagaaagccttgtatgaactgagagtctgagagaatgttttgtgggataataagttggtaacttggtatggaactatctatggattgggaaacaagtaaaattcacttatagtgaaaaatacttattggttggatctaaatcatacggaggccttaattatcaggcccatacaagaagacaagtattgttttgttttaagaaatcctcgagcatataatgcgcctgtagtggacaggaggatgttttgggccttctcttaaattggcaattgggcatcactttgtttaccggtcaaaataattaaaaagatggtcgtattgatcgctttaagtaataagttttttagttaagtctctctaaattgtcttaaacgcaagtagtggaccggcatcatttaatagtgattcaaattaaaaacctaatgatgcttacttttaccagctaaagtttcttttgtcttttttttttttgttttattattatttatcaacatacttgtgaattgtgattctccctttttttatatataaataatgaacatacttaagatatagtttctcccatttattgtcacctaacgggtattttttaaaaccaaattctgttggaaagttcttctctaaacataaataatatatagctcatgtctatgctttttaatagtgcccattgtatttcttttcttatttgagtaatttattccagctgtttcttttttttccctctcgtaatgatacgacatagtgacatacatcttctgtttcttctttttttgttcaagaaaatcataatgactacaggtaattaatcacacttctacaaatcagttgataatcagcaccattttccaataaaagtcgatactttggaaaatttcgtgacttttagtatcgtgggggccaaaatgcacataaagatacgatatcgatgaccaaattgccatatactatatgattccaatataccaatgattgctactatttgctaatggtatacgtttttaaattttaattaatacataaaaaaaaaatcaaggtgggataaaaaggtaactttattgacaatatttggaaattcatcgcacctggcaagagatttacctactgtcattaaaaaaggattaaaaaaacgacaaaaaggtcaaagacaggtcagacaaggaatcattaaacaaaggaagaaaaatagcaagtagaatggttttgacggaagaaggtggtgaagttatggcggcggcgcaacggaaacttatgatgacgctcttccgtcggtctcatccattacctgaaatagtcaaacttagaaaatgtcgtattatcactcttcaatgctcccacccaataccaactactttcctctttctttgtcttgtgtttcttacttggtcatggccttttccttctaaactctctctctctcgagatttcgttttttccttgggtctcctctgtttcctcctctctcgatatg

SEQ ID NO: 31292 - DNA, 3 bp, Unknown
  misc_feature (1)..( 3): 2750-1469P.txt file - cDNA_ID_3040678; gDNA_ID_1972023; Annot_ID_178121
gaa

SEQ ID NO: 31293 - DNA, 3000 bp, Unknown; identical to SEQ ID NO: 9235
  misc_feature (1)..( 3000): 2750-1469P.txt file - cDNA_ID_3040710; gDNA_ID_1972024; Annot_ID_178176

SEQ ID NO: 31294 - DNA, 3003 bp, Unknown
  misc_feature (1)..( 3003): 2750-1469P.txt file - cDNA_ID_3040720; gDNA_ID_1972024; Annot_ID_178168
cttatatatacaaaatatttgtgtgccaatgtgattaccattcaatttttttgctatgtgtgtaaatttgaacttatattagtctttttctactgtggttgtgtcaagttttgttcctttcggaccgttattcttggttcttttagacaattagttaaagcggttaatacattttaacctgattttgaatgaagagaaaggcagaaagataacttgctaaaaacataactaacagtacaactagatcagaaatacagtttccttttctgacggaccactattcttcattttatatatcacttctagagattatttctgacattttcaaaatcgtctgtgcttcattgacgacatgaaaaagggaaaggcctgcgattcgaccacttttgctccaccgttggggtctccaattattttgcgcctctcaaaaattgttgtaaatctatagtatccgcacaagatttgaggttaaaggttgctagctttttttttgagtcacggactcacggtggacaacattttaatctggtaatataatgtttctgcattaatcaacattttaatctaagatgtgaatgtgatatcatttggttgaaatgaaaaattcgttcttgggattatgatatttggatatactcggagtcgactataagtctatagttatcaatacctttcttcaggtacttacacatttgtacgtccgactctaaatactatagattttgctgaaaacataatttgatatagtatacacgtaaaatgaaacttatcagcttccgatatgtcttccgagaaagaagatctgatctagtgatctgacaactccgtttagtctcacttggccacaaaatgccaaataattaaatgaagcagtattgaaaaatcaggatcttatgtcgaaagctgacccaacaagcacacagtatccaaagaaaaagcctgtctaaagttacaaaaaggacttattattatcacatgtatgcaatttgcgtgtataagaatattaagaactggagtggagtgaccatgctaataatatctagtgcataggtaggggcacatgccatgcatggaccaacaccacaacaaacgaccatgagatatgaatggcacacatgtacattcccttccaaaaagaaaaagcataaggcccattaatcggcccaatattcttcgcctgcacaaaaaaaaaacctccagatcgaaaaaaaatcgagaagcgaatagcggaagaacagaaaaagggaaattctgagaatcaaatcggaaaggtagaagaatcgagtcggaaaaatggaaacgacgaagagtaacagcagcgagtccgatgtcaacgccaaatgggacgcttgtctcgatctcactgctcgtcgctttgtctactcttccctcggcggcgctttcgccggtcttctcttcttcagttcggtgttttccaatatcccccactttattcttatgattcaattccgttcacatagtgttgattactgattaggtttctgggtagagaaactgagaattcatgatcatttagggttttgagtgttgttccgatttgaatcatttaggatttattaggtttaaatggttttttgtgttttgacgattaattgttgcgttgtgtgccctagggagtccggttacgagatgggcgtcgattgcttttggtgctggaattggtattggttctgcatacacagattgttctcgtgtttttgatgcgtcttcttcaacttcagctactttattagcagctcccaagagtacggagacttctgtatctcaggttagtcggaatctagttttgtgggatcgttttgttcgtaacagttgaagttagaaaagatgctaatttaagagggtttcatagtagcttagagggaaatatgatttggaagaatggttacagatttgtgagaacatatgcatctttagtttttagctcttaatagttcaatattctgaccattgacatgtaagagttttgtcgctgttgatcttacgagcaaagaacaaatgcctgattgtattgtggcatagagtatcacgactggactacgtattggaaattaatgattagtaatcggatatcttacttcatcactatcatagttagcaagttactaggtgttttggtaggtgcaaacatgtttaatcttgttccaatgtgtatgcatttggtcgaaagcaaatccgttcatgtttctagtcatcgaagtccttacaaagtagaatcaaattagctgagtgtgtctgtttttatcttgttgattgattacaggcagcagaagagtgaagacaacgaggaagcttggaggtaaaaaaccaaacattgatagagttacattacgaaatggtaattgatcttgcaggacaaggcttttgagataacgccattgttaaaaaaaaacttttgcttctcagtgtggttttgtacactgatgtcaaaattgttaatgacccactcattttttttgttttgaaaaatcttatgttcttttacttgagaaataattcctccggtttgatttgtttgcctctactgttccttcattcatcaaataatctcctcacatatcgactaagttacaggttttaaggattaatgatatgtttttagctgctactaaattgactgatcgagtagttttaacaactcaatccatattttatctaatttataattttagtgttgttatttttttctgtttttgcggccttaaattaaaaatatacatataattaaacaaagccaccaacgcgttaacaggcatggttattcactcatcttgatgacctcaattagaagcctttgaacggctcagattgcatatttgtagccgcgtcttagcttaatctattgccacgtgtttccgataattattttcttaatacttaactgctacggaaaagtcataattaacactctatagagcttccgaagaacgacgctgcgacgagagagactaatagcagaggaggaagacgaagacgacaatg

SEQ ID NO: 31295 - DNA, 3003 bp, Unknown
  misc_feature (1)..( 3003): 2750-1469P.txt file - cDNA_ID_3040749; gDNA_ID_2684091; Annot_ID_189949
gattgttatgcattagtccccggcaacgagtttcttgaattttagttatacgtatatactgtgattatgtattatgtatatactatgatcaagtgtccaatgatccaactgtgtacaaagttttgtagtaaagttttaatttacacacagaatttgttagcataaaaatttatagatttgatcaaaactgatttattaaagatggttattaaagtagattaaagtggagttattgttataaacgatgagaaaaatgcattacttataaaaatagctaaatatagtcgacacactaaacttgattatcttagaaggtttatgctgatatcttttctatattatgtaagcttccccaaatatctctgtgagctgcatgtgaatgaactgtgtagagctagagaagcttcttatagaaggaatttgaccttcgaaaatggaaacccgaaaatatctcatgtgatctctgttttgggaatgaggtctactttaatctttctgatcgttctttgtcttttttacaattatcaacaacttttatttatctgctcgtttttcgtctgttcgttttttgttcttcttgcaataattggtattacaaattacgaaattaccacaatacgaattattgtttttttattcttcttcttttaaagtaagaaatccatatccctatacttatatttcgaaattacataaaaaaactaaccttgtattttataaaatattacttaggaataccattagaaatagaatttaaaggtccaaactaattcagttcattaaaataaacaagtcaaaactttatttatgcaatttaattataaaccaaaaagatgcatttatgggtttaacttgttgacagcttattttattcatgaatttacgttgaggttgttgcgatttctactttaagcaaacgggaaacatctcacagttttgacttgtgatcttttatcctactcttattggttctaaagtgcatacacgtaagcgtatacataagcactcgcatttcacagtagccaatcgattgattctaatctttgaacatgtaatacacttcatggccactctttttttccgggaactatcttttttttttgacatggaaaaagaccattttttgatttataacgtgcatactgctgtgtcttttttctaaataaatagtttttatcaaatatgtaatcatactagggaaaatctcatcaagatcatacgtatttttgtacatgacttttaaatagtatattcgccgaaaaatacgttgatgtctcggaatttgacgcctcaaaaacattagaatatacaaaatcaagtaacgagtttgtaggttgaaactaaaatgccacgtaatacagtgcgtagggtccattcgatgtttctagatcaaagtctacacactatagagacttccagatacagatacacattcgaaatcatcaatgaaaaataacaatttaagtatcttcttatcctaatgtgtgtgtgcttttttttagtcaactattttgtgtatattgtaagatgtatcatgttatgacatgagtatgttgctacgtgtcgtgagatatcgaacccaacgcagatatgagtatgttgagctagtttcttcttatgaaacaatcatatatgtctataatgaatagatcacattatctgcctgaaaaaaatcccgtatattactcgacgaaatataaatacccaatgtagctgattttgctttctctggtgacatatccaatttggctaaatttgttaactagtctattataggtttataatagatctagctatgttaaagatactaaagcatcagttacataaatttttggcgcgagtttatatcttttggaattaaaaataagagaatttaaaaataagaagatcattttgtttggccacaggagttctgaaaggtcaggtatgatttttttcttgctcgctcttatgattttgtttttattaatgggttttcaaataagaaaaactgtttttcgaagcccggttcagatccattgttttttgtaaaatataggcccaattcaccataagtccatgaccaaaacaaaaataagatagaaccaatactgaaccaggatcttctctcgctttcgtgatcaatgtcgccaagcttctcgagatcatgtggtcacgtcaattgtataaatacaattattgacgtaacacaatctctacagttccatcgaaatatctcgaaaatttccagttaattctggtaacgtgaacgtatcttccacctcttcaacctacacagctttctagaaatttggctcgcttttctaagtcctctgtatttttttgcacgtttttcaactaagtttcaatatgaatcatttcttctataaataaatgatattttcatcaggtaatgatacattgtgccgaaataaaacgtcaatactcattagtcaaattaattgttcacataatttaaaactgtgttaatccatccagttattttcttacaacaaaataatcttttccatcaacttttaaaataattaaacgcagtgctaagaaatctaaaatcttgatttagaaatccattatggtttctggtcaactgaaatccataatttcctttaacatccaaaatccaaatttgctactatgataatagatttcagacgattttttttcttttttcaatcatagagtccacacgaatatttgcaagttactatataaaacactataatggtcaacagataaaaaaaaggcgaatgaagatatgttacgtaaaaagaaaatactgtaattataaattattactttaaaaagctttaaaatctggccacatgtttttaaagagtggtgtgacgtaacgactagagtcagcacaatccattattgtatcataaatattctcatctataaattacctaaacccttacaggtagtgtcccaaccaaacaaatcgagaaagacgaacacttacaaaaaaaaatctctttgtgagctttagcgatcgtaacaatg

SEQ ID NO: 31296 - DNA, 3003 bp, Unknown
  misc_feature (1)..( 3003): 2750-1469P.txt file - cDNA_ID_3040772; gDNA_ID_2684091; Annot_ID_189964
ctatggagccaccgacatgtaaccgcgtttcaaaatgggacccactttccccgttttatcttaccttttttccttcaaagtatgttgttatttatatggagctgatccaataaattctattcagacattagaatgcaaaaacgaattgttattttggaatcttgaaataatcaccaatcatattttaaggacatatacctgtatctgtatgtgtgtgtttacaaataaatacgtacacactacgatggcataggatgcggctatgagagccgacgattgtgtaattaattaacttctgatttttttggctgattaattaagaaacctacttgtttattttgcatttatttagctaaaagtggttatatatatcggtgtaacccgtttgaataaactaccagttcagttttgaatgatgacatatatgacattttacgcaaaaataccacggtattattagttttgtttaagtttgaagttttataggttaactgtatgtttcgttatctcttcgtttgtttgttttgtgattaatcatacatttcccaaaacacaatatattataaatgctgaatggtaccttgtgtctgtttgcatattggaaatttctggagcaacctgatcccttctctatcaaagaatttaattgataattaatcgttggcgatagcacttttacaaacattttccctttacttgtcaaaaataattatcaagcagaaaaaaaggaaataatgaatcaatttcgagaatcattgaaacagatagtaacaatgttttggagttgttttgtttttaatttctcttcaaagtgaaggctaaggacaaacgctatgcggaatagttttctattgcgtatatatagtcgataataacaatataacatggctaattttgtgttacatcaatcatccaatcttcatatattgtggcttattctatattacattattacaataacatatattttacgtggcttttatgttcgtacgttgtttttatgtgatgatgctatgtcaaatcatccgtagtatcttttttatttgatgagtacaaacatataaaacaaaattgcaaatatttcaccaccctcttacactttatatatttaggtacatgcagatttataaatccactaaataaatatgcatgagctgtgaaacaaaacaactcagtgactcactcgacttatatcatacggaatataagaaaaaatcaaatgaaatttaccaaatttaccataaaatacagattttgaagatcaaataaaagtagaaaatcttatcgtgagtgggatatttaaaagtacaaaatttgcctcgtattgacacaattttaaccttatcgtggttggcgtgtacaagtgggcaactggtctcctaataatgcgtttggtaataaatgatcgtgattcttagaaatatctttttcgcaaaaacattagtctatggataagaagataaattaaccaaatcgatgagtgtaaaaaaaacaaaaccaaatcgaggacatttgtgaagaaactcgtcttattccaattaggggacgatcactcgttttcttgcgagaggaacttggcctaaaccgaccatttttttctcatggaatttgatcatgtgttttttgtcctcctttaaacagttcaaaatttgatgaataaactacaaagtcaacatttttacacattcagatctgcatccaaaacacccatattgtaccttctatattcatgattcttttggtcataatcatgatgttttgtttccactaaactttatgatgtttatataaattccattgacgctataaaacaagctcgatacatctaccttaaaaaagatcattaacttttctacataaaaaaaaaacagtccccgtaaaaaaaaatcatttactatcgacaaaataacctttaggaaatctcatgtttgacctaacacattttttcaaccggttcattaattctataaatgtcaaaatactattattgaacatcttctaatatttttggtcaactactactataaagcatcttctaatttttcagtcgaccaattagtgaacttaattaaaagaaataaatgtttgtttttatgcaccgccaagatttcatatatttttttatgggaagaagaaagagacagaaagagaggtaaaaaacattaaaaagtagaaagaaaacagagcgtgaagttaatacgattatagtactagtaattagcagtagatagtactaattagacatgtacccatgggaagcttctcttcgttctccccccttaaatacgcttaggcatctcaactaatttactctctttcttttgtttatataccaaagccaacggaagtgtttcttaattcattttttgtttgttttggtttaaataattcagtgtctcacgagctgtgtcgagattggatccatacaaaatctgcacgacgcctgcttcttcactctctcccactgttccagcttcaactctcttgatatacagagagagatagagataaagagagagagagtgagagtgatagctctcggagaaattgaagaagacacaatctgattagtattctccaatattccatcaactttttgctgagggaaatctccagatttataatcgtttgtatatatatatatacagagcagcgtagaaaagtacgatttttgcttcttttcctcactcttattcatcttcttgattttgattcgatttggtgtttattcgcttgattaatttaagggttgttggggttttttgtccaatttttctgggttttcgttcgatttcgatttccacgagtttaccaatttcgtctctcctcagaatttgtggatctgcttatgtaaaaattgagtctttttacttgttttgttcgaatttgtttacaaacgcgtgatctcgagtttcagagatctcaaagcttaaatttttataatctgatggacttgttttttatttacagggatcttagatttatagcagcaacaaaaaaatg

SEQ ID NO: 31297 - DNA, 3003 bp, Unknown
  misc_feature (1)..( 3003): 2750-1469P.txt file - cDNA_ID_3040782; gDNA_ID_2684091; Annot_ID_189961
atttaaagcaatgcatgctccctaacatggaaaccaaagcgaaagttctaagaattgatgattttgagagatacttataaagctataaacaaaagagtacagattcaaatagtaggattcaccttccatattagttctctcatctcaggcttcagaacccaaagcttggatagccaggctctcatttctcgttggcctacagagttccccattgaccatgggaaattgtaatgatctctttctttatcaagaaatgaagcgaggaaatcgatatcatatgaaaatccattcttccacatattatatctcttcgatactccattcacatcctcttcgcggttttcagtctctccacctccattcatccgtgtcctcttctctttcctggtaaggtctgaatagctcaaagtattatcttcttcatcgtgtgtttcttcttccaaatcttcagaattttcatcatcaagagcaagaagcccagcacggcaaactcctttgtgatggtaaccaggcgccatatccaagcacacgaacccaaagttttctttgttcacaaaattctgggtaacagccactgttggttcaagattaaggatacagtgccaccaaccacttggaacataaatcgtttcgccaggtagtagtgtgcactcaatcggtttgtcttcgtccgcaagaaggggataatagtctagccaccactgtacagggattgaaaacattaagagggatacagtaaagacgaatcaaaatggcagtgcttaaacagtttagcaatatacctgcagagatgagggtgtatcaatgctgacatcaccctcatcttcattgacatggactgtaacacctagaggcacttttccagggggatacaatgcccacctatttaaaacattatgacatcatcatcagaatgagaataatattgcaggaaaggaagaaaaattatttgtatttttgtccataaaggtgtctaccttttccgaccgcaaagcagggtgttccaggcgctggtaagagctgggtcaacatgccaagatgcaccagacctctccggaccaactataagccatctgtatggaggacgactttccttgtctaagatctcaaaccaatcttcttgaaacaaatggggcacactatagtctttcaataattctggagcagcttctccaaactacatgaaatgttgaatccttcaaatattctcaccacaaagtttcggtactactacaactctatcactgacgtgaatgaagtctaatataaatgacaaaactgtttctcgtaccttgtcatcgaaaacgtatagaggatcttcatcccgctgagttttcatatatgcgatgtaatccttgaacttcatggaaattttgttggggctcctctgagatattctaaacgggacttcaccatatttctctgagagttggtcgatagtccacgtattactggctggccaagaatcagcaaggccagaaagcaaaacctaaatcatagacaggaacaacatcacatatctgaaaatgttttaacagatcaaaatctcatgtactagcaaagattggaactttacaggtttcttggcgtcgtattccttagaaaactcatccaaggagatatttctcctacgttccacattcccattatcaaaagagaacccgtcaagagatgtattacacctatagaatcgtttatacaagtacaacgacatgaatcctgtaaaagcgcagagtaagtgagcaaaaaaaaaaaacgatcatatcataagagtatggaataaaccaagtatctaccatcaaaatgaaaacattttctgtatgcgtcattttcttgagtaactccttctctgtatatcagaaaaccaatcagtcattacaatttaaagataagcaaagcaaaagtcacatatctaaagacaatttgtatgtatcattgaacatggtaatttcaaagtacttacagatgcaatgttgtttttttccaagaacctttgtattcaagaggaccttttgctcttctgagacacaaactcatccacaatggttcttcattacatagaatatacatcacactgtacatcaaacatatacacataacagattaatcacaaacaatgcctcaacaaaatcctcatctgttcataataagaccaaaatcctgacttgctaagaattcgaattgatctagttagactctagttttgatcaattctttgatgttaattcgatcaataagttaatcttaggaagagaattatagaaaacctgctgacacaagcgaggtgagcaatatctcggggagcaaggtattcgagaagaacacagatggtctcatctggtagaacactgagactaccgagagcatctggtcggcgatctctttgtcctaacgtcgtcattggctataagcttcaatggaatttcgatttctctctctgcgatctgattgcttttttactacctggaattttgaaaactcaagctttttctccacgcggtggcgcgtgatgatccgagtcctcgtttcgtcaccgagtgcgcgtaaatgctttggcgcacgttgtacgcgttaacgatatcgaattaagttacggcgtcgtttcaacgatagaatctgataagaacctcgcgtttagcttacgcaaatcgtttctaaaaggataaaaagaggaaacgcaaaactcgggaacctcaataaataaaacgacgacgttctaaattatgggccttacgacgcagataactaaaacgacacgtagtctttcaattatgggccttaaggcggcaattttttttttttttttttgaaacgagccttatggcggctattatataatcacaaaccgacaagtattcttcctcctcatccaaaactataccaagaggttccaaagtatcactctctcttcttccactatcaattatgggacgatacactcaagttgagtgactcaacgttgcggaatccatcatcatcatcatcgtcatcgtcaaaaggatg

SEQ ID NO: 31298 - DNA, 3000 bp, Unknown; identical to SEQ ID NO: 14236
  misc_feature (1)..( 3000): 2750-1469P.txt file - cDNA_ID_3040786; gDNA_ID_2684091; Annot_ID_189960

SEQ ID NO: 31299 - DNA, 3003 bp, Unknown
  misc_feature (1)..( 3003): 2750-1469P.txt file - cDNA_ID_3040790; gDNA_ID_2684091; Annot_ID_189959
attggttgattagctataccaaacacttcactgttcctttggttgaattttatgctctgatgctttcattttaagttgaaacttcaaactctgacgagatcattaatttaaacctgtaaagtgtcaaatgactaacgagtgtctattgcttaaatagttcttttgaaatgtatttttatttttatataatcaaattgatgattgatttcagaccaggtaaagtaattggctttacgcagtccaataaactagtccgcttttaaaattaaaaattgataaacaatcaatctacgcaacaagataagagacaagagactttatgatcttcaaattgatgagaaaagaaagcaagtttcgattacacagacattgaaatcgataacaacaaagaaataagaaaagagaaaataaattaaaaagagataaaaagatgattgatggttcagacttgccacaaatatgatgaatgaataagcttttgaagatgagcgaaatggcaagagcgacctcttagatggattaagaaaaacatatggacgagaaagagaagaaattccaaaccctagaagaaaactagcagtttcactcaaaagatcactgctgttcctcggtcggttttggcgctgctgcttccttgatctcatccgcagcatcatcctaatataatccccaccgttacagaatttagtcaatggaatgcgaatcatccataacagaaacaaagaaagaacaaaggtgcggggattatatgaacaaacctgcatatcagatgtccagagagtgagattgtcacgaagaagctgcatgatcaaggtactgtctttgtatgactcttcaccaagagtgtccaactctgcaatcgcctcatcaaaggccttgacgatacataacaacaacaaaaccagtcaaatttatgtccaatgaggtcaagtgttaaaccaagtccaatcacattatcataattgaaagatgagtagattgaaatacctgtttggcgaggttacaggcacgatcaggagaattgaggatctcgtaatagaacacagagaagttcaatgcaagaccaagacgaattgggtgtgttggagcaagctctgcattagcaatatcctgcacagataattacacatagagactataagctcaaaacctagacaatctcaagatcttattcgagaatacacaaatccctaatttaagtctcattatactggaaatctaacaaaccaccatccacggatcacacactagactcaaataaactagatctgagattcggaatcaaacctgagcagatttgtaagcggcgagtgtatgttcggcggcgtctttcctctcttgaccagtcttaaactcagccaagtacctgtgataatctcccttcatcttaaggtaaaagaccttggaatcaccagaagcagcggcagggatgagtctagagtcaagcaacttaaggattccgtcgcagattccggagagttccgtctcgatcttagacctatattcacggatcgccgtgacgtggtcatcgttaccacggctctcttccttctgctcgatcgatgaaatgatacgccacgaggcacggcgagcaccaatcacattcttataagcgacggagagaagatttcgctcttctacggtgagttcatcgccatcaacggcggcggagactttctccataaactctaccatctcttcgtacctctccgcttgctccgcgagcttagccatgtatacgaactcttcacgcccagacgccattgttgtttctagagagaatcgatctaaggaagaagaatcaaagagggaaagatctgagatctgatcaaaaagagagaaacggtttcgattagagaatcgggtgttgtaggtcaagcgagagaggacgatgaatgagtttttgtgtttaatgagggaaagtgataaatgcgttttagaggaaaagagtgaaatttggaaccaagatctaatctgggccgttggatttgtggccggtcctgctttttaaagggggattttttttcacctcaaattaagaacaacataaatacacttttagaaaaattggtaatgtgattattggataaaatttggtcaattaacaaaataattggtaatgtgattttgctactattagtataggcaccttaaggaattataaaattttgggtctagtggttaaaataggggctagttttttgtagatttgttaatatagttatttactaattgtgaaaagaaattggagttgtgagattgatacaataatggaagcaagttgggttaacaaaaatggagacagctcagagggacacatgtgtgttgtgagcatgtcaggggatccaatggaccctttcttctccaactcagctttcacatttttgtgattgctcaaacggttttttttttcttctttcaaaatttaaatacttcggaggttgtctattcttcaaatcttcaaacattcaactaagtacgtaggcgattcttacgagctttttaaaatcattatgttcttaattatgtggttgtatttgtactgaagtaatttattaaaatactacaatatttgtttttcctttttccgttttgcttaatccaatgcttatccagttatcctaatccatgattatgttttttcctatcttactcctttttgttaatttgttttatttgcattagttttcttgatgattatgttttacattcaatgaaataataagattactctatacttttctagcataaatattaactatacaataacatgtattcattgaacgtatagtcatgatatatctaaagatcatacgttagaaaaaaccgtcatataaaaaaggcgaaaattcggatatgttcgaaaaagatttgtggttaatctagctatatagcgtacgcaagtagatcaaaagtttttgataagtattgagataactcctaattataattagtcatttagataatgatgatccttatctaattagctttcttatctctatg

SEQ ID NO: 31300 - DNA, 3003 bp, Unknown
  misc_feature (1)..( 3003): 2750-1469P.txt file - cDNA_ID_3040810; gDNA_ID_2684091; Annot_ID_189950
aaaatccaaatttgctactatgataatagatttcagacgattttttttcttttttcaatcatagagtccacacgaatatttgcaagttactatataaaacactataatggtcaacagataaaaaaaaggcgaatgaagatatgttacgtaaaaagaaaatactgtaattataaattattactttaaaaagctttaaaatctggccacatgtttttaaagagtggtgtgacgtaacgactagagtcagcacaatccattattgtatcataaatattctcatctataaattacctaaacccttacaggtagtgtcccaaccaaacaaatcgagaaagacgaacacttacaaaaaaaaatctctttgtgagctttagcgatcgtaacaatggcgaacgaggtgattcttcttgatttctggccgagtatgttcgggatgaggacaaggatcgcattgagggagaaaggtgttgaatttgagtacagagaagaagatctaaggaacaagagtcctttgcttctccagatgaatccgattcacaagaagattcctgttctcatccacaatggtaaaccggttaacgaatctatcatccaggttcagtacattgacgaggtctggtctcacaagaaccctattcttccttctgatccttacctgagagctcaagctaggttctgggctgatttcattgacaagaaggtatcttatttcctttgtgcccttgattgaataatgttgaaattgaacttgggatttcataaaaattgaaactttagttgagtttgctagtgattggctcaaatttagggttttgcttgtagactcgtctttgagcttgtatgggtttgtctgatgttataatattacttgagtttgtagttgttagggttagagatctcacctccaaatttcagatttttcttgtggactcatctctgagctagtcagggtttgtcttcttagatagtttaatgttatgttacttgtgcaatttgaggtttttacatactagtttcgctagtagatatcatctttgagctttgtttgggttcatcttagatagtttgatgatatgtttcttttgcaatttgggggtctctaggactggttttgctttgtagacatcatctttgagctttgtttgggttcgactgagttctgacatagcttggtgttatgttactctgtgcaatgtttcagctgtatgatgctcagaggaaggtgtgggcgacaaagggtgaggaacaagaggcagggaagaaggatttcattgagatactcaagactcttgaatctgagcttggagacaaaccttactttagtggcgatgactttggctatgtagacattgcgttgattggattctacacatggtttccagcatacgagaagtttgctaacttcagtatcgaatctgaggttccgaaactgattgcttgggttaagaagtgtttgcagagggagagcgtggctaagtccttgcctgatcctgagaaggttactgaattcgtctctgagctcaggaagaaatttgtacctgagtaaatatgtttctcttgtcatatggttcggacttaagatgctctctgttttactttcgtgtgttgtctttcttaaataatgcagagcatctgtgaggtggtttgagtgtagagaatgtatgtctttgctgtagcagattcctgtgttttctggatttaatggcttgtcctagtttttatgcattgtaactatgagtttaattaatgatcgttaatctataatgattattaatttgttactttgatatgtaattacgccaatacgactcttctacctgaccaagcttatcacgccaatgttgctgtaaaagacaatagtgcagtttggcgattaaaacctccaacatcgagaatggtaagccggtctggatctaataagcccaaattggcatccataagcccaaattgaaattggcatccataactccatattgtagtcaattggaagttatgtggttgatgtgatcattagtgtcggtatgatcagattagccacgggtttagtgtttcttgccgaatttgaattcggtagatcaaataacattactatgatccgcacagttcatgggatttgaatttgatttacgattacaacaacgatattaacacagaactatcctgtaatttttgggatcgattagtaaattttaaaatattatttcaaaggctttatatatataaagaatttagagtataaacatagataaagcattatgtatttataaatcttatgctgatattgaaaaaataatggtgtatgtgatatatttaatagagtgcaatactctctcaataaattagtatagctgttatcactccttgtgtaaatgcgtatttcttgtacatgcatggtaagtagcttgtcctcgtatgtaccggattgtaatgtttgatatcaaatcaagggaatcacgtggtaaatgtacacccacctaactgagagataataatacaaacaactgtgagtaggtggccacgccaaaagtagagactgatgcagcaactaagcaaagtattacttcactcgatcaactttttattttgttaccttcttataaatcaagtcgatttctatattgtcaagtactaattccattctaatctcttacatatacgtttaaggtttgaatcagagcaaaagataatcacactcttttatattaagtgatgttttcactagttgcacacatatgacaattatttaacaaagttgcaaaatacattttaaatcgttacgggtaaaagcttactgtttaaaagatttatatatggaccataatatgctttgaaaaaagctgatgtgacgtaacgggaatcaaaatcctttccacatcattttcttcccctataaaacaaccgtcactcactccttctctactataacacacactcgcttgttcacgcacaacaaaaagcaagaatatataccactttgtgaacttcagagatcctatagcaatg

SEQ ID NO: 31301 - DNA, 3000 bp, Unknown
  misc_feature (1)..( 3000): 2750-1469P.txt file - cDNA_ID_3040823; gDNA_ID_2684091; Annot_ID_189945
ttgagagaatgatagtatcgtattgtgttccatcgtattatataccagtgcgatctctagacacttctataagaaacctacatcagtggctgaaattttgggttgaaatttaatggtttcgtcaatcatacagattgatttatttctgaattaatgtgtttctataagagtaccaattgatttgtttctgactgctgatatgattctaaattataacggtatattttaaaaattccttaaatatgagcagaataatagtatataaggtaaactgttccaatcttgtcgaacaatttgtggatcaaaattatcaataaattgcttctgtacggatcgatcagtgttttcgcagtaatttaggtttcgaattacaacaaccaaattggatcggttaccaaaaacaagttgtacataccatagatagcatggaaaatatcacacccgtattaaatatttgaattaaaaccactaaaaagttgtttataagtgtatagttgtgttagggcttggataatttatgtgggcaatttgggtctgaataactttttagattagcccatgtagcataacacccacccaacagaacacgccaccaaacacccatattttatttgggaaatatgggcttcacttttgtaacaaacccaataacttgtgctacatgggctgggctaatctcaagacacaactctacacgatgtaacaagctaaactcatagtttcgaatctgattggaatttaattttgtaaagtaaaatattacggattgtttaaaaaaaagaaattgatcttcggtgaatttttatctgctataaaaacagaacaatagttaattacttacttatattcattcaaagttaaattccaaaatgctgaaactcaaatggacataacttaccccagtcgaaatagttaactatatattaccggcggtaaaagctgagataaaataactaatctgttcaaactttgtatatacttaatttcaaaggcgatcaaataaaaaacagtcaggttcctgagtcaagatttgtagtcaaaaccttactctgatccgttatagccaaacttgactttccctttgtatgttcatcagtctattaatattgatatcaaaactgtacgtacaataacgtactgcaccaaattttatcaacaaacaaaaaatagactatacataattacgtatcaacttctaaaagttgtagtgtagtgataaatgataacggattgatttgtatttaccttaaggcttaaactgatccatatataattttattcttcatatgaaaattttggtaaagccaatataatttttgtgtggttggtaacaactgaaaataattagggctatcgcaaaagtacaaccgtacaatgaactaatttgcaatttctgagaagaattttgttagtgaaagtctgagtcaacaaaacaaaaattcagggaattgaatgaatgattgggtccctttatgaaactccccatgaaacatcgtatgtaactatcagtgacttcttgtgcatcatgctgaacttctaatctcttttttttttttttttttctaatctcttttaaatagtaaaatctacaaaaatatgatccattactcatttatatcaatatttaaaataaaataaaatctatatatcaatataattcaagatgcaaacatttaaaatttaccttacaatgatgtgagtatatgttacctcctattttttatgttttaaaccgtataaaattttcatatgctgttggctgtggaaaaagggaaaacatggttattaactaaaagccccatttgggatgttttgattagaaatttttatcttgaaaaaataaactaaagccattagtgttttctttgtcgatggaaaaaaaagacatcaccttttgaagaaaaaaatgacatcaccttactattttctagaagcataatcaaagacgattatattttgtcataacgaaatagtgtggggggacgtgcaaaattctactcacgtgtaaatacttggtaagttttcagtagttttttcttaggctgtttcacgtgatgtaacaggatttcatcaaagaaggcgtgctttgacccaatctaatgaaaatacactatgatttttggtaattttaatacttttgatggtgatagtgatatataaattttaatgtttggtccttcaaggctgctagattttattaacggtcaacatgtcttaatgatcaaaggtcctatctatgcacaaagccatgtgcttttcgattgatctcagtaaatgttgaatgattgttgctttgtataacaaatagttaccttgtttaatattctcaacaataggttataaaaataattatatgtagttaatctttgattttaaataattactattaagttattttcttgcagtttcaaaattgttttaagtttaccgttgctgttaaattctaaagaatatacagaatgcagtaattgtttcatcaacagatgtataaaaagtctttaattagtcaaaaaaattcttcattcataaaattcattggtaagcatttctagactagagccgtaaatattttcggccaatataataattaggaaaatatttattaggaattcaacgaatatgataaaaaacgttggtcgtcgaaaatgtatcatgacgtcaggaagaaaaaaaacaagaaaaaaataggtcgtcacatatgttttcatgtaggacaagattacgattataaaatcgtttcaaaaagaatacgaaaaaatttacttgaatgagtcacttcagtaccccacagagattatatctttctctctttaatctctctataaatacctaagtatgcaactatgcatataaatctacaaaacatctgaacacccaaagacacaggaagagagctaaagctgatatatactaagtactaagatcatttgatcaacctaatcatcaacaccacaaaattttcttttcttgtttctctaatcgattaatttagtaataatg

SEQ ID NO: 31302 - DNA, 3000 bp, Unknown; identical to SEQ ID NO: 14241
  misc_feature (1)..( 3000): 2750-1469P.txt file - cDNA_ID_3040831; gDNA_ID_2684091; Annot_ID_189943

SEQ ID NO: 31303 - DNA, 3003 bp, Unknown
  misc_feature (1)..( 3003): 2750-1469P.txt file - cDNA_ID_3040833; gDNA_ID_2684091; Annot_ID_189942
aatcattggttgtagacttgtagtgtcttttttttttttttgttataggttcgttgtagtctctgtacaattatactaacagaaaaaaaaaatatatataagaacagaaagtacacaactgtaaaagaaaagcattaaatatcatatacttttaaaccaatgagggaactccagtgtcatttttggcccgacatcactcacataattgaaggaaccagacacccaaataagtcgaaacaacttgaaaccaccctttgatattatccttacatttttttgtcttcccccgaataaattattttgtgggatattttatcgattcaccacctgaatataaagattggattgtaatctcttcttatcaccaccttgacaaattataaagcaataatctactttggtctttataaaagaagaaagaattttggtaatcttataaccacattgtttcttagacaaagcaatataagtcactttggtaattggtattaatcgtatagtccttctttctaattaatcgtcaaatgtatatttctcgacataaactaacctacattatagtttttttgggctatattctgatatagtattacctactacaattatatggggtttaagttaaaccgtttaaccaaccaaaaaaaatatttatatgatttttttggcccgtacatgtcggttcttgtttctcaggctgtccctctatggctatccaatcgcttacgtccgtccaaagaagattttattcatatcgaataataaatgtttagttgttattatatataacattattattttgggtaaagaatctaacattatagttcacatcaatctttaaaaaggaacctacatgcgaaactattgtgttctttcaaatatatttctctcatcgaattgcctcctacgtggcttctcatgtaccaccacccctcaaggctcaacatatattataacaagaaactttattcgaggataatgtctgtgtatgttctaaatagtgaatatagttaagtattaataatgtatctcaattattatctatttatgaaaattgaaatgctgacaccactgtattagactgttattctgttagttaataaggctaaagttaattgacataatgtgtatgtttacctctctagatttacaaaaaaaaaaaaaaaaaaaaaatgtttacctctcaacagaactaatcagttatcgctactgtaaactaagaaaacgatttaattattatcaagattttaaaattttatcaaatattccttacaaattatttttttgttttgggatatcattttccttctcccatatttttgggacatctatttgataaattcttgaatacaaactgaaattaacacagttgtgttgtggtatagatacgaactgattttagtcggcaatattagttaagaatatttaaccagaacatgaaaagaaaaagaaatcatttaatcctttgaaaaatatttaatgcggtattcaggtgagtatcatatttatcaacaattatttttatagcatgaaagtatttccgaaaaaggagtaacgggcatataaccaacgtggaacaataacggtctcaagaatgcaaaacccacaaagatattattaattgctgattctttgacagtgacagctgcctccgcaactttcttagtgaacgtgtcgattttgttatatgaccccatatgttaataatatgaataagagtcaagtattttgcctataaaaaaaataagtgtcaagtatagaatctttaatttccacacaaaaaagagtatggtctaaagttgatgaacaatgaagtatcgatccatttttctgtaaaactatttgtagcagatttagcaattatattccactaaaaatgaatcttgatattgtttggaatcttaagtttttaaatgtgagagcaccccaacagtaaagaacataatccaaactgtatgtttggataactatatcatttatgatataatgcattgtatctttgatataatatttaagtaatctgtcttaagaaaactatatatggaccacaaatttatttttatgtggttattcataaacactttcttatatataaccgtgaaatatcgcatatttgttccatggtctgtccaaggttgagtctagtttttgataatggcacctaaaatttgaattcggatcaaaatatcatccttctaattaagtggtccgaatttaggtatttatataaacactttataaatcaacacatcggagatatatacaagtatagtatgtatgtggtaataaagagaaacactaggatcctttcgaaaagccataccatacccctttcgaaatttcaagttcattctgcgaacatttaaggacataaagaacgaattagattcatcggaccggttgacgaggtcatggttggtcgccgggtcatgactcatgagttgttataatcaccgaaagtaggtgatgaatacatagaggaggcaaatcagcaataataataaaaaaaaggatacttataaattatgagggaaaactagtacgcaactagtgattatgttgtcagccaacaaactcccataaaatatcaaattcctatcgctctcaaatattgtatgttttatctcgataattcttctttaaatttgacttctgtactttaaccccaaaaaccaaacattgacgtccatgataattaaaacaaaaacaaaaaactgttgacaaaccattttaaacgatttttttactatttagcaaataactaatcacaatggaggctttcgcaaatatcgtcccgatatattcaattttattgatatagatacataaaagagaaaaaaataagtgattagctttagttttgaacagttttgatcgtacgtcgttgtaagatctttatcatctcatctgctatatatacactcctccgagtacataacccaatgtctcagccttcaaagctatcaaaatcaaaaaaattctatcaaacaaggaaatatatcaatg

SEQ ID NO: 31304 - DNA, 3003 bp, Unknown; identical to SEQ ID NO: 31303
  misc_feature (1)..( 3003): 2750-1469P.txt file - cDNA_ID_3040833; gDNA_ID_1620813; Annot_ID_169157

SEQ ID NO: 31305 - DNA, 3003 bp, Unknown
  misc_feature (1)..( 3003): 2750-1469P.txt file - cDNA_ID_3040859; gDNA_ID_1972029; Annot_ID_178223
gctcacagacttgactctattacagatatagtagtaaccattcattctcactaaaaccctattcctgccgtcagattgaaaatgcaaaaaatccaattcaagatttgactctcaaaatctcaagccaagaaaccaatctgcacaaggtaatgccaagtgaactttctgattatgttttttctcattgattgagattgatcctttcctccaaaagaatcaatgctagaaaaattgcagtttcaacgagacccattgttgattgtgtgcgatatgtttaactttctggatataaccaattttcatatttttgctggatatgattgcaggatgcagctgcagaaaacaaggagaaggcaaagctaaaaatgagactcaggggtatgcaagcacgcttagatgcaatcagtctacggtacaagcagtctgtgcaagaatcagaacttatgaacaggaagttcaaagaggcatctgctaagctaaaggagaagttagcatcaaaagcactcgaagttctcgacctcaagaagcaactctctgcttcttcaagaacaatgtgatgagcttacatcacaactcttaagtagttgattcacggctagtaaatgtcttaaagctgtaaactgttaaatgattaacgtcataatcacagagaactgatgtgattatggaagagtccaatacatatataaattatgataggtagattaacaaattacatggagtttatgctaaagtaattaagaggagaaactaagggcattttggtccaccgctcttggtcttccagttgttatagcaaggacatacttgcttattgccataagtacctgggggcacacacaagcacttgttacaacatttgttgcagaagaacaaacacggcttcttgtattgtgtattcgagcatctatctccacaccttggcccgcactctaataaaggtggaatagcggatttagtttcgcattcagcacaaacattaattaaaaactaggctagtcagtgggtttaccttggggttgaagactgccttgagtagtaccgtactgccaaaatcaacaagaagatgcaaaggatgttaaaaaggttttgtagattcgatgaaactctttttttgagtagtgatgaaccgagaaactcacttgagagttattgtgatgcggcagttgtggttgcgactgtggtggttgtggttgtcgagcaggagattccaagtatataggctgtgttttattcagggacgtataagataaagttgataaatgtgaacatagaggaatagagtgttgaaacacttacatgcatatgggcagacagaagaagatgtaacacaacaatggagaaaacaatgatgctaagttttgttgccattttctgaaaacagaaatgattgtaatgaagctcaggtagattatatattttgcagactaagctcattatgaacaaatgataggggtccactatatatagtccaatttccaaatactttttaatctagaaaatatatttctcctgtcactgatttttttgcaaactagaagagtagaagccattaataaaattattgtctaaatatactcttgtttttttataaaacttttcaacggtctaacgataatgaaattcatggattgaacaaccaatcactaatcatatgtaaaaactaaaaactaattttaaaatacttaattactgattaaacaccagaattatgtaagatatactacatttcccctaaaaaatatctgaagttgtgattttgtttatgcatggaatttgtataacaaaaagtttagtaagtacaaatatagacttcatgttcccaatcttggacaagtgaagcagagagccaaagatgtgataacgaacgaaacgaagaatagcacatgtgtgtttctactgctttctaaccctatctctttctcgtgactccacttttttcccttatactatttgttttaaatcttgtgatttgtttctaaacgttcttggagacgaattttgtaagaaaaagacacgtggtgagaaattttgggattcgaagtagatttctctgtaggcttccccgtgacctaattgtgattacctgccaagccattttgcatgttcagaattgttttgtttggtttaaaatgttcagaaagttcttgtgtctcacattgctgggcctcttcccttttctttgtcttgggcctttaactttttcttctttatttctgtatccatattttgtgttgggcttaggcccaagttgtttgtatcatcataaaaccaaaagtcattaacatgaaaactttttgacaaaatacattttacatctgatatgcaaaaattaagatttggatttttgttaactactttgatattattaactgtttgagacaaggaaaaaaaaacaaatatttattatttaattgaaaggctttaatttagttaaggatgaggaagatgaagatgatgatgattcgaaaatgaaggtggtggatactgcaaatggctgctgagtgctgagacactctcgaaccccacaaaccctaaggatctcctccgaagatttccactattactggaagtgatatagatacgttgcaacaaagaagaccacacaaaaacgttattgagcagccgtgaaatcgatttaccaattgaagcttccccccatggttggtctctatccgtctcttattctacttttcgggttcagctgttattgattgaaagatttaaactttataggtatttgtgttcatcaattgattctgtttgcttgcttcgaaaattggttgtggctgaacatatatatcagtgttcctttctctttatttgatttctatctatatagtttctccaatcttagcatccacattgttgtcactttgagagtactatggaagcttaaagtagacaactttattgaggttgaaaaatgcatgaatggaaagagagaacggacttaacaacttatcaagtatattttggttgcagatttgactttccctgatg

SEQ ID NO: 31306 - DNA, 3003 bp, Unknown
  misc_feature (1)..( 3003): 2750-1469P.txt file - cDNA_ID_3040866; gDNA_ID_1972029; Annot_ID_178217
atggatattctgctgaaactcgatttagacgctactagaaggttctttgatgcattctttgatctgcaacctcattactggcacggattcttgtcttccaggctgtttctcccggaactgttggtcttcgggttgtcgctcttctcacacgcttccaatacctcaagattggagatcatgacaaaggggactgttcctcttgctaagatgatcaacaatttggtacaagatagagactaaggaccagaaacttagacatataagtacatctgttctttggttcttgaccagtagtatatccgcattgcaagtcgttggataattgtgtataaaccacagatcataacctgaatccttgtgaaatcaaattgttactactagttcattaaaattaatactttgtgctgcattgtgtttcaccaactcttgtaaatccaaaactagaggcaaaatgtaataagataaaagagtggattttgaacacaaaagcaaatctttcaaactccttccgctccttaatatttgatgctttcgtgaaagtcttatatttcatcttcctcgaaagggtctctttccggataatcaccaacctgcaagccaacatcaagttcatgagtagcagaaaatggttttctaatcacttaaactaggttaactactaagaacccaatccatactaggtccaaaccatgtccagaaagtcaaactcgcccaaacgttagcttgagagtgataacacccttaggcattagctagttctatagctaacccatattcgactccagactcctaatatcaaacttggaaaggtaaaacccgcattgacatctatttgagaaacagcaaatactactatacgatggatgatgtagaatgactaaccagttctatgaaatgtaataaatcatttcacaagcaaaatgaattaggcaacggagaagctaaggccttaaagaaaaaaaatacctttactttgtcaggcctgaccataccaccttgaagccgagggcactcaaagaatcttgttcctttcaccctgcaaatgtaagccagtattaaatatgtgggatctgacaaccgaacttccacaaattgtacttatgatatgaagtatgaacatcatgatgttaagaaaaagtctatacaagattaagacgcttaaagtgatactagcacaaggttctagaagcaagaaaggactgttacttcaatttgtgatagagtttaacgttaatgaatacaaaatagcatcaagatgaaagaattaacatacatgccatcatgttttccaaggggctcatcatactgaattccaacccaatagccaggacccaacgactctgctcgtccaacatatttgaccattcctcttttctccccaggctcaacttggcatctatctcccaccttaacattggaatggttaaataaattagaagcataacgagttgagaaagagcagaatcagagaggtcaggtctcacaaagttaacaaaaaaccatgatatttgcacagagatcttccatatacaaaaagaatgtttctgactaaccttgatatttgcgcagagatcttccatatagttctctttcgtctgttgaaaggataaaattggaagaagaaacataagaacatttgtattcttgaaagacttagtcttaccccaaatacttctccgcagtgactaagctaaaaacttcagtttcgctgaaagtttaacaagaagcaacatacaagtttggcttatattgatatatccgtttgtcataccttagcctcagcagcaaccggattttgagaaactctcttttctttgaatttcctaaaactgtctggaatttgaacacaagaacatacaaccatcaaacgaatccaacatatattcaaagtcacttgatagaaaaacttgtctcctttgagacaccgattacaggtagtagagaatttaccagttcgtttagcataatcctcctctgagatgttatacttctcaaccagtgacgtatcttcaagccagcctccagttgtgaccgaggaggggtcaagatctatgatgtgtaaccgaaacctattgaaagcagcagaaaagaacaatcagatgaaatgataaaacaagaagccatgtcatgtaattgaatgccatctatcaagattacagtgaacagagatctatttagtcaaactggctccaagttctctaaattagccaaccttttgcaatctctacaagctatgaagaaaaacagaagttacccatcaaaaggagagaagaaaccaagaggtctagaatcatcactgagaactgcaacctttgagccagagtcatcatagagctctaaagccatggaattaacagatgtaccacatttcttccatagcttttctttcacagcttctacactcatctacagaacaaaattcaaacaaaaaagcctttatagatagcactacattgaaaaacagttggaatcagtactgaatgtaaaacgagactcacttgcggagagaaacgagcgtccgcagagaagcttttaaggttggcgtgagtaatgtgtagatgtacagagtcatctccttccaactgtaaacgcgaagttgccattttttcacctctagacctgacaaaaaagctctgttaaatcacttatctcaatgaaatcaaaaaaaaattcgactttctcgaattgggtaacaaaagacgcttaccttcttagctatttctgggcaaagagtttgacttgtcagcagaaatcgaatcgaatctcgccggatcggagacgcaccgctgagaatgtagctgagaaacgagagagacgattaataaaacgacgtagttttctctagtgttcaaaaggtcattagactcgttagatttaggcacgtgtatagtcgcacgttaaacactgtgtactcacccgcaggttagtataaatcctctaatccctggtctaaacaaaaaggacacgagagaatccgtgaggaggaggaatattccggtgatg

SEQ ID NO: 31307 - DNA, 3003 bp, Unknown
  misc_feature (1)..( 3003): 2750-1469P.txt file - cDNA_ID_3040869; gDNA_ID_1972029; Annot_ID_178212
caaatccttgaatgcgtacaaggtgcgacattgaaatacctgctcatactgtcacatcttcacctacacacacatgcactcaaacactcaaacatgtgttttatcccttgagaagcattttctgatatctgtgattagcgtattctttgattgagtatgtgtctcctacagtatgtctagttactaacttcaaccaaatgaccatggattttccttgctgactctttctttttaggctgctctggctgccaagagggctagggagttggtaagatcaaaaagcgttttgaagtcatcctcacttcctgggaaacttgcagattgctcatctacagatcctgcagaatctggtatgcattaaccaatatgaaagtgccttgtaagctgtgaaagttagtcagtttattgacatctatctcctatgctaccagagattttcattgtcgaaggagattcggctggtggcagcgcgaaacagggtcgtgacaggcgtttccaggtaaaaaaaatcattctgctcagcgtgtcactaacaggctctgcttctattttgttagtctgtaacactgtatttcgatctatgcaggcaattcttcctttgagaggcaaaattttgaatattgagagaaaggatgaagcagcaatgtataagaacgaagaaattcaaaatcttattcttggccttggtcttggagttaaggtaatatatcctttttcatatcctgctgtttgttggtatgttcggaaaactcagtttgacataaaacttatttcagggagaagattttaacaaggagaatctgcgttaccataaaattatcatcttaacagatgcagatgttgatggtgcacatatccggacacttctgttgacctttttcttcagatatcaggtactagtttagtttgataaaacattagttgaagtagccttgattgctgattgagttatgtgaaatttaatgaaatttactttctacagagagccttgtttgacgcgggttgcatatacgttggtgttccacctcttttcaaggtaagctcttagtatctataatcttatgcttcagattgaacggaatttttttctaaagctagtctctctgtgaaaacgatcaggttgagagggggaaacaggcgcactactgctacgatgatgcagctcttaaaaaaatcactgcttcgttccctggaaacgcatcctacaacattcagaggttcaaaggtaaaacatcctacttctcacatcatgaatgtgttcttttggaaaggataaataactatgaaaagtaatgtatagtagttgttatgtgttagctattaagatactcttgagtgtgtgcataacgaaatctagattagtctcaactattggattctatgtaatgtttcttgcttttgcatctgcaggtttgggtgagatgatgcctgcgcagctatgggaaacaacgatgaatccagatacaaggatattgaagcaactagttgttgacgacgcagcagaaacgaatatggtcttctcatctctgatgggtgctcgggtaagccaatgaattgccagactcggactcatgataatagtcaataaactggcataactcatcgtgacaatgttatgttctgtgtatgtttcaggtcgatgtcaggaaggaactcatcaaaagtgctgcgactaggatgaatctggagaatctcgacatataacacagcttatagttattgcttcagctatatacaaacaacaaagaaacgactctggtgaaatgcaaagggagacatcatcatttcaaggttaaatcatatagtcacaggccaacaggattttgttcttcttctggcctataaaggacaaaattcattgttaggattatctctttcaatgtcaaaatttagcaattcacaaggctctttgttgggcgtttctttccattggaactagaatttttctagagacaagagaaatttgcattcactaggtatttactatatattatgacttcaacaatttggcattcctgaaaatcatgcatgcgacgaagttaaaactaatgattagaaggaagatgagaaggtaactattgtgcaatgaatatcttctctgcctgttgtattgattttaattgtattcgaggttaagttttgactgatgttttactagcgatcgcagagtgatcgataattaacaagtttatttttcgatttggtaggtatatagtgaattaaacatgatttttgttcttcctgaacaacctaaagcagtgttatgaacgcatcacgcatgtaacaaccagtcaaccatattagtgtgactttaattcattgaataaatgaaatttttttattttcaacaaggcttgtaacggttgataaatctactcagaaaacttctttttgtttgtcttgcaaatacaaacgatacgtttcaactctttttttggcgtccaataatacttcttaaaaaataatttgtttattgtcatgagctacacgtgggaagacaagtcctatccattattactacacactactccaacatttgcccacattttgaaaaaaacatttttttgtaattcaattattcgacacaaccaatcccatctcttgtttcacttccgccctccatctttcttcgtgattgagagaatcttcaacgaaagaaagcaactttttttgggtgaaattcacagaacaaccaaggtttttcttcttcttcttcttctccagttcctacaggtttactcttactcatcttcatctttgtctcgttcttgctcttcaatttctggtctttttgttgttcttgtcttctcgccaaatatactaagatctaagttttatatcattgtaattatcaccaacgaactgttaagaccaaatttgattactcgaaatggttttgggtttagggtatgaagaactgatcaaaagattcaattttttatgaagtcaactttcatctgcaaattgagcaatctcagatttcgattgtgtttcagaatcatg

SEQ ID NO: 31308 - DNA, 3003 bp, Unknown
  misc_feature (1)..( 3003): 2750-1469P.txt file - cDNA_ID_3040874; gDNA_ID_1972029; Annot_ID_178210
ctatatgaattgcattggttttaattttgttccaagctttttgtttgacaacagttttgatacttcggaaaagagaagtaaataaatataaacataggaagggaggagctacatgtctactatttttattttataagccaatcagagcgtttcatgtcataccccactctcacctctcgggcaatttcacacccactctcaccaatcgcgtgatgagcgcgtgtatacgttttctgtgggttctaacccaccaaatggcttgttttgaaacacactcgctcctttaaaaaaaagcctcgagtgcgtgatttcagtgtctttctcctttaattccaattcaaacccaaccgaaatcaattgaatttttcaaaaccatgtaaaccgaaccgaaattaaaacacaaacgacaaactagcaattgtcacttccactattgatccaactccgacgaaccagattgataattttgattcgattccacacagataacatatagtccaaaccaaacgcaattcataagagagccaaattattacgctatgttcgaagcttttttaacttgccacaaatcaattcacaaaataagaaattgtgctcagaaattttcagaagaattctcgatcataactttatgcggtggtggtggctgtgaatagccaacggagattgctccatgagaaattgaaccggcatcgccgccggtttcattgtccacatagtaactccgattgctgtgcgagtttatctcagtctcccttattgcggtaatggtgaaaccagtccacatatattttaatcaatggattattgggctttttatattaggcccattaaattcatccggcttttaaataaaatgagttttgtgatagtccgagaccattgcattcctcagtgaatacaacaacattatctgtcttactaaatgtaaatgaccatatcaacaaaaaaaaatcgacttgtttgtcaataaataaaaattcctcgatttccatattcatataaaagaaatagataccaaattgttggcaaaaacaagcaaataatacatatttgtggggagagaaacaaaaaaaaaagctacactttaatagaaagctaataacatattgttgacttatgataacttgtaacgtgacttcacacgcgtagtagtattacttaaaacttaggtcacgtgaactggatacttatgaaccgagtcaccccacgggttacccaccaatgactcgttagccggaatcgttctcaatgctctccacacaatactattacatttaaaacccgacccaaacgccaactgccaaaccctatctcctcgtttgacccgacatttagcctccacgtaagccagctcgtaccacagcgacgagcttgaagtgtttccaaagcggtgcaaagtcatccgagacggctcaagatcaaactcactaagtccaagacctttttcaaccgcgtcaagtaacgctctaccaccagcgtgaatacagaaatgcttgaaacatagtttaaaatccggaacatatggactaacctttaaccggaaaagcttactctttaccaaaaagaggataaaccggagtttttcagataaaggcaaaacaagcggaccaagtgctgttagattcgtctttaacgtgtcaccagcaacaaccgttagttctttagagagtgcgactccaacgatacctttactatcttctttttgttcagcacaagtgtagtgtttatcgctagagcctttgtgagtccttacaatatgagtcaattcgtacttagaccggactcggtcttgactccggtttgagagcataaccgcagcgccacctactcggaatagacagttagggactaacattgaccggtcgttgcctcgatacatgcttagagtcatgttctccgtactaacaataactgcgtaggtattagggtttgcctttagtagatttgtggcgaggtccacggagattcctaaagaaagttcaagaagctatgaagagtggtaaactctaaaaggaaagatagaaactggggagttggctgataaagatggacagtaacgattgcgtaatataaatttatcggcctcgtcaagccccggcgctgcatcccataccggagagattgtaagttttgacgtcggttttaagcttgtaccggtttacgatcatggacgagagagatgggttagggttaaacaagctgcagtttacgatgaagattccgacttctctcggttcgattccggttttcttaaatagtgagttaagagctccgaagatgactaattcggattcatgtctcgcctcgtacattgatggagttggtggagaggttaacatgcaacgtggggagtacgtatcgtctcctaaaccggaccggtttagtatcctcgtcatgaattggattgtttcttcggtgtagagttgagcgcctttggccatgttgaagaacgtttcggatgagattttgcaagaatccgtgggttggtgacatgagaaatccactaggtaaaccggtttagaccgggtggttgagtaggcatagaagaagatggatatcaggagtaaaccgatcttgaccggaaaaggagagaagaagtcatggtgaaagtgaagtagatcaagttcaaagagagatagaaggatgagtataagcaaaagaagcttgaaatctgccattgcaatgaacatatgagaaaatattgggcattgggtgggttttaatttataagcaacgtaccttaccaatatttatgatatgaatagagatggcgttaagcgcgtttgtgccgcggaaaatgtggtctgcgttttaaggttcacctattcaaacaaaattcagagacatcgaaaatgaaaaatccttaatggttttttttgggctgcaaatcataatcggaatttatttaattgaagtacaagaactttgggccgggtgggtttgagtaacccggcccgacatgagtacccgtaaaacttgtttgaagcagaagaaaacatg

SEQ ID NO: 31309 - DNA, 3000 bp, Unknown
  misc_feature (1)..( 3000): 2750-1469P.txt file - cDNA_ID_3040882; gDNA_ID_1972029; Annot_ID_178203
cagaggggtaagggaaacagaggagctgaggagcaaagacaaagcaacttgagataagagagaagataagaagatagataagcttaggcttcgatctcttagcgcaattcccacaagaagttttaacccggaagacataaggaaatagcttcttagattcgtctactttgatctgtgctacttttttcagattctgcctcatcctttacttgttattcaagtcatataaatgaagaacatagagagagagacgtatgcagaggaacttttttcctttgtgaacagaatttgtcaatctatctccttggagacgtaagggagagaagtagctagagaggaaagagagtagagagatcaagtagacgagataagagagagaagttttgtgggtgttgttgtaagttttagctttgaaatcagagtatttatttagagagagacgttcgcatactattctttggaagagagagacgtaatttggtattgttggttaagagagagaaagttactaagtcttgggatgtattcgatcttcttagaaaggggaatgaggagacgtgtgggagaacgagaaagggacttaggccaaacccatcattcatcttttaggcttatatatgtttcttgcatcacaagattcctttatccttaaatcatgtttggtaaaataactaattattcgtcttactttatactcgtgattagttgaaatcatcctatcagtgacatgttcaacttccttaagtggaatttatgtcttaatcagcatgaaaagagaaactgctttaagttaaatcaagttattggacaccaaatattttctatgttagtgtatatgatgactcaaacaaaattcaatgtattatttctggcgcgctggagtcttatgttatctgaggtccagctcattgtgatctttattttagacttaacaattttataggttgaaccggaaataaaacaattttaaaaaatcagtgaaagactgcatgatccaagactagtttatggttcaacacaataaaatccaaaattaagttgtcatatatagcacaaatgccattgaaacaaaaatttgttttatagtatgattaaaattatatattggtataaataattgatgagaccaatctactcatagggatgaccaattaagaataaagaatttcaaattgttggacattttaatattataaaaaccgcggagaatgtcatgggaaaaggaagaaatgatcaaatagcttatggaggcgttcttaaaggtcaaatacatacaaacatgtcattatatcaataactacaaacaacatctagtattaatttttttttttttgcttgccaaaagccaccttctgatgcactattatttgatatataacacgtttaatacaaaatatagacccaagggaaaataaaaaagttggtaggcgaaaaaatacttaaataagaatttcataaagagaaaaactggtgggcgaaaattctagaatattaagaatgaaaaataaaaaagaagaatatgatattgattaatcatgttcagcagattaggaatatattatcttctatcgtataatctaaattcatgtatagttcaagttatgtagaaatttctaacgtcaatataaagtattgtgacccacttttagaccaagttcgaagagatgtaaaggtctaagtctctaataagatctataaaattcattgattaagaagggttatatatataaactgtcatatacattaaacagaatgagaaataatgatggtgatgccaatattttaccaaagtttttgacactaaattattgacgtccatattttggtgccctcgtgtaatctttttaggttacatgttgagacaattaattatgattttttttggaaaaaatgatcgatgaactgcaatataagtacgcaaagatgatcattggagaccgagactttgctttatagggattgcgaatttaaccatatccactttttgacgatcatgagtaacgcataatacattcagatgaccggaaattttctttgttgagttttatagtctacgaaacgaaacaactttcttctcttaataattaaaatgtgatgttttaaaaatacaaagaaacaagagatatcctcatggtcatgggtatcgaccaaaataaaaatagtgcatctgtttaatacgtacacttgtcttaatcatttgcttacatgtgtgttagttcatatgtcaattttgagtttgctgtataaataaattgtattaattaaatatgacataattataccttttatattatagaattcataagaaaacaaaacttgagttcttagggttagtttaagaaagttcataaaagtcaatcattattatataataagtcttgtggaaagcctggatattatttatttcacttcctaaaatccgttcctaattggtattttgagagcatgatatgcgatatatgtcttacaatattgagattgctaattggtatttgcctagttatgtccatgtttatttttatccaaagttgtgtatcatatactgtgtctgtttggtgtgttatgacttatgacccatgtgtgataatctcatgtggtatggccgtatggatgatgtgcatgaacataaaagtaaaaagaatcatttagagacccaaaacaatatagggcttcaaaacgttgggccgggtttgtttcagagccctattatagatagatgggtctgaagaagtctgaacaaacaaaaacatgtctatcatattagccgtcgatcctcattagacacgtggacggttgatatactgccgagttcggtatcgtcgcaaattttgatctttcgggaaaaagaaagaaaagagaagaaaacaaatcgttgaaaaagtaagtaagctcaaggcgcgacgaggaaaaagacgaagaagaagaaagtaacaatctttagtaatcaaagtccaattagtgaaaaggggttttcttgtgagaagagaaagagaagctatg

SEQ ID NO: 31310 - DNA, 3000 bp, Unknown; identical to SEQ ID NO: 9251
  misc_feature (1)..( 3000): 2750-1469P.txt file - cDNA_ID_3040885; gDNA_ID_1972029; Annot_ID_178202

SEQ ID NO: 31311 - DNA, 3003 bp, Unknown
  misc_feature (1)..( 3003): 2750-1469P.txt file - cDNA_ID_3040893; gDNA_ID_1972029; Annot_ID_178200
gcataacatcatcaactgaattgttagagagctattgggtcaaaaatagaattgattattcctcattaatctgaatctggatataccttaatgttaagatagtcgctgattgcgtccagtataaattgaatctcatcttcatgaggttctggaagtgaagtgattgaagtattagagtctgtagtgcctgctactgttcttcccaaccacggtaacataaacacaacgcggccatccttagttttagggactatcaaccccatgccttcaggagaatagtaatcaggcagcacgatgtgtacaccgctgcttggacaaatcattggttttgtatcttcatcaatcattttcctaatggaatcacagaacggtcctgccgcattaacaactacttttgcatagctgttaaattcttggcctgtcaaattgaaacatctcatcaaaaactgcacaaatcatgacagagcagaggtatactgaattgcacgaaattgctagtcgttttacctgtgagattgttacgaattcgggcaccaattattctcttagtagcatcatcagtaataagcgagacaacctcggcatggttgagaactgccgcaccagctaacgcggcagtacatgccaaacccacattcagacgtgaatcgttcatttgcccgtcataatacacaacagtacccctcaaattcttgtctttccctttccttgcaagagtggggaagagctcaatagactcttttgcagagtaatatctggacagatgcaataaccgtggtccagcaaccaagtcatacatcttcaaccccatccagaagtagataacttcgaaccaatcaaaacaaggtgtcatacagggcagagcatgacagagatgtggcgcattctcaatgagctgtttacgctcctcaagagcgtgaaatacaagcttcagctgtccataatcaagattgaaaacagctttctccaagtaacgaacccctaagtgtaaacgagcactaaatcaaatggtgtatcaagagccgcaaatgtaatacatatccttaacatgtatgttccttcaattattgaattaacaaacaaaaacacaacaatgagtggcaaaaaccaagtaactagctacaaattcttcaatataatttcgtcaattgaatggtcataccactcaattccaactagtaaactaagaaatggtttaatattaccagacaattcagagagcttcttatacgaaattcggaaatccacgccacatagaaaattcaaaaattaaaagtacctccatgaatcagctttgtagatcgcgaagaagtcccagaggagaaatcctcgcgctccaccaaaccaacacggaggccacgtgtaacagcgtcaagagcaactccagaaccggtggctccaccgccaatgacgagaacatcgagcggatcagaagcggtggctgcaatcagagcagactcttgagcagatcgagacggtacagaagcggtgggatcaccaagcctacgcctcaacgaatctagaatcggaccacctcctttgtcgctggaggcaaccgacggagacaggtagacagcgccaccggatgcagcggcaattacggcagctccggcagctaaacggcgaatggaagcgagagacatggaatttaggagagatttagagattgggtgaagaagattgcgttgggaagcgagagacgatcatgggaaagaagaagaagaaaatgattgcgaatgatatcaaaaaatggaaatagaaatctctgtaatggaaactatatcgttttaaattactgtttcaccctcacaactttccatacatagaaggtaagtgaagtggggatggtttggtcatttcatatgaatagagagttccgagttctaaggaatggtttgagtgggctgcaagagatttttcttataggctttgtaagtttttgattaaaaactgttttgtacaaacaatagtgtttttgattttttaagaaaaatagaagtaatttgtgcgagttaatttaataaactagactaacaaattataaaattgaaaataattatttcaaaatatggaggatttgcaagtgagtttttgctagttcttaaaatgtgcgaatcttgctctcttaagattggaaatgtttaggaatatagtcagtaagacataactaaatatttgatcattattagtattaaaagagttaagccatactaaatatttgttttaatgctattaccgtagagggtatttctctattgtaaataaactatattaattaaacttctgtataaagattacaaattaattatcagaaaaatgaatgaccgtaacgaaataaacgaaaaatacaaacttctctctgattaaaaaaacaaacgttagaaattgtgattatttattgtctcgatttaataagagattcttgaatttaggtgacaaatttaatcattaattaatcatccttttaactttatgtaatttgtccatcagacaaagagatggatatacgatgtcgtaatagccgcatcttcttctaatcaccttttttaagattagtttatgtaattaaaaaaggttaagtgtgacagtttgggagaattaccagaggatgaaggcgatctcagacatccatgatttgcctcttttgtcttctttaccttattcgtctctcattctttgaatcccctttccctttctctcaatcttcctcacttacatttcttatctcactccctctctcactttctccttcaatgttctctcctctgcgttttcacgaaacagagaaccttatcgttccgtcttcgtagacattgaaatcgatagagaggtgattcattactttgattcgcgatcggattctgatcattactctttttcaaaaatcgatagattcttctccgatttcgtaacaccgacacgaatttgtttttggctttttctggtttttgcaggtgttgatttgattaggtttaatattgattcggatgaagggaagagatg

SEQ ID NO: 31312 - DNA, 1451 bp, Unknown; identical to SEQ ID NO: 9258
  misc_feature (1)..( 1451): 2750-1469P.txt file - cDNA_ID_3040936; gDNA_ID_1972047; Annot_ID_178236

SEQ ID NO: 31313 - DNA, 1045 bp, Unknown; identical to SEQ ID NO: 9263
  misc_feature (1)..( 1045): 2750-1469P.txt file - cDNA_ID_3040944; gDNA_ID_1972047; Annot_ID_178270

SEQ ID NO: 31314 - DNA, 3003 bp, Unknown; identical to SEQ ID NO: 18229
  misc_feature (1)..( 3003): 2750-1469P.txt file - cDNA_ID_3040948; gDNA_ID_2684224; Annot_ID_191895

SEQ ID NO: 31315 - DNA, 3000 bp, Unknown; identical to SEQ ID NO: 9261
  misc_feature (1)..( 3000): 2750-1469P.txt file - cDNA_ID_3040948; gDNA_ID_1972047; Annot_ID_178266

SEQ ID NO: 31316 - DNA, 3003 bp, Unknown; identical to SEQ ID NO: 18229
  misc_feature (1)..( 3003): 2750-1469P.txt file - cDNA_ID_3040948; gDNA_ID_1621111; Annot_ID_171790

SEQ ID NO: 31317 - DNA, 3003 bp, Unknown; identical to SEQ ID NO: 18229
  misc_feature (1)..( 3003): 2750-1469P.txt file - cDNA_ID_3040948; gDNA_ID_2684224; Annot_ID_137530

SEQ ID NO: 31318 - DNA, 3000 bp, Unknown; identical to SEQ ID NO: 14769
  misc_feature (1)..( 3000): 2750-1469P.txt file - cDNA_ID_3040952; gDNA_ID_2684224; Annot_ID_191901

SEQ ID NO: 31319 - DNA, 3003 bp, Unknown
  misc_feature (1)..( 3003): 2750-1469P.txt file - cDNA_ID_3040952; gDNA_ID_1972047; Annot_ID_178259
tgtaaaacgtttttccgtcaaatatgatttaaaaaaaaaaaaaaattgttactaacggctagtttacccccaaaaaaaaatgattttactaacggaggagaagtgtttcgaaaattcgacaatgattaagaagaaagttagatcaaacgaacaggatcacaggaagaaggtacaacgtgaagcaatcaatgaggctaaaataaaatattgagaaatttgctcaaccatatgatttcattaatatataataatgaataacagttctatcatataaataaataatttataatccaccacatgacaacagatgggttttcccattttatttaactataaacagtattttgctctcacagatccacaaggacaagcatattcaaggatgttttagttcttaaagaaaagataaagagagaccagacgcatagtggtaacttggtctacaagttagagtggccaagccggagaaggacacggtgccacgaagtgttgagaacccctcttaggttccacaccgactccacattttccggttgaacattcgccgccgaatcaacctgcacatttccacagttttctattaactcttgtcagaagccatttatattagctgagcaagatgttgaggctttaccgctttggcgatgacctctgtagtctgtgaaacatcaatggtggcttcaaacaacacccatgcccatttgtcactggagctgtgttctgagatgtactgctttcctggttcctgcgttctagaagcttccacccagtttttgcctccatccagggatatgtccactctttctatcccgcgtccacctcctgaaaccgcatatcctttgatacttacctgcaattttttttttttaattgaattagctcttgctttcctacattggtcagatcagattaggtagtgaattccgcgttctaacctttccaggcttcaccatttgcacatcctccacagagcagattgcactctgttaacaatgataaacgagtatggggtcaagactcaagacaaactaatgttcatttacaaattctactatctgatcaaattcataaggcaactggtccaaacaagtaaaattttcagtataccagtagaaaatatgatcagtcgattcatcaccatcatcaactgttttcatggaagaatacagaattacgaacttcgcaagaaaattggaaaatcttaattttgtagcgcatataaacgaaaaacgtcattacaaagtcaagtattctgtaagaaagaagggaaagttgtatttacctgaacagggaaatccatttgcggtctcctagaggaccagttgatattatcccaattgacagagggtggaaacattttgtaatctttttgcatgaagaatccctacatcacattttgatccaagtcccttacaatgttagaacagtttctgattgctaaaaagagggtaaaagccggacactttagttgagacctggctttcttcagcgatgacattgatggaatcaagccatttgaccgaacgagcaccaatcacaccagggacaaccacccttaacggaaatccgtgatccctgttcagggtcttcacagaagaaacacgttttccaacaaataagcacatttccgagtactcactcatactcacatgtcaaacaagtgatgatttaaacacaagtgagactaatttaggagagcgatatcaaacctctccattcatctcataagcgagtagaacatccgcttcaggatttgtggcttgacttagagtgattgacgccttataagggcccccattttcctcctagagatatagaaagagcatagacttttcatgggaattcataacaaagcataaaaaggtggaatttattaatatatatctaccttacagcgatcaacactaacgaactcaacatgtctggctcctaaattggtagaagcagtcagctttggtatccccacaagctcaagaacatcggccagtttcgccccaccccagacagctgaaaggcaaattctttcaagacaagtatgtattgaaagcatgggaatgggagaaagagagacgaaccgttgccaatagcagaaacatcccatccaacacctctaacattcctaactttgctcatggcagtccttctgttaccggcacactgcattgaaacaaaagtgatgttaaattaaatgtggagaaaaactaaaggtagaagatttactcaaaggaagaatgaacctgaagagtagcagtaacattgtactttgggagggacctgcaattttgaggaggaaacaagagtggtgcttgatggagagatacaagatcaaagttggagaatgtaaagagaggcaaataaataaaggtacctgatgtctttgataaagagctttctcgggttctggatcaatccagtaagggtgacggagtagctggtttggcaaaagaaatagcagaaatgagcggaggaggcaaaattgaagatgaatgagagtgagagagagacctttgaaggtgatcaacaatggggatgggaccatgatttcgcttgtagaaaaggtcgacgggagtgacataagatgagactaaggccgagcggggaggctcggcgttgaaaggttcctgcggatcacccaaatttagatgccatgaagaaaaaggctatatcagactagtgactgattcgattggaaagagagaagaagaagaagaagaagcttaccttggcgttgaccttgagagaagggtgacgaggtggttcctgcgagtattccgaaggacctctaattccaggcattcttctttcgaggaggagataccgaggaaatgacgattgagtgctttcctttgtgacgtctctctcttcttcaaaggaaaactatggaacggcgtcgttttaggtttgcgtctcttaatttgtggataacagacagagcccaaattgagcccaaacaaaaacaaattgtgagagatggcggtggccaaacttcacggcggaggtatg

SEQ ID NO: 31320 - DNA, 3003 bp, Unknown
  misc_feature (1)..( 3003): 2750-1469P.txt file - cDNA_ID_3040956; gDNA_ID_2684224; Annot_ID_191902
tctccttggcgatcagcaaggtcaggatccgggacagtccaccacccctgaccatggtcctgagcttatatttagtgaagtggaagacgagaaaccaaaagaagtagatttgcttcctgcagtggagagacataagagaattgctcagttgcaagcaaagctgatgcaagcagctgcagagggtgctgttcgggtcaagagacggaggggccctcacagaggcgaggattttactttaactcaagcactcgttaaagccgatttctggctcatcttcttctccctcttgctcggatctggttcgggtctaacggtcatagataaccttgggcagatgagtcagtctctcggttacgataacactcacgtctttgtgtccatgattagcatttggaacttccttggacgcattggaggcggttatttctccgaactcatcgtcaggtatgatactgtcccagaagaatgacaatgacatttggctgtggaattgattgtggttcgaaatgatttgcagggactatgcgtacccaagaccggttgctatagcagtggctcagcttgtaatgtcagtaggacacatcttctttgcatacggatggcctggagctatgcacatcggcacactattgattggacttggctatggtgctcactgggccatcgtcccagccactgcctctgagctctttggtctaaagaagtttggagctttatacaatttcctgacgctggccaacccagcgggatccttagtcttttcggggctgatcgcaagttccatttatgaccgcgaagcagagaggcaagcacaaggatccttgttcaatcctgacgatgtcctgagatgccgaggttccatctgttacttcttgacgtcactcataatgtctggattctgcctcattgcggccgccttgagtatgatccttgtgcaacgtacgaagccggtttacacaaatctctacggcaaaacccgcaactgattttaagataccatattacgaaaatatcccaccaagaaaagaagctgggttctttgagtttcatacctatatatatgattgtgttcatcatcttattctttggcttggtcttccacttccccatacatgtgtatttggttatgtaacgattttttgtgtccggtgttgtgtatggattttgaattcgcatttgtaataattgtattcacattattcatattctccagctacaaggtgtctttgtgtgtagatgtcaaacaaagacctaatctgtgtctgtctctgttttaagtgccagacgccataagatcttggcgcagggaagactcgtcgtcctcaaccaccatccacggcaatataggtccctatacaaaccaaccacacggtcaagttaaggtccttggatggatgaagcacagaatgtttagataatatattaccttcccttcccttatgaccttgggatatggtcctgtcatatccacgatggtggatggttcagccactcgtatacctccgtctaccacaaaatccagaccctgtaaaaggaaaccgaaacagagaatagagcaaccaaagatgttctttagtcgctgagaaagagtgagagctataaatacctctggtccatatatgtcacctattgcggttgggtcgatcatccattcattttctttaggccctttcacactgtcattatttaccatacattacacaacttggtcgaagagtccacagtctctctgtagctagtgacgagattttaaagaagaaataaaccttgtgcaaatcaatggggcatccatctgctgcagaatagcttggcagagagcatcatcagatatgcggacacccacgtttttcctagatgcatatttcacacttgtggtgccataacctacacactgtttgggtagttccttgcttgcagtcaagatgaaggtatactgttaaaaaaaaaaaaaatgccaaagatcattgataagaaaactgtttggatattgcgaatatgttgagtatccattagaaaacaagagaagaagaggctctcacaggaccaggtaagcattgcttgacagctcgaaaaacgttagcatgaccatgaccatcaccacgaggaaagcccattgtaaaagtgtcaatatctcgtaaggaacggcataagatgctaagtggctgcataagttgagatggaataatcaaactcaaacctatggaggattcaaattgagcaaagcagaaatatagaacaagtgttccttgcttgcttaccttggaggattcaatctttttaatcctaagaaagagagagagagacacacacgggctaacacgagtcagctcaaaggattggattggaatagaaaagcagcaagagtgagaggtaggtagctaaccttcggagacgctcaacagcggaatggtttttacaatcacaagcaatggcatatctacggagaaacagaaattcaaaaaaaatgcaaaagaggaggaagaagaagaagtaaagaggagaggaagagcttgtttacacggtatcagtgggaataacaccaacagctccttgtttgagaaggtcaatgacaggttggagtttccaggaatcaacaccacaaggatcgacctcgatgtacaccaattccccctccttggtgaaacgaggagtagagtatttgagacgcttagggcttctcttggccgccaacgcgacgatgtatctccgtggagataaagaggcagtgctcggaagcgttgatggtcgccggtgcgtcatcggggaaggaagtagaagaagacgcatcgccgccatacctccgccgtgaagtttggccaccgccatctctcacaatttgtttttgtttgggctcaatttgggctctgtctgttatccacaaattaagagacgcaaacctaaaacgacgccgttccatagttttcctttgaagaagagagagacgtcacaaaggaaagcactcaatcgtcatttcctcggtatctcctcctcgaaagaagaatg

SEQ ID NO: 31321 - DNA, 3000 bp, Unknown
  misc_feature (1)..( 3000): 2750-1469P.txt file - cDNA_ID_3040956; gDNA_ID_1972047; Annot_ID_178258
ccttggcgatcagcaaggtcaggatccgggacagtccaccacccctgaccatggtcctgagcttatatttagtgaagtggaagacgagaaaccaaaagaagtagatttgcttcctgcagtggagagacataagagaattgctcagttgcaagcaaagctgatgcaagcagctgcagagggtgctgttcgggtcaagagacggaggggccctcacagaggcgaggattttactttaactcaagcactcgttaaagccgatttctggctcatcttcttctccctcttgctcggatctggttcgggtctaacggtcatagataaccttgggcagatgagtcagtctctcggttacgataacactcacgtctttgtgtccatgattagcatttggaacttccttggacgcattggaggcggttatttctccgaactcatcgtcaggtatgatactgtcccagaagaatgacaatgacatttggctgtggaattgattgtggttcgaaatgatttgcagggactatgcgtacccaagaccggttgctatagcagtggctcagcttgtaatgtcagtaggacacatcttctttgcatacggatggcctggagctatgcacatcggcacactattgattggacttggctatggtgctcactgggccatcgtcccagccactgcctctgagctctttggtctaaagaagtttggagctttatacaatttcctgacgctggccaacccagcgggatccttagtcttttcggggctgatcgcaagttccatttatgaccgcgaagcagagaggcaagcacaaggatccttgttcaatcctgacgatgtcctgagatgccgaggttccatctgttacttcttgacgtcactcataatgtctggattctgcctcattgcggccgccttgagtatgatccttgtgcaacgtacgaagccggtttacacaaatctctacggcaaaacccgcaactgattttaagataccatattacgaaaatatcccaccaagaaaagaagctgggttctttgagtttcatacctatatatatgattgtgttcatcatcttattctttggcttggtcttccacttccccatacatgtgtatttggttatgtaacgattttttgtgtccggtgttgtgtatggattttgaattcgcatttgtaataattgtattcacattattcatattctccagctacaaggtgtctttgtgtgtagatgtcaaacaaagacctaatctgtgtctgtctctgttttaagtgccagacgccataagatcttggcgcagggaagactcgtcgtcctcaaccaccatccacggcaatataggtccctatacaaaccaaccacacggtcaagttaaggtccttggatggatgaagcacagaatgtttagataatatattaccttcccttcccttatgaccttgggatatggtcctgtcatatccacgatggtggatggttcagccactcgtatacctccgtctaccacaaaatccagaccctgtaaaaggaaaccgaaacagagaatagagcaaccaaagatgttctttagtcgctgagaaagagtgagagctataaatacctctggtccatatatgtcacctattgcggttgggtcgatcatccattcattttctttaggccctttcacactgtcattatttaccatacattacacaacttggtcgaagagtccacagtctctctgtagctagtgacgagattttaaagaagaaataaaccttgtgcaaatcaatggggcatccatctgctgcagaatagcttggcagagagcatcatcagatatgcggacacccacgtttttcctagatgcatatttcacacttgtggtgccataacctacacactgtttgggtagttccttgcttgcagtcaagatgaaggtatactgttaaaaaaaaaaaaaatgccaaagatcattgataagaaaactgtttggatattgcgaatatgttgagtatccattagaaaacaagagaagaagaggctctcacaggaccaggtaagcattgcttgacagctcgaaaaacgttagcatgaccatgaccatcaccacgaggaaagcccattgtaaaagtgtcaatatctcgtaaggaacggcataagatgctaagtggctgcataagttgagatggaataatcaaactcaaacctatggaggattcaaattgagcaaagcagaaatatagaacaagtgttccttgcttgcttaccttggaggattcaatctttttaatcctaagaaagagagagagagacacacacgggctaacacgagtcagctcaaaggattggattggaatagaaaagcagcaagagtgagaggtaggtagctaaccttcggagacgctcaacagcggaatggtttttacaatcacaagcaatggcatatctacggagaaacagaaattcaaaaaaaatgcaaaagaggaggaagaagaagaagtaaagaggagaggaagagcttgtttacacggtatcagtgggaataacaccaacagctccttgtttgagaaggtcaatgacaggttggagtttccaggaatcaacaccacaaggatcgacctcgatgtacaccaattccccctccttggtgaaacgaggagtagagtatttgagacgcttagggcttctcttggccgccaacgcgacgatgtatctccgtggagataaagaggcagtgctcggaagcgttgatggtcgccggtgcgtcatcggggaaggaagtagaagaagacgcatcgccgccatacctccgccgtgaagtttggccaccgccatctctcacaatttgtttttgtttgggctcaatttgggctctgtctgttatccacaaattaagagacgcaaacctaaaacgacgccgttccatagttttcctttgaagaagagagagacgtcacaaaggaaagcactcaatcgtcatttcctcggtatctcctcctcgaaagaagaatg

SEQ ID NO: 31322 - DNA, 3003 bp, Unknown; identical to SEQ ID NO: 31320
  misc_feature (1)..( 3003): 2750-1469P.txt file - cDNA_ID_3040956; gDNA_ID_2684224; Annot_ID_137537

SEQ ID NO: 31323 - DNA, 3000 bp, Unknown; identical to SEQ ID NO: 9265
  misc_feature (1)..( 3000): 2750-1469P.txt file - cDNA_ID_3040964; gDNA_ID_1972047; Annot_ID_178252

SEQ ID NO: 31324 - DNA, 3000 bp, Unknown; identical to SEQ ID NO: 9259
  misc_feature (1)..( 3000): 2750-1469P.txt file - cDNA_ID_3040971; gDNA_ID_1972047; Annot_ID_178249

SEQ ID NO: 31325 - DNA, 3000 bp, Unknown; identical to SEQ ID NO: 9282
  misc_feature (1)..( 3000): 2750-1469P.txt file - cDNA_ID_3041013; gDNA_ID_1972049; Annot_ID_178330

SEQ ID NO: 31326 - DNA, 3003 bp, Unknown
  misc_feature (1)..( 3003): 2750-1469P.txt file - cDNA_ID_3041052; gDNA_ID_1972053; Annot_ID_178370
ttaaccaaatagttcaattaatggaagaggttcagaatctggtcttcggagttgtcatactatttagaaatctggtcttataatctgaacaatcctaatcccacggttcaacaaacttttgacatggatcaaacatataacaaaccattaacgataaaagactcaaatcaagcgaattaaaaaacaagactcaggtcaacaaaccatattagcctacgttgcatcacgataatgaagaataacttatagatccatccccttttgtctcctaattcttaattttttagaaagagatcattattgttctcggatggagatatttagaaaggcaacgattgtacgtctccgtagccacaacgacaaatacctaagtgccgatgaagatcaagaatccgttcatcaagatcgtcgcggcacaacaaaaaacactagatggacggttgagatcgtacctggatccaatgtgatccgtcttcaaagctgttacggcaaataccttaccgccactaatattcatttcctccttggagccaccggcgaaaaggtaggtttatctaggggagattgggttacaagaaaccatctcaaatcaaaattaggattctttttcaataaatttcttgaaaaacaaggcatccaaatccattgataacatttataaacactttgacaaagtaaatcttgcccaagagatatttcaaatgtttaacaacgagaaaacccattcttatgactatagcgcaaacaaaaacgcataaacagaatttttttaaacgtggaaatgtttcttgctaaacaagccgtgtgtgtttcatattcacaaggtacttcaaactctacccgaaaagttggattcatctgcggagtgggagccgctatcagacgatggtgtacacgtacggttcaagagtcgctacggacaatatctgagggcaaacaaaggtgtaccaccgtggagaaactctatcacacacgatattcctagtcgtacggtcacacaagattgggtcatgtggactgttgacgttcttcagattcgagttatcaaagatgatgcagagtctacccacagttcttccactttttcacggattgaggtactactactatatacactacacatacgtgccaataccattcttctgaaaatactagtactaaacattcatcgatacatgatcagtcagatgattcgtttattgtgagtttaccactcaagtccgaaggaaggctaatatattacgagaccggagatgatagtgggaacataaataaggaaataggagaaaaatcattgatattccatggaagcgagttgatagaactaaagaagaagcttgaggaagaaacagagatggaagatgttatgatttggtgtagaaatcctttgaacgaaaagctttgtcctcttcaattgcatcttcctcctaacaacgcaactatgcacatcatcgtctttccttcttcttgcggtactaaacttacctccttcttcattgttaccattatctataatcaaaatattgtttatgcattcctaatttttttcaattgaggatttcgatttccaattaaaactttaggtatattcgagacattgggagtccagagttgttgtttttccgatttcttttggtcggaactctaatgaaaaatccgacacatagttttcttgaaagtctcattattcgtcacgtcagcacaaacttttattcatcccaagtttaactattttaatacagcctctaattgtgtttttgattttttgattttttttttttcgcagagattgacaagtgattgtcaataatatattatcaaattataaccaacttgggaagaagaaaaaaaagattattttgttatttgtgtacgaagaaagaagtcattgtgaagctaatttattcttcatattccaatatatgatagttgataagtacatgtatagttgtatatacaacataatgatctattcgtttaacatttttcttttaaaaatcttggaatgaaaatactgtatgttacctagaattcaaatagaaatcacacctaacgaactagttggtagtagaatcttataattttgtttaatacacaaaataaagtcagacaatctgaaaatgacacataatatgtttttgggtggaacctttttaactctattatgcaaaaacataactttttgggaataagaaaagttgtaaagcaaccaaaaagctaaatgacatatattttttctttctcttaattactgcatattctagaatcctactactagatcttatccttccactttttttttttgttacatattaatttgtcttaaccaaaatatacataggaaaaccttatagggacattatatctatttatgtaacattgatggacgacacacacaatggaccatgtgatattttagttcatatatcaataataaagttttgatcattattattataattatatttgctcgaccatgatagtgtatttaacgtcaagtgtgggtccaatttcggtccaaggatgctgactagaaattagcatttttatagttttctcctaataatatactatttaatgcaaacggcctgtgacgactgaattgtcctctgtctggccccgtgagcttcaccgcagcttttagatattttctttccccgttctttcggattttttttttctccccctctcaagcaaagcattatcgctattgctctgccttgtgagctgcgatcacctgtttactggtaagtctctcctcgtcttctccttcttcttctctgggagatcttctactgttctctctgtgagctgatttgtttggtttcctccatagagctgatcatatcatcatcgttgggaactgacgagatttagtctatattggtgaattatttttgtttatctggttttgattttttgaatctgtgactttagagagaagaacactgcgacgtcgttaaaagtaggttgagagcgagaaaggccgagagaatggagatg

SEQ ID NO: 31327 - DNA, 3000 bp, Unknown
  misc_feature (1)..( 3000): 2750-1469P.txt file - cDNA_ID_3041056; gDNA_ID_2214712; Annot_ID_189909
cagcagaaggcttcatgggctttaatagtttaggtaatgggttagggggaggacagaaggggcttgggttgggcccaatgcgaaaaccctgaggcagcattaggtttagccgccaagcgcatcttctctttgtcaccaacgacgacggcgacggcaaaacggacttagggtttacagctgccgaattgagggcgtcagagacaagatctaaccaaacgaagtttgtttgcgatgaggctcggtctgcagaagttggatcttccaaggtaaagctcttcaacagctccggcgtcaaagcaaagctccgatccagaggggaatagggagatgccggtattgacttcaaggggagccgaggagagggataaaccacggaggtcgcaaagaagataaggggagaactagcacaagaagtgaacgtgttcagaggtatggtggtcaaggtaatctttggatacaaagggagaaaagacaagcgaaacatgggaacacgggagaatagagaacaccagatgacatagccattgagaagagagcgacaagggaacgatagctcccggcaccggcgagcaaacggctctaccggtgccggaatttgtttggaagctttggcctcgatgagagagaatgaatgaaaagaattcagtttaaaaatgtcaaattggtgttctcaattttcaacatacccaataatacaactaaacaatattgaaggcccaataccatatacacgatggcccatctactgcctgatagtatgtagggggtattaatgtcattccaacaagtaggggtagaatcggtaataaggacacaaactcgcctctttcgctttgtctctctcgtctctaagcagtagcagatctgagttttggagagttcaaaggaagaagataactccaataccagaggttcgtaacgatgtgagatttttctctgttgtttatgaagtcttagctcaatttgatcttccaatgaatttcgttaaaatttgctagacttctatcagcgcctgtagatcgatttaggttatgtactctcattcacatcggtgggaagcgatcaatcttagaatccacgttttataatttctcgttttgatcttgtttttttcacaacttgtaaacattgcgatgttgattgtgttgattaatcgcttaaaattgaggtctgagtttaaataatccttgtgcttaccatatggtcttggctgtgataatttgttaattgttctgcttaataatctaacactttgcttcggttaatgtctggatcaacatgctcatggttgtgttccctgttgatttgtattgtaacagtgaaagcattcaggaaacatgcctcctcagaagattgaaactggtcatagcgacactattcatgatgtggtcatggattactatggaaagcgagtagcaactgcctcgtctgactgcacgatcaagataaccggagtaagcaacagcggtggatctcagcatctagctaccttaaccggtcatcgaggtcctgtctggcaagtcgcttgggcgcacccaaagtttggttcacttctcgcttcatgttcctatgatgggcaaattatattatggaaagaaggtaaccaaaaccaatggacacaagctcatgtcttcacagaccacaaagtatctgtcaactctatcgcttgggctcctcatgaacttggactctccttagcttgcggagcatctgatggaaacatatcagttttctcggctcgagctgatggcggttgggacacgacaaagatagaccaagcacaccctgttggtgtcacttcagtgtcgtgggcaccggccacagaaccaggcgcactcgttagctctggtatgatcgatccggtctacaaactagcatccggcgggtgtgatagcacggtgaaagtgtggaagttctcgaacgggtcatggaaaatggattgtttcccggctctcaacaagcacacggattgggtccgtgatgtggcttgggcaccgaacttgggtctcccaaagtcaaccatagccagtggttcagaagatgggaaagtgatcatatggaccatagggaaagaaggtgagcaatgggaaggtactgttttgaaagatttcaaaacaccagtgtggcgggtctcgtggtcgttgaccggtaatttgttggctgtttccgatgggaacaataacgttacagtgtggaaagagtctgttgatggagagtgggaacaagtgactgttgttgagccatagattgttgtttgtttgtttggttatcttttgttttgtggtaatatcaaaatgtggtgtgttctgtatacaatttctagggacctgtttctctctatacgtttctcaggaaagtatattcttatgtattttaatcagacaacagagattgcaaaagaaatgtatttttcataaaactttttaattccgataatgagttttttttactggtatgatgtttttcacatttttacccttttatgagattccgattttggcgtaaattcattgtagtttataaccaaaatttaattgatttcaatataaactcatttttaactaattaatactttaaaaatttaagcctgttcaaccttagttaattgtgtttttaatcgatcaactaattttcaactcattaaccagctcgtttagccagccacttgataaattttaatgctcaattaggcataaaattttgatttacgaaattttgccgatggcgctcaaaaaatgctaatccggctctgcatcgatttataatatttaccctttcaatactccgtgtagttaagaggatcgagggtatttgcgtcattaacagtgataacaagtgctaaagcgatgaatgaagcgcctattttcacaattcgaaatctctctccccccgctttggccccaaaaagttttttttttttttttttaattgctaagacaaatatccgaatctcagaaatttctcgtcctctttctctgttttttgtttctggggaaaatg

SEQ ID NO: 31328 - DNA, 3003 bp, Unknown
  misc_feature (1)..( 3003): 2750-1469P.txt file - cDNA_ID_3041056; gDNA_ID_1972053; Annot_ID_178358
acccagcagaaggcttcatgggctttaatagtttaggtaatgggttagggggaggacagaaggggcttgggttgggcccaatgcgaaaaccctgaggcagcattaggtttagccgccaagcgcatcttctctttgtcaccaacgacgacggcgacggcaaaacggacttagggtttacagctgccgaattgagggcgtcagagacaagatctaaccaaacgaagtttgtttgcgatgaggctcggtctgcagaagttggatcttccaaggtaaagctcttcaacagctccggcgtcaaagcaaagctccgatccagaggggaatagggagatgccggtattgacttcaaggggagccgaggagagggataaaccacggaggtcgcaaagaagataaggggagaactagcacaagaagtgaacgtgttcagaggtatggtggtcaaggtaatctttggatacaaagggagaaaagacaagcgaaacatgggaacacgggagaatagagaacaccagatgacatagccattgagaagagagcgacaagggaacgatagctcccggcaccggcgagcaaacggctctaccggtgccggaatttgtttggaagctttggcctcgatgagagagaatgaatgaaaagaattcagtttaaaaatgtcaaattggtgttctcaattttcaacatacccaataatacaactaaacaatattgaaggcccaataccatatacacgatggcccatctactgcctgatagtatgtagggggtattaatgtcattccaacaagtaggggtagaatcggtaataaggacacaaactcgcctctttcgctttgtctctctcgtctctaagcagtagcagatctgagttttggagagttcaaaggaagaagataactccaataccagaggttcgtaacgatgtgagatttttctctgttgtttatgaagtcttagctcaatttgatcttccaatgaatttcgttaaaatttgctagacttctatcagcgcctgtagatcgatttaggttatgtactctcattcacatcggtgggaagcgatcaatcttagaatccacgttttataatttctcgttttgatcttgtttttttcacaacttgtaaacattgcgatgttgattgtgttgattaatcgcttaaaattgaggtctgagtttaaataatccttgtgcttaccatatggtcttggctgtgataatttgttaattgttctgcttaataatctaacactttgcttcggttaatgtctggatcaacatgctcatggttgtgttccctgttgatttgtattgtaacagtgaaagcattcaggaaacatgcctcctcagaagattgaaactggtcatagcgacactattcatgatgtggtcatggattactatggaaagcgagtagcaactgcctcgtctgactgcacgatcaagataaccggagtaagcaacagcggtggatctcagcatctagctaccttaaccggtcatcgaggtcctgtctggcaagtcgcttgggcgcacccaaagtttggttcacttctcgcttcatgttcctatgatgggcaaattatattatggaaagaaggtaaccaaaaccaatggacacaagctcatgtcttcacagaccacaaagtatctgtcaactctatcgcttgggctcctcatgaacttggactctccttagcttgcggagcatctgatggaaacatatcagttttctcggctcgagctgatggcggttgggacacgacaaagatagaccaagcacaccctgttggtgtcacttcagtgtcgtgggcaccggccacagaaccaggcgcactcgttagctctggtatgatcgatccggtctacaaactagcatccggcgggtgtgatagcacggtgaaagtgtggaagttctcgaacgggtcatggaaaatggattgtttcccggctctcaacaagcacacggattgggtccgtgatgtggcttgggcaccgaacttgggtctcccaaagtcaaccatagccagtggttcagaagatgggaaagtgatcatatggaccatagggaaagaaggtgagcaatgggaaggtactgttttgaaagatttcaaaacaccagtgtggcgggtctcgtggtcgttgaccggtaatttgttggctgtttccgatgggaacaataacgttacagtgtggaaagagtctgttgatggagagtgggaacaagtgactgttgttgagccatagattgttgtttgtttgtttggttatcttttgttttgtggtaatatcaaaatgtggtgtgttctgtatacaatttctagggacctgtttctctctatacgtttctcaggaaagtatattcttatgtattttaatcagacaacagagattgcaaaagaaatgtatttttcataaaactttttaattccgataatgagttttttttactggtatgatgtttttcacatttttacccttttatgagattccgattttggcgtaaattcattgtagtttataaccaaaatttaattgatttcaatataaactcatttttaactaattaatactttaaaaatttaagcctgttcaaccttagttaattgtgtttttaatcgatcaactaattttcaactcattaaccagctcgtttagccagccacttgataaattttaatgctcaattaggcataaaattttgatttacgaaattttgccgatggcgctcaaaaaatgctaatccggctctgcatcgatttataatatttaccctttcaatactccgtgtagttaagaggatcgagggtatttgcgtcattaacagtgataacaagtgctaaagcgatgaatgaagcgcctattttcacaattcgaaatctctctccccccgctttggccccaaaaagttttttttttttttttttaattgctaagacaaatatccgaatctcagaaatttctcgtcctctttctctgttttttgtttctggggaaaatg

SEQ ID NO: 31329 - DNA, 3000 bp, Unknown; identical to SEQ ID NO: 9245
  misc_feature (1)..( 3000): 2750-1469P.txt file - cDNA_ID_3041090; gDNA_ID_1972029; Annot_ID_178197

SEQ ID NO: 31330 - DNA, 3000 bp, Unknown; identical to SEQ ID NO: 9296
  misc_feature (1)..( 3000): 2750-1469P.txt file - cDNA_ID_3041094; gDNA_ID_1972067; Annot_ID_178430

SEQ ID NO: 31331 - DNA, 3003 bp, Unknown
  misc_feature (1)..( 3003): 2750-1469P.txt file - cDNA_ID_3041096; gDNA_ID_1972067; Annot_ID_178429
tatacaacaatctcagaaaaggaaaaaaaaagaagcacagttgaaagaaccaaaaatggagaaactaacttttctcagccttctcctgcatttcgtcgtcttcatcgcttcaacgataccgtcttcatcgttcctcttgaatgatcgcacctttgagagatcgaacttgccgtctacgcgcgcggagaagctgatccgtgagctaaaccttttcccgcagcaggatctgaatgtgatcgatgtcgctgatttgcctctcactgctgcggagggaccggggattgttgaacggaagttcgtattcccgaatatacttgccgatggtggccctactgtcgacgatttaggtcatcatgctggttattacaagctcccgaaatctcgtggcgcaaggtttatatctgactttagattttggttcataggtatatagaagcttgcagctagctcttgactaggttatgtttgattcgattagaacattggactgttggtgacgtttttctaattggaatctcaaagtagtgggaatagattataaatgtttgtttgctttgtttgttgatttgtttgcttggtgtgtgttagcatgttctacttcttcttcgagtcacggaacaagaaggatgctcctgttgtgatttggttgacgggagggcctggatgtagtagtgagttggctgtgttctatgagaatggtcctttcaagatcactagtaacatgtctcttgcttggaatgagtatggatgggatcaggtattattactttctattataatcccaaaccgccttaatattccagattattgcacatgagagttgatagagagtttgtcttgcaggtttccaatcttctgtatgttgatcagcctgttggaactggtttcagctacacgacagataaaagtgatatccgtcatgacgaaactggagttagcaatgatctttatgattttctgcaggttaggtcactggatcttctcttgaattcctttctatactgcacttttctgctttaaagctatgaattggataaacaacaactctgttagactgttttggttttcttgagtcttcgaaaaaatgggaatctgcctttgtttgcttagctgtgtaacaagatcttgatgaagtttgctgatgttacctcaggctttctttgcggagcaccctaagttggcaaaaaacgacttttatattactggagagtcatatgctgggcactatatcccagcttttgcttcccgagtccataaaggaaacaaggctaatgagggagttcatattaacctaaaggcatgtgactatttcttgtttctctcttaaggtgttaatggaagtctgtagtactcacaagtataaccttgcagggattcgctattggaaatgggcttacagatcctgcactccaatacccagcctatcctgactacgctttggaaatgggtctaatcacgcaaaaagagcatgatcgcttagaaaagattgtcccactgtgcgaactatcaatcaagctttgtggtacttactcctttattccttatcaatttatctttaaaattgctctgtgtttgatgaatcctgaatccgtgtttttgttttaccaggaactgatggcacaacttcttgtttggcatcatatcttgtctgcaactctttgttcagtggtgtaatgagtcatgctggtggagtaaacgtaagcccaaaagaactgctcaatttttattgctcgttggatttctagatataattcgttctggcaaaccatttctatccttacttgtagaaagaaattgtgtttcatatttctgcatttgaagtaaggaaacaaggctaatgagggagttcacatatctttgtgtagtattacgacatcaggaagaagtgcgtgggaagtttgtgctacgatttctcaaacatggagaaatttttgaatctgcaatctgtgaggaagtcacttggtgttggggacatagactttgtctcctgcagtacttcagtctatcaggcaatgcttgtagattggatgaggaatctcgaggttggaattcccacgctcttggaagatggaatcagcctccttgtgtatgctggagaatatgatcttatctgcaactggctcggtaagttccaaaacatagataatcaaatccagacatgaaaataatgaaatagattgatttgaactgttgagggaaacaaaattggagcaggtaactcgaggtgggtgaatgcaatggagtggtcagggaaaacaaactttggggcggctaaagaagttccgtttattgtggatggcaaagaagcaggcttgttaaagacttatgaacaactcagtttcctcaaggtcggcctttcttgcataataacaacagtcgttctttggttctactggttttcttatagtatgtaacaacaacaaagggtttgatgatttaaacataaaaacacaggtgagagatgcaggacacatggttccaatggaccagcctaaagctgcattgaaaatgctgaagcgatggatggagaattcacttatcgaagatgctactgtgactgttgctgctcagggaggagaggaactggttgctcagatgtgatcacatcttcttttgcgttgcatgaaaacaaaaggcagcaaacataaaacaatgtgtgagcaattgacgttttcttctgtaatttgatctcataagtcataagaaagatacagtatatgtaggggttgcccaatttcgttataaaatcaaactctgctgacaccaaaaacataataattactacgaaatgtgttatctatgtttgtttccgaaataacgaaatgtataaaacaaaacttaaaacgttgtttatacaaaataaagccgaggtaggcttgcaagagtaatgaacaggttttgatgcggtttatgtacatgacacatggcaaaacatgattggctacatgaacgattttatctaacaagcaagatagagatgagattaggagacaaggagcaatg

SEQ ID NO: 31332 - DNA, 3003 bp, Unknown
  misc_feature (1)..( 3003): 2750-1469P.txt file - cDNA_ID_3041098; gDNA_ID_1972067; Annot_ID_178428
actaacttatgaggaacatcgtcttcgccacgaatttgacggatctcaaatggagcggatttccctataataacaaagaagtttgttcggtttggttttaccatttgttaactcaattacactttattgggagaggaagtcttttaagttttaacttaccagctagtatagcatcaacggtaacatctagtctttgatgaacacgacactcagttctcgatatcatctctacagcacaagtgaatgtcggaggtccttttctttcaagaattgtcttctgcacttttcttttccttgcttcttcatcaccaagagtcacactctgggcaaaataaattcaaattaaggttagagaagataaacaacagaacaaaataagaagcaaagttgttgtctaaggttttacctcaattccaccaataagaatctgcaaagaaggatttttgattatgttgtctatagtcatcccatgagcagttgcaacaagctgaacacctcgttgagcaatagtgctagcagctaaagcttcaagctcagttcctatctcgtcaatgatgattgtctcaggcatatgattctcaaccgcctcaatcataacctgcataaagaacttgttaatacagcaagatccttttgattccatcctacaccatattattacaaggttataaagttgcgagacatacatcgtgctgtaaattcacatttggaacttgcatccgcctggcacgaccaattccagaatgaggaacatcaccatcacctccaatctcatttgacgtgtcaacaatcactacacgtttcctgtgttcatcagctaacatccgtgcaatttctctgtacaaaacaaaccaatcttgtcatataccatttatcaatcacagttttaacagaaagatcatcacattataagttcatattgatgtacctgattaaagttgttttgccaactccaggagatccaatgaccaagatggatcctcctccttcaatcaagtctcttataatttctgcacttccagagactactcgacccactcgacatgttagaccaattacttgcagtttgcgattacgtatagcgcttatacgatgcaaagatctgtcaatcccggatcggttatcatccgaaaaatcaccaacctaaattcaaaacattttgattcagacacagaagagaccataatcagtataagcaagtcttatcagtcttgaagaactgcaataagctaaaacatttgagaaattagttgcatgtcttagatcagagacacacatacctttgataccgcaagctccagatcctggtgtgtcacaggctgctctgagatcacccaatcgccggaagggaatctagcaagtggctttctccctaaatccatcactacttcgatcaattcctcaatcgcctcgtgcttaacaagctccttcctcgtcgccggaggaagaatctctaggaaagcgtcgagctccaccgtaggcggagccgtcgtcggtgacttccgtgatgagatcgatgaatcagatgacggtgaccgaacatcgaaactgaatccatcagatggtctccgaacaggagacggtgacgacgccggggatttcgatgaagcgattctctgacgcgcaccacgtgtccgacggaatgaggaagaggaatcagatgaaaaagcggttgcggtggctgagattaaccggcgcgaagcttgccaggagctgttgatgtcgatcagaactagccgcgaattcaacgccctcatcacgattaattaattattttttttaattatgtactttcaaataaaaaatgaattaaataaaagattctgtcttttcgttttagctactggtgtgtatatctgtctggaaagcagaaatgaagaagctaaaaaggaaaagctgaggaggagaagagctatgaagcacaacgaaacgacaacgttttgagtattagttcttttttcatttcatttttttggaatatgatgatgcgtgaagactgaaactagtggaagattccaaaggatcaaagcatctaattacacagaaactgcatctgtatagaacaaagtagggtccattgtagagggaaagatgataacatagccgttcaagcaactggttcacgtggcgccacgtggagagttggacaatcttgttgacacgtgtctgactatggagctaccgtttattgccaattcgtttggaactctttgacaaatttagcccaaagtcggagttggtgtttctcgcacggcagatgcaaaagtcgtcaactttttagctctgcaaattgagatttgaaccaaaattgctgactaaattaaaccaaacaaaaaccagactaaatgaatgaaatacaagtcaacccaaacattgtgtatctacaacgacggttccttaatttcttgagtcatcttcgttttttagccgaatgggcttttaggtgctttacaaatagtggtttaggattgggccttctaatcagaaacacaccttgtagaatattacattcactataaaatgtaaggtttacattcacgtgaggcccataagtgtttttgtaataattaatttaatatatagtgtaaacttaatattaatatcaaaccgaccttagctcagttggtagagcggaagactgtaatgggtaattccaaagaaatctttaggtcgctggttcgattccggcaggttgaatatttttaacattttatttcacttttaaattatctgggacccacactcatccatcttttgcttcacattcaactcgcgtgcctaaccgtcgattactacgccaaacgttatctttgttgtaacgtaacagattcacccactatttctcatatttcgcaaaatagccccaactttctcgggcacgtatcggaagatatttctgtgatagttcctgccacgtgtacattctctcctcccccaaattgttgtatacaacaatctcagaaaaggaaaaaaaaagaagcacagttgaaagaaccaaaaatg

SEQ ID NO: 31333 - DNA, 3003 bp, Unknown
  misc_feature (1)..( 3003): 2750-1469P.txt file - cDNA_ID_3041106; gDNA_ID_2214468; Annot_ID_182903
ggtatgttatcgatttgtatgtaattttcgatcaccataattgtaaactaagttaatcactcgtttgccaaaaaaaaaaaaagttaatcacttaaaaaattgccacattttctttccaggagcaaacccttccatgtacgcgtcatgcatcaaaagtcaaggtacttatgattattggcttttgtacttatggaataggacatttcgaccctactgctccattgttcttatgttttcttctgcattgttgtgaccttcaggctcaagcaaatgcttgtggtggggcttgcaaaacctttcagccaaatgatgcagatcatgagcatggtaagataaatcacagtcaaagatgaaatgtaactctttcggttttcattgttggttctaggaatctcttagcgtgatcacccttattgacttttttgtttcattttcagcttccgggagctccaacgctaactcattgcaaagaaatgagaaagccaacagtaaaaggttgggtctctcttgatgtttcaaccattgtcttataaaaacttttggacaatcttgttatcctggatttcttgcttttctttataggagagtttctggaaggaagaatcccgccaattccgaggtattagatataattggcagatcgggagagacatgtcagatggaagacaacattgacaacaagaagttggtctctgatagtgacaatgatgctgaaaaccatataaatgacaatgtccaaagcaaaaggtttatttattcaaagcgattagataacgtaaatatatatttgtatttcactatcttatttttgcttcttcttttttgggttgtttttgctacagatattgtgcaggaagacagagtagcagttctaagactcgagaagccagccaaacagaaaccttgcaaaaggtggttgacgccaaagaaattaagggggatgcaaggtttgtttaactgcctttttccactttcaaatttgggaatagcattcaaagtggatgaagaatagtggaactgacttgtgagtatacactttctctgtttcaaacaggttttctttgacaaagcattctgactggttaaaatctcaagaacctgagccatctgaaagcctatacgagtcaaggttggttaactgtcctttttccagtttcaaattttggactaacatctaaagcctgtgaagactattggaaatgactagtgattttgcactctttgtttcaagcaggttccctttgagaaggcgttctgcccggttaaaatctcaagaacctgagccatctgaaagcttccatgactcaatagagacaaccaagaggaggaggtcggcaataaggttaggctctgtttataactactgtacccttctgaaggttgatatagtgcgatatgatcttttgcaggtctgctatgtttaatatccaagagctgggcgttattcaaaacttgaacggtttacctgatgatcaagagattgctgcaaaggccaggtttgtagaagcacatgttatttccttttccactaacatatccctgaaccaagtacacttatgccatttgcggtgttttctttttctttctttgtggatgtcatttcagatgctctgcacgtgaacagtctaccgggtctaaacccgaagcagtagaaccacatgacacaaaagagataatcgggaaaagcaggttttgtagtgatagataattgtctgtattctgcagtattacagactaaagtgttaagactgttatctaatgcgattttattttccgcaggatatctttgagaagacagtctgcgaggtttaatttccaagagctgggcgtgactgaaaacttgaatggtccacatgatgatcaaacgattgctgcaaatgccaggtttgtagtagcttcacatgttctttccttttccaatcctcttgacttataacttattcataaaccaagtacatttatgctacttcctctgatttctttatggatgtcattttagatgctgtgcaagtgaacagtctatcgggtctaaacccgaagcagtagaaccacatgacattgaagagagaatcgggaaaatcaggtttgtagtgaatatagatcaattttctatattccgttaaagtaaagacgtaagaatttttatctaaactggtatacttgacagagtctcttcaagaagacaatctgcaaacattgaaactccgagagccatcaaagaacctgcaaatccgcctttgcatgatgacaatgttgaggagtctagtcagatatcatgttcagtttcaatggagcttaaaagagaatcaaagaagaaaccaacaggcgacgaatcagaggaaatgagaaaaacaactgttggaagaccttcaaggcaagctgctgaaaaaatcaaatcgtacaaggaaccttcacttaaggagaagatgcgagggggcttctgagtcttgctaagatcgaataccctctcgtcagcctcgtatgtattggattctgcgacttcacttttgttcagtgagctattgctcaatgctgtagatcacaatgtatattcgtagttgcttgtagataaagctagcgagtggtcttgctactgtacatgaagcggattggacggtttaattcggtttgatggagaacccctctgtgtactctgctaagtaaattctttcacaatctcatttgtaaaggggtgaaataatattttcttcatttttttcttacagtaaataaattagtaaaaacaagctctctaattatatcatgggtaataaaactcgagcggtggtaaaacaaaaacctgacagttttgagttgacaacgaaccccataattcaaagattgggagacagtgaaaagtacacaagtgaatcacggtacgcaatctaccgccttatttcttaaaagataattctaaggatttttgttcttttcttgttgttttcctataaaaggtttaataattgttactttaaaggttttgatttatcagataaacgaatg

SEQ ID NO: 31334 - DNA, 3000 bp, Unknown; identical to SEQ ID NO: 9293
  misc_feature (1)..( 3000): 2750-1469P.txt file - cDNA_ID_3041106; gDNA_ID_1972067; Annot_ID_178424

SEQ ID NO: 31335 - DNA, 3003 bp, Unknown
  misc_feature (1)..( 3003): 2750-1469P.txt file - cDNA_ID_3041114; gDNA_ID_2214468; Annot_ID_182906
cgttaagagagcgaggagcgcggttgtgtcgttagatttagatctgaatctacctgccccggaagatgagaatcgggtcaacggattaagctttgcttcaaagcaagaacacgaacaagaacatgaacaaacacaacagaagaaacagagagaagaacaaaagtctcttgtcttgtcttctgctcctacattggtggattgccattactaaaatcaaaattcattaatacctaatcaaacaaaattaagcagaaattgatgaaccatttttttaagaaagttactgattccttgctttgtacaagacttgcaagattcttctctcttttttttcctttcttacttccttaatttcaaaggaaaaaccatatattatacaaatatatatactcccattaggcatatgcaatgctttgtaattacatccaagttaatgtaagatcttttggttacacaatataaataataaaaaccacattcgtttactattggggctttctcataaagagaccacattcccaacatccttctttgtatatatttaaatgaatcaactaaaatacatagaaataaaaaatttctctatactattattttcagttgatccattcaaatcattttctaaaaacttatgtcacgttcatgtatacttttagttaaagaatgtttttttttttttggattggaaaaaaaaaaagctcaaaccttttaagaaaataaagctcatgaaaagagcgtgacgggtccaactcttttttttggttaaatttgcaatttaaacagattacttgttcatgttgacattgaaatagcaggtcgagagcgagagatcaaaatgcaatgtattatgcccttaatttatgcttttatatattttgtttattaatgtcacatatcttattatggatatactttgcaacggatcacaaatcttaccctgaaatatgcaacctgttaccggaattgaaatttcataacacactattctcagctcttcaagattcagtgtttcattcgtgaagacgaatgcatgttgttctagtctcgatacgagaaactgcgtttatgaaaataagaaaaagaagaataaattagcatgggcttgatttacacccgtccgtcaccgaaatgggctacaaataaatcatgggcttttaatattctaacttagaagaaatttggcccattgcttaaacacgaggcacaaaccatatattttttttgagccaaaaaaaaaagtcttgatattttagcattttgtcctttttggagacagtggtgtcagatagctgacaacctatataaataaataaataaaatagagttttcttttactcttactttctttattagtttcataataatatgtgtaaaagtaagagttggatatttttcgttttaatttctgccttcgaattagttacgcatacaaagcataagagacaagagacatagcgtaccaaaaaagaagaaaatagtgcaaaaatatcatatagttttctggtacgcctcatcaattccacccccgtacaccataattatatagaatttcaatatcgaaatgtcgacagcaacaaaattcaacatgtcgaataatattgttttaaatattccattttactagaagatgaaaaaaagagagaagaaagtaaccttttgtctttgtcaccttgacttaaacagtaatacaaaccccacaagtaaattattcaagttcaaatcgtagttaatgtttatatttgagaattgcaaatggtttaaacgaaaaccaaactacgaattacaaatttgaagaggacttgtactagaaaataaatagagaaaagaagaataataaatagtaacagaaaatgggaaagatgatgattcgtgtggaccaagtctctcctcccctttagcttgccttattggtaaagtatcctcctgcaagcaaacgtatctgtcactccttttttattttctttcaccttctatcttattctcattaattcttcttttttggtcaacttcatgtatagaaaataataccaaaattttttgatatagtaaaactattagaactgaatttcaaacaaaaataatacaaatttaagcaaaaaaatattaaaaataaattttaaagaatatttttacatataataaatatacatagttgatacttttatataattattaatttatgatattaatgagaccatatatttacatagaacattcaaaataattattatcttattaatctatcgatatatatcactttttatactagtttttggaatcttaataatttattaatttgtagaagttattaatttatagaggttttactgtacatgtcagcatttaacttttgataagcacaaaaccattacatattttccaaccagattattttctatttatcctagcgtttgtaaatctttgaactacaataatttatcaaatacaatataagatttttatactaaagatgtatacaatgcatttaacattaaaggaaacaaataaactctaatcttttaaaaaaatactttaccttttaaaaagagttattaatcacataagcaatatttaatttttcattatttttttcatcatctgtctaacatattactttttaaaaaatatttatcgttggatacttacttttcagaccacacactaggactagtggttcctttattttactgcatagaacgacaacaaaaagctaagcagtaacattttttagggttttattactgcaacactcaaaaatgagaaattattattaaaattgaaaatgaaaaatagtaatcgcaatccgaaattactttttttctagccttctaggaactcgaaaagaaagcaaatttcttgcaattgaaggtacctgcttctctttttctggtttgtctggtttcatattaaaaaaaacattttgacaactatatttctggtttgtctgaaaaaattgagaagaaaacctagaaacaaatacggtcttttttttttctttttatg

SEQ ID NO: 31336 - DNA, 3000 bp, Unknown; identical to SEQ ID NO: 9298
  misc_feature (1)..( 3000): 2750-1469P.txt file - cDNA_ID_3041114; gDNA_ID_1972067; Annot_ID_178418

SEQ ID NO: 31337 - DNA, 3003 bp, Unknown
  misc_feature (1)..( 3003): 2750-1469P.txt file - cDNA_ID_3041118; gDNA_ID_2214468; Annot_ID_182908
agtgttttcgagattgaagacaagggaccaagaatggtacttctacagtgcattagataagaagtatggaaacggtgctaggatgaaccgagcaactaacagagggtactggaaagctactggaaaagacagagaaatccgccgtgacattctgcttctcggtatgaaaaagacacttgttttccacagtgggcgtgcaccagacgggcttcggactaattgggttatgcatgagtatcgccttgtggaatatgaaaccgagaaaaacggaaacctggtggtactgtattgtccaaattactttcgaatttggtttatctgataatttccaaaagatctcaattctttgtttgggtgcagcaagatgcatatgtgttgtgtagagtcttccacaagaataacattgggccaccaagtgggaacagatatgctccgttcatggaagaggaatgggctgatgatgaaggagctctgattccaggaatagacgttaagctcaggctagagccgccgccagtagccaatggaaacgaccagatggaccaggtttgtgatttcttcttactctggcttcattacccaaaccttattagtttcattcaatatttcttgtatgcaaaaaactctgttgaaatactctctttcttagttttccattgggctgagtgagtttatttaactgcattagtctatttatgaaccaatctactatttcaacgttatttagtgcaaatgtacaaatttatctgatgcatcatttctcttgtttcacaagatattatatttattatctgcaaaactctgtgttgaagtgaagcttctcctaataactgtttcagcgggctgtgacgctagtaactccatttagtctgtaaccaactcttgtagaaatcaaccttataggtttatctgatgaatcaactctcttgatttagaagatatctgaattttcggtggtcttttttttttttgtttcttgggctttattcttaatcatactgattacaagatcgttcaaactttgcatcctcatttgaccagcaattttactgtgcatcatatgaactcacttaattgatcagtaaatgttgaccagaagtagaatgatttgttgttttagtgaaaatgcagttttaatccttcatcagcaaaattgattgaagcatttggtttcagataatttatgcgtcgtctggggttcacttgtaatttgttgtaggaaatccagtcagccagcaagagtctcatcaacatcaatgagccaccgagagagacagctccactggatatcgaatcggaccaacagaatcatcatgagaatgacctcaagccggaggagcataacaacaataataattatgatgaaaacgaggaaacactcaaacgcgagcagatggaagaagaggagcgtcctcctcgacctgtatgcgttctcaacaaagaagctccattacctcttctgcaatacaaacgtagacgccaaagcgagtccaacaacaactcaagcaggaacacacaggaccattgttcgtccacaacaacaactgtcgacaatacaaccactttaatctcatcatctgccgctgccaccaacactgccatctctgcattgcttgagttctcactcatgggtatctccgacaagaaagaaaagccgcagcaaccgctacgtcctcacaaggaacctttgcctcctcaaactccacttgcatctcctgaagagaaggttaatgatctccagaaggagattcaccagatgtctgttgaaagagaaactttcaagcttgaaatgatgagtgcagaagctatgatcagtattctccagtcaaggatcgatgcgctgcgtcaggagaacgaggaactcaagaagaacaatgctaatggacaataaaggctctaaaaacatctctccaggttacttcttattgcccttcgccttttatttagctttaatctccctaatactatgacccatctacatagctcctctagacagattgcgaactgtgtgaatctctgttgtaacataggataaaacggattcgagcccctgagctgagtgttttatccttcttctttttttgtgtggatgttcttgcatcttttgagaacattttttaggttgctccattgtcatatatcatctatctatctagtcttttcagacaaaaactatctttaagttgtctcgagaatgttgtcttcataacacactgagccttctctggggtagtagtggttaggtacgagggcataattgtcatttcctttgcattatcatttagatttccagacaagaagaactttctttgtttaaaataattgggaattatgttcggtctccggtaataccgtggttaatggtaaggatattttcggctaggattacgaatgtggatgcgtcagcgacgttagaagactttcgttacacgtaatttgcaataattttaaaaaagcgaaaaagtgtttggtacgattttttcaacttcaaatatattctctatttatttactctattcaaacaaaattgcatatagtatagaattttagtcatcttgatatttattgaagtggataaatcttcatttgcgcgaaccaaccaactacctcaacaaattctagagactttaaaattgatgactagtgcaagacttccacgtgtcagtttaataaagactgtcacccgaaaacagtcacagccagtcacatgatatgctctcgcggcacactttcctggaatattaaaacctcacggcgtgaaacttctttcgcacattttctagctacggtcgcttagctccgattggttcgtcgtcaccatcactcgtcttcaacgatttgcttcttttttttttctctctatttagtcccattttcctcaatttctaaaccccttatttcgaaatcattgttttgctctttcttttgattcgaattcgacagaacagctcttttaagttattcataaaccttgtgtttgagttttggtccatcgagtatatg

SEQ ID NO: 31338 - DNA, 3000 bp, Unknown; identical to SEQ ID NO: 9292
  misc_feature (1)..( 3000): 2750-1469P.txt file - cDNA_ID_3041118; gDNA_ID_1972067; Annot_ID_178416

SEQ ID NO: 31339 - DNA, 3003 bp, Unknown
  misc_feature (1)..( 3003): 2750-1469P.txt file - cDNA_ID_3041151; gDNA_ID_1972067; Annot_ID_178389
cagtccccagttgagatccctggtgttagcaatatggatttcttgaatatggcattcaatgctcggaaaagaaagcttggtcagccagagcttgatccaatccaggtgccttatcgaattaaatgacttggatttggtttgcactgtttcttacttgttgttgtttgctaaatggtcccaattgtagaactgtctatgtattatgtcttactgatatcacatggctcatgcagttctacagccacttggtatcaaaactcgaagttgtgaatatgaagaccgattttctcaacagaaatgtcaatgaaggatttagtggtggtgaaaggaaacgcaatgagattctacagttagcggtaatggttctgcttcccttgtttctcagtatccataaggactgcatatgataagaaacaaatgtgattagagaaggtagtggattactaagcttgttccatgctacagtgtgcaaaaccacaaggctaatagttaggaatttcaggatatctgggtagattagcttaagcagttacaggttttaccataagtagacgcggttattgcatggcagttagtattctattacaagtatttgactgcagttttagctaaaaagacatggcatgttatatgtcttcatatctctttatattttcctgatcttgaaatatctgcctcccaaggagtggtcatttctggtttatcgataacatgagaacactattagtctcctattctttgtaagcaatatatggaaagaggtcatggaagtacgctaatgcaacgttttcctgtccttgcaggtccttggagctgagttggctatactggacgagattgattcagggttggatgttgatgctcttcaagatgtggcaaaggcggtgaacgggcttttgacaccaaaaaactctgttctgatgataacgcactaccaacgcctacttgactacatcaaaccaactctcatacatatcatggtgagcattgttgccaaaccagccttctttactggctacacaatgatcatatatattttggtaagctcatgtatgtttccttgggtttcaggagaatgggagaatcattaaaaccggagacaactccttggccaaactactggaaaaggaaggctacaaagcgatatccggttagttatcgcggatcatacatataacctgtcttccttctttgagagaccatggttattatatgggacaaatacaatggaagctaaagctgatgattggaaactgaaatctatcactacaatctttgacccgtagttttggtttgcaatttgcatgacaaactactttattgggatgtgaacagtattccacacctttttgtaactaacaagtttaaaattcagttaataaattttgttattataaatgctcttataaagtttgagactttaagtggatcaaatccaatcaaacctagtggttacttacattacttgagaaatttgacaaaataaaatttaatttgattattctatcgcctgctgctgctggaacgagttggtaatagaaaacaaattcataatttatgacaagaagaacgcaaaattcgctgatgattattaaacccaaacgcgtttttcaaactcgttcaatcaatttccttcatcatcttcatcttcttcgtaattgacttatcgaacaagattacacctccctttagctttttatgcaaatgtagtgcttttaagcattctctcgatttccctcccttattttccgacaaataccaaaccaatattgttccttttcttttcaatcccagatcgatctctttgttttcagacaatttctgttgtctggattcggttcattgcatcgttctttgtgttgggttcgtttaaactttcgattttcccattttgaaaattttgatttttttcttgtggcagattgattgttgttgtgcaagattcatccgttgcatcgacccgagtagggtttttgcttgttccatcggtgttcggagtttttaaaatcattgcctgatccggagtgatcaaatcctatatattgtcgttgcacaagagaaccaagtcttagattataaagagatttgactttcacttttagtgtctatgatcattaggaatgagatcagatcaggtcaatttgtgttcttttgatcagatcttgatgtggaaagcttgatgctgttgattataagtagagagatattttgatgggtaatgcttgcgttggaccaaacatttctggaaatggtttcttgcaaactgttacggctgcaatgtggaggccacggatcggagctgagcaagcttcttcttcttcccatggtaatggacaagtttctaaagaagcagcttcagaaccagctactgatcaagtccagaataaaccccctgagcctatcacaatgccaagctcaaagaccaatcccgaaactaaactgaaacccgatctagagatccaacctgaagaaaagaaggagaaagttcttgcagaagaaaccaagcagaaagttgttcctgaagaaagtaagcaggaagttcctcctgaagaaagtaagcgggaagttgttgtgcagccggagtcagcaaaaccagaaacaaagtctgaatccaagccagagacaacaaaaccagaaacaacgtctgaaaccaagccagagacgaaagctgaacctcagaagcctaaacatatgaggagagtgtccagtgcagggcttagaactgagtcagtgttgcagaggaaaactgaaaactttaaggagttctattcattagggaggaaacttggacaagggcaatttgggacgacgtttttatgccttgagaaaggtactgggaacgaatatgcgtgcaagtcgatttccaagaggaagcttttgactgatgaggatgttgaagatgtgagaagagagattcagataatgcatcacttggctggtcatccgaatgttatatctattaaaggtgcttatgaggatgttgttgcggtacatcttgtgatg

SEQ ID NO: 31340 - DNA, 3003 bp, Unknown; identical to SEQ ID NO: 27198
  misc_feature (1)..( 3003): 2750-1469P.txt file - cDNA_ID_3041155; gDNA_ID_1972067; Annot_ID_178388

SEQ ID NO: 31341 - DNA, 3003 bp, Unknown; identical to SEQ ID NO: 27200
  misc_feature (1)..( 3003): 2750-1469P.txt file - cDNA_ID_3041159; gDNA_ID_2684220; Annot_ID_191827

SEQ ID NO: 31342 - DNA, 3003 bp, Unknown
  misc_feature (1)..( 3003): 2750-1469P.txt file - cDNA_ID_3041167; gDNA_ID_2926133; Annot_ID_197034
ccgagctgagaatgaggatggaatttccaccctattctaccttcaaagaatttatgaagatgaatgggtgaattttctggagcggatgcgtagagagggagcagagaatgagaatgatatctggtcaaagaaggttagagatcttcgcctctgggcttcatataggggacaaacattgtccagaacagtgcgagggatgatgtattattatagtgccttgaagaaacttgcctttcttgattctgcttctgaaatggacatcaggatgggaactcagattgcccctgaggcacgccgttcgtactacacaaatgatggtggggataacacactgcaaccaacaccttctcaggaaattagcagaatggctagtggtataacccacttgcttaaagggtctgagtatgggagtgcaatgatgaaattcacatatgttgtggcatgccaagtttatgggcaacataaagcaagaggggaccatagagctgaggagattctgttcctgatgaagaatcatgacgcccttcgtattgcatatgttgatgaggttgacctgggaaggggtgaggtcgagtactattcagttcttgtgaaatttgatcaacaacttcagagagaggtggagatctatcgtatcagactgccaggccccttgaagcttggtgagggaaaaccagaaaaccaaaaccatgctctaatctttacacgaggagatgcgattcagaccattgatatgaatcaagataaccattttgaggaggctcttaagatgaggaacttgttggaatcattcaagacttactatggcattaggaagcctactattcttggagtccgtgagaaagttttcactggttcagtatcttcactcgcatggtttatgtccgctcaggaaacaagttttgtaaccttaggacagcgtgttcttgccaacccactgaaagtgaggatgcattatggtcatccggatgtatttgatcggttttggtttgtgcctcggggtggaattagcaaagcctcaagagttataaacatcagtgaggatatatttgctggattcaattgtactttaagaggtgggaacgttacacaccatgaatacattcaggtaggcaaaggaagggatgtgggtttgaatcagatctctatgtttgaagccaaggtagcgagtggtaacggtgagcaagcattgagcagagacgtttacaggttaggtcacaggctggacttctttagaatgctctctttcttctacacaacggttggctactatttcaacacaatgttgatagtatttactgtttatgcattcttgtggggtcggctttatctagcacttagtggtgttgagaaaatagcaaaggataggagtagcagcaatgaagctcttggtgcaatcttgaatcagcaatttattattcagctaggacttttcactgcacttccaatgattcttgaaaattctctcgagcgtgggtttcttccagcggtttgggacttcataacaatgcagctgcaacttgcatcgtttttctacactttctccatgggaactcgaacccattactttggccggactatactccatggtggagccaagtatcgtgccactggaagagggttcgtggtggagcataagaaatttgctgagaactacagattgtatgctcgaactcatttcattaaagctattgagctcgcgattattctgttggtatatgcggcttatagcccgttggctaagagttcgtttgtttacatactgatgacgatttcgagctggttccttattacatcttggattatttctccatttctgtttaacccttctggcttcgattggctcaaaacagtaaatgattttgatgatttcattgcatggctatggtctagaggcgggttgtttacgaaagcagatcagagttggtttacgtggtggaatgaggaacaagagcatctgaaaacaaccggagtgtggggaaaactgcttgagattatacttgatcttcggttcttctttttccagtacagtattgtgtaccatcttcgcattgcagagaatcgaaccagcattggtgtatacttaatttcttggggatgcatcatcgggattgttgcgatatacatcacaacaatctatgctcagaaaagatattctgtcaaggagcatataaaatatcgattcattcagttcttagtaattctccttacggttcttgtggtcgtgatgatgctgcagttcactaaacttacagtagttgatttgttgataagtctcttggcttttgttcccacaggctggggattgatttctatagctcaagtactgaaaccgtttctgttatcaacagtggtttgggacacagtaatctctgtggctcgcttttacgaccttttctttgggctgatagttatggctccagttgcattgctttcatggttgcccggttttcagaatatgcaaacacggattttgttcaatgaagcttttagcagagggttacagatttctatcattctcgctggcaaaaaatccacttgaagcaaatattgggtatggttcagaataagatcttctttatatgttacactgattactattaactaaacatccattaataagactgatttcatcatatttgcagggttcttaaagtttttgaaatgagttggtctgagaaggttgggcgatatccttttctctagcaaaaaaagttttgcttgaagcagcttatggtagcctggtttaatatcatcctccaccgttttgtggcattgctccaggttaagcctggtttttcctcatggtggttagcattttggagttgattgtttgaccttggtttggcttgtttataaacatataaggtatgtatctatcttcatttgctttggtgactgattttatttgtcaagaccttacgattaaatacataattttgtcatatttgcagggttcttgatttgttgagagatggtaatatgagggagcttagaaaaatg

SEQ ID NO: 31343 - DNA, 3000 bp, Unknown; identical to SEQ ID NO: 9313
  misc_feature (1)..( 3000): 2750-1469P.txt file - cDNA_ID_3041167; gDNA_ID_1972068; Annot_ID_178511

SEQ ID NO: 31344 - DNA, 3003 bp, Unknown; identical to SEQ ID NO: 31342
  misc_feature (1)..( 3003): 2750-1469P.txt file - cDNA_ID_3041167; gDNA_ID_1621185; Annot_ID_174384

SEQ ID NO: 31345 - DNA, 3000 bp, Unknown; identical to SEQ ID NO: 15416
  misc_feature (1)..( 3000): 2750-1469P.txt file - cDNA_ID_3041184; gDNA_ID_2926133; Annot_ID_197059

SEQ ID NO: 31346 - DNA, 3000 bp, Unknown; identical to SEQ ID NO: 15416
  misc_feature (1)..( 3000): 2750-1469P.txt file - cDNA_ID_3041184; gDNA_ID_2926133; Annot_ID_138826

SEQ ID NO: 31347 - DNA, 3003 bp, Unknown
  misc_feature (1)..( 3003): 2750-1469P.txt file - cDNA_ID_3041184; gDNA_ID_1972121; Annot_ID_179012
gatcttgctgctgctggtatccaaaatttatcagatttggtaacatcaaactcctcaagaattctttcctttcttggtttctttaaaaaaaatcatcaagaatatgtttcttgattcattctttttttctacaactttcccactctttaaacattatttagcttcatgatttttctacgcagagtgatgatgattccaagaatcaaatgctaagaaagaaagagttgttgcttcaaaacatagaccatgcagtgaatctattcctcatctacgttttgacattatccatttttcctggattcttatacgaaaacacgggacaacacggactaggtgattggtatgcacttatcctagtagcgacatacaatttttgggatttgttcgggaggtacgcaccgctggtgaaatggctgaagcttgagaatagaaaggccctaacgattgcggtcttgacccgttatttcctcgttccggcattctatttcactgcaaaatatggtgataaaggatggatgattatgctcgtttctattttgggattaactactggacatctcactgtttgcattatgactatagcccctaacgggtacaaggtaatctatctactctccctatgctgttaaccaaattaatttgaatatatctagaaacttagattagttcatatttagaaaacaaaacacattatctttacaatttttttgtgttataccctttgcttttacgatttgaaaatataacacaagttttttttgacatataaatacaaacactataataaacaaacgacctctaccttcatatttaatctgattttgtattttgtgaagggtccggagaagaatgcattagggaatttgctggtggtttttattttaggaggagcagttgtaggaatttctttgggttggttatggcttattggcaagaaatatgctttctgagttctcatcattttgtgcaattaattccgatgaatctgactctttatggcaaaaaatgagaagcttggtgcctcgctcgaacctaactgtttattcatgaaaaaagaagaagaagagaatactaacacgtaaaactttcgaaagcttgaagtgatgaattcttatttcgatgcttcaccaaattataaaatttcactttttcaactccacaatttgctgtatctattttagttaatattttagacccatttgatcattttattaactattttctaaaatcttatatggtgttatttaaccatagatttttatagaaactaaatcctaacagtctacttttgtttgatcactgattataattttatgcattaaagtttagcattgttccatcagatatttgtaaaacaaaattaatagcaaaataaagtcattcatttaagctagtaacggacggttttcttcgagagaaaaccagtccggagtagaagagcttacatgggaaaacatagaacctcgtgctcttttcttcttagcaagacaatcagcagagacattgtttaagtatgtaataaaagataaagaaaaacgagaaaaactaggctttgaagcattaaaatcttttcactccgaagaaaaagcggactactcatcaggagtgttcaaaagttgtgtcgactccttactatctgtctataaaataatgtcgaaaatggataaaaatataagaaatcgtattgcccataagagagcctcaacagatatttgtaaattatatttaagagttttaaaatttggtcttattaaccaagtgttcatggccaagtgctttcgtcatgttggtccagactagagaacacttcttttaatcatgaaaacttaactcattgtttcctttatgtaaacattttaaagtggcaaaagttttttcttaggtatctacaaatattgagaactagtttcggttacgatccaaaaaagaagtaggtgttatttagttaagattttaaatattttgctaaaataagatttcaggcattttcgtgtaatttacaaatacaaaatgtagtgtgtaatttagacccatatttcctttcaaactaaccgatcaaaacattgatcacaaaatccttgtgtgcaactaattccccaaaaaagaagaggagaatactaacacgtaataatcaatttgaggtgaagtgtttatttatttattttgctaaatatttgaggtgaagtgttattttgataaatgcttcacttatcctttttcttttttacaacaaaattagttcatccatttaaattagaaacggatgattttttttaggagaaaaccagttcataataaaagattttatatgaaaaaaagataaaactttgtgctttttctttttcggcgaggcaattaataccaatattgtttaaacgtaaaataaaaagataaagaaaaacgataaaagttaggttttaaaatattaaaattttataattctagaaatgtccaaaaactaagtcaactacttcaaatgcttcacttatccaacttcaccgattctcatcgagtctatttcatacatagtttttattttcatttattacgtttagaccgatctcacagatatgtggatatttaatgattaaggattttaaagaaagttttgctttcatactatatcgtcaacaagttgtctaaaaataggaacataaaaaaagctttcacactttgaattctttaaattctataatcttttctttttctttttgagtcttactttatcctttcatatttgctgtcacaccttgaaaaggtctattattttactcgctcatctcctctttttaagaatcttgttttgaatcttcatgaaagctttgctcgttaaaaaatcaacaaactcgttgactctgcaaaaccctcatgtgctaagtttcaagtaagtatctctagctcctttatttgctccccagcaaaaaaaaaggaacatagcatcatcttgtgtttgatccaattcttgaatcttgaaaacaggtttatgttcttttgagctcaatg

SEQ ID NO: 31348 - DNA, 3003 bp, Unknown
  misc_feature (1)..( 3003): 2750-1469P.txt file - cDNA_ID_3041184; gDNA_ID_1972068; Annot_ID_178479
tcaaagtgtttaaagttccatttcttgctttgtttgtgttttccctgttacagtgatattcttagcaatctcaaccttcatagaactactctgcgtgattttatatgcatatgtgttcccaaaactccccatcgttaagtattaccgaagaaaagccgcttctgaaggatctaaaactgttgttgctgatcttgctgctgctggtatccaaaatttatcagatttggtaacatcaaactcctcaagaattctttcctttcttggtttctttaaaaaaaatcatcaagaatatgtttcttgattcattctttttttctacaactttcccactctttaaacattatttagcttcatgatttttctacgcagagtgatgatgattccaagaatcaaatgctaagaaagaaagagttgttgcttcaaaacatagaccatgcagtgaatctattcctcatctacgttttgacattatccatttttcctggattcttatacgaaaacacgggacaacacggactaggtgattggtatgcacttatcctagtagcgacatacaatttttgggatttgttcgggaggtacgcaccgctggtgaaatggctgaagcttgagaatagaaaggccctaacgattgcggtcttgacccgttatttcctcgttccggcattctatttcactgcaaaatatggtgataaaggatggatgattatgctcgtttctattttgggattaactactggacatctcactgtttgcattatgactatagcccctaacgggtacaaggtaatctatctactctccctatgctgttaaccaaattaatttgaatatatctagaaacttagattagttcatatttagaaaacaaaacacattatctttacaatttttttgtgttataccctttgcttttacgatttgaaaatataacacaagttttttttgacatataaatacaaacactataataaacaaacgacctctaccttcatatttaatctgattttgtattttgtgaagggtccggagaagaatgcattagggaatttgctggtggtttttattttaggaggagcagttgtaggaatttctttgggttggttatggcttattggcaagaaatatgctttctgagttctcatcattttgtgcaattaattccgatgaatctgactctttatggcaaaaaatgagaagcttggtgcctcgctcgaacctaactgtttattcatgaaaaaagaagaagaagagaatactaacacgtaaaactttcgaaagcttgaagtgatgaattcttatttcgatgcttcaccaaattataaaatttcactttttcaactccacaatttgctgtatctattttagttaatattttagacccatttgatcattttattaactattttctaaaatcttatatggtgttatttaaccatagatttttatagaaactaaatcctaacagtctacttttgtttgatcactgattataattttatgcattaaagtttagcattgttccatcagatatttgtaaaacaaaattaatagcaaaataaagtcattcatttaagctagtaacggacggttttcttcgagagaaaaccagtccggagtagaagagcttacatgggaaaacatagaacctcgtgctcttttcttcttagcaagacaatcagcagagacattgtttaagtatgtaataaaagataaagaaaaacgagaaaaactaggctttgaagcattaaaatcttttcactccgaagaaaaagcggactactcatcaggagtgttcaaaagttgtgtcgactccttactatctgtctataaaataatgtcgaaaatggataaaaatataagaaatcgtattgcccataagagagcctcaacagatatttgtaaattatatttaagagttttaaaatttggtcttattaaccaagtgttcatggccaagtgctttcgtcatgttggtccagactagagaacacttcttttaatcatgaaaacttaactcattgtttcctttatgtaaacattttaaagtggcaaaagttttttcttaggtatctacaaatattgagaactagtttcggttacgatccaaaaaagaagtaggtgttatttagttaagattttaaatattttgctaaaataagatttcaggcattttcgtgtaatttacaaatacaaaatgtagtgtgtaatttagacccatatttcctttcaaactaaccgatcaaaacattgatcacaaaatccttgtgtgcaactaattccccaaaaaagaagaggagaatactaacacgtaataatcaatttgaggtgaagtgtttatttatttattttgctaaatatttgaggtgaagtgttattttgataaatgcttcacttatcctttttcttttttacaacaaaattagttcatccatttaaattagaaacggatgattttttttaggagaaaaccagttcataataaaagattttatatgaaaaaaagataaaactttgtgctttttctttttcggcgaggcaattaataccaatattgtttaaacgtaaaataaaaagataaagaaaaacgataaaagttaggttttaaaatattaaaattttataattctagaaatgtccaaaaactaagtcaactacttcaaatgcttcacttatccaacttcaccgattctcatcgagtctatttcatacatagtttttattttcatttattacgtttagaccgatctcacagatatgtggatatttaatgattaaggattttaaagaaagttttgctttcatactatatcgtcaacaagttgtctaaaaataggaacataaaaaaagctttcacactttgaattctttaaattctataatcttttctttttctttttgagtcttactttatcctttcatatttgctgtcacaccttgaaaaggtctattattttactcgctcatctcctctttttaagaatcttgttttgaatcttcatg

SEQ ID NO: 31349 - DNA, 3000 bp, Unknown; identical to SEQ ID NO: 9305
  misc_feature (1)..( 3000): 2750-1469P.txt file - cDNA_ID_3041196; gDNA_ID_1972121; Annot_ID_178990

SEQ ID NO: 31350 - DNA, 3000 bp, Unknown; identical to SEQ ID NO: 9305
  misc_feature (1)..( 3000): 2750-1469P.txt file - cDNA_ID_3041196; gDNA_ID_1972068; Annot_ID_178453

SEQ ID NO: 31351 - DNA, 3000 bp, Unknown; identical to SEQ ID NO: 9328
  misc_feature (1)..( 3000): 2750-1469P.txt file - cDNA_ID_3041267; gDNA_ID_1972069; Annot_ID_178552

SEQ ID NO: 31352 - DNA, 3000 bp, Unknown; identical to SEQ ID NO: 9329
  misc_feature (1)..( 3000): 2750-1469P.txt file - cDNA_ID_3041271; gDNA_ID_1972069; Annot_ID_178550

SEQ ID NO: 31353 - DNA, 3000 bp, Unknown; identical to SEQ ID NO: 9327
  misc_feature (1)..( 3000): 2750-1469P.txt file - cDNA_ID_3041275; gDNA_ID_1972069; Annot_ID_178549

SEQ ID NO: 31354 - DNA, 3000 bp, Unknown; identical to SEQ ID NO: 9330
  misc_feature (1)..( 3000): 2750-1469P.txt file - cDNA_ID_3041283; gDNA_ID_1972069; Annot_ID_178547

SEQ ID NO: 31355 - DNA, 3000 bp, Unknown; identical to SEQ ID NO: 9331
  misc_feature (1)..( 3000): 2750-1469P.txt file - cDNA_ID_3041300; gDNA_ID_1972069; Annot_ID_178541

SEQ ID NO: 31356 - DNA, 3003 bp, Unknown
  misc_feature (1)..( 3003): 2750-1469P.txt file - cDNA_ID_3041304; gDNA_ID_1972069; Annot_ID_178540
cccaacatgcatagtgtttgacacaacaatatatgacagctaacttttaagtataattcgaaatgaactaaatcgttgattatacataagtttaggttatgagtttttgtcttttgcaatctattaattaacaattggtttgtgaccaaattgttcgttgagtgttgtaagaaccaacctatttcaatcagtttcttaaaaaaggaaagggaaggcaaaaaaaaaaagaactattagcagccttacttttctatgataatattagtcagtagggaaatatatatatatatatatatatatatatatatatatatatatatatataatttggaccgacgactgattacaataactgttaaagcttaaaccggcggaacttaatcttatataattaatatgattgtaattagctgtatgataattttatgttgttaatgatgatgtattaccttttcgctatagggtttatagattacatctatacttctgcatacaattagatattaataaagttataaaaacaaattaaactgaataattgtgtgtgtgttacgttgcatgtgttattagttatggagaaatatgatttacgtcttctgaaatgctatcaacgattggtttcagatttaaagaaactatctgaccaaaatcctgagatatcttaattagatatatctatttaaactttcaagttgttatatgttaaacagtaaatggcgttttccgtattactcatctagtagatcgtagtaagttatatacgtttttacaatgaaaggtttcggcaatgtaagttgtatacgtggtacgagtgagtatccatacttctaccggaaagaatagagatcaagaaaaatgaatataattaataaagctctaccgaggaaaagaagagtgaaggataatggagaaaaataagaaaaaagatgatgagatctgaattaagattttattattcacaattacaagaataggtacagtcctggtttgtgctaaaccaaattcgaatatcaaatataaattacttataggttcgactgtaaaatgagatatgaaagaaagaaataatatatgatgatgtaatgcatgagaaagtccaaaatgatcggcatatgggattaagcgattccatatagttaagtcaagttactatttcagataaatggataagtttgtcgtctatatgttctgttatctccaaacccaaatctataacattgcgacatttttgaatcgttaacggcaaaataagtggggaggggggggggaaggaaaaaaggaaggacactgagattttgataaagttcggtagccaaatttgtgcatgacttttaagaaaatacgtatgctgatccaaaaacaaacaactaaatagattttagtttgagaaaatcgaagtaacaaaattattatttaatatatagtgtgagaatttaacagctactaataattatcataacacgaattaagtgtaatagtaatatatgtaggaaaatggtttagcaccactcacttgattaactcgacttaaaccaaatataaagtaatatttatagatgtagttggttgtatttttgcaagctttggtactcgatatctaaatttttaatggaaaaattagtcgagtggtaattcgttatatataagaaaatattttgtttgtaattgtgcaaactttagcattggacatctaactatattctgaaaaatcagcggaatgataaaagttcggattttccttctttttatttaagtaaacataattggtgttctgaaaaccaaaagaaggaagaaggcaattaagatttgttaaagttcgtcacgatattgatgtcaagaaaaaaggaaaaaaaaaaaaaatcgtcacgatggtatcgtcaatttgtctagtggattttgaaaagccgtgtgggcttgactttgaccgaacaaggcacacgtatacatctagtactactgaagaaatctctcattagaacgcaaaccacgttccgcacactcttaatatactattagtctattactatcaccaactagttgtcattttttttgtcaaacgtgctaattaattcacaaatagaagtattaaacttcctaattaagcacgcctttactacatttcattattattatacatgtaatcaaccatttcttttatcccacatgtcatttgtagtcctgattttatgactttatgcatcaagttatctttttttttgtcactccatgcatcaagttatctaaacaacataattattgtctgaaaaatctaagatgatatacaacatatgtatttaattacacattaggcttgtttaacaattcttgattatttttactctttttgggtgagttcttgatggatgtcttgaattacaaaactacatattctgaaaatattaaccttgagtttaggccggctatgctataacgaaaaataaataaaagcaactaacccgacagaaatgtcaaccaactatccaaaatgaaaaacaaacgtggagagcgtcatattattagtaggccaatcacacaccaaatgtttgtttaacaaaaaaaataagaatgtcaaccaactatccaaaattaaaatcaagaatacatttcatatgtttccaatatgtttttcttaaacaaaattgggactaaagattggaccaaatacgtgtgcgggtggacccgatagaagccgagttgagtctaaagactaaaaagtaaacaaaaaatgataagaccatcacttagtttattgcatgaaaatgaaaagcacatgctcctctctctctcttctgcctctttccatctagtttcctcttaaaactccattatatatagaaacaaaatcttttctctcttcaacaatcccaccattaaaaaagaagaacccaagatcgactcttacttcgaatctctctcaactttcttcctcagcttacgggaacttccacacatatacatccacaagaacccatatcgaagattcatcctacatatatttacatg

SEQ ID NO: 31357 - DNA, 3003 bp, Unknown
  misc_feature (1)..( 3003): 2750-1469P.txt file - cDNA_ID_3041308; gDNA_ID_1972069; Annot_ID_178538
tatctggtggccgctcgacaagacgtaagtgtattggaaacttgaaggttcttatttccaagtgtactgtaatccttgtttttccgttgatggtcttacactgtgcagattttatgaaggcgtcatagattcctattgtactcgtaagaagatgcatcgggtgagagaatatctctgatctgctattcagttctgttcctcctatcagaatcgtgcctgtttcttaattgattgatgtggaatgtttgttcccccactggttgcaggtaatatattctgatggagattccgaagagcttaatctcactgaagagcgctgggagttactcgaggatgacacttcggccgatgaggtacaagtttcttctatttgttttggaataaagtgtaatcgccgtgcttaatgattttcccacaatcgatcagcaggataaggagattgatctgccagagtccattcctttatctgacatgtgagtaaatcggttcattactgtgatctgtgtaaagttgcaatcttgatcttctatggtattaaaggtaatagtctattccggttcttatgatgttgcagaatgcagaggcagaaagttaagaaaagcaaaaacgtggcagtgtctgtggaaccgactagttcctcaggtgtaaggtgtgtgagaatttactaaaattcaagttattgtttatatgaaattttgatgatgacttgttctgagaggattggcgtgtatattgatggtgatagatcctcaagtagaacacttatgaagaaggattgtggcaaaaggttgaataaacaagttgaaaaaacaagagaaggaaagaatctaagatcgttaaaagagttgaatgctgaaactgacaggacagcagaagagcaggaagtgagtctagaagctgaatctgatgacagaagcgaagagcaggaatacgaagatgattgtagcgataagaaagaacaatctcaggacaaaggtgtagaggctgaaactaaggaagaagagaaacaatatccaaattcagagggtgagagtgaaggagaggactcagagtcagaggaagagccgaaatggagagaaacagatgatatggaggatgatgaagaagaagaagaagaagagattgatcatatggaggatgaagcagaagaagagaaagaagaggttgatgataaagaggcaagcgcaaacatgtctgagattgagaaagaagaagaagaagaagaagaagatgaagagaagagaaagtcatgaaggagttacatagagttagagcattgtaagctaaaaccatttcagaaagattctttctgcttagacgctctggtttatctttcttagtagatttgttgatattgaaccaagttttagatgaggtcacctggtttgtgtttgtgtcttgagagtttgtgacatttgtaattcattatcgttgttacatagtataaaccatatgttatgagccacacgcgtttctctgtcggttataaaaattatttacaacgtgcgaatttgaaattctgtgcactattgatagagaaaccacttggaaattgttacattcaaccatcttggactcgacggcttgaatgactaatgagaccactaatccttgtccacatcttctctcattctcaaaagaaggtattaaataagttaatactcaacaatcaacaacttaaatcaggtgacaaaaaaagaaattacttcaatcatagttgacttcaataatcatccttctttctttgttaaatctcatatgtaaaatagatgtattaacttgaaacactgttcaaagattggctcaaaaggttttgcaaacgaaagtataaactataggagttttaatattctattttataataaaaaaagggactattcttaacttattagttactactgaatctaattttttattactttcatcaaaaatattaaaatcaattatagttgttttaaccacgtacaaataatattagtttctctaactaataattttaatccttttttttaattctcttttatctttataaaattcgctaccaaaagacatataaatctaacggtcaataatgttgtacttactttgctgaaaacaaaaaatataaacgaaacttttgtcaggaagatacatcaaattaatctttgttaaacagactgaaatatggatataggttcaggggactttcctattagcaaaaagatggggctagattttaacttttaaaagtcaaggtcaattttctcaactactcaccaattgtttttttttatgtggtatctaagtaaaatagaaaaacacaaatttagaataagataatgacaccaaggagcaacaaataaaaaattaaaaaagcattgctgattgctcatagatttgtttgtatagaagatcttaaatagcatacgtacgattactaactttttattaagttcttctagaactccatatacatatttggtttataaacttattaattagttaggaattttttatttttgttgatcttaaaattcatttagtaatttcgtattcgaagtgttataacttaaaaaaaaacattaaggttccatatggcaaaaataaaataatgtaaaagtccgattcacaaacacctttaattgaccattttgtttggctttttaatgcatttacacttatcacctaaaactttgaaactaatgtacttctctagtactgttctaagataaacttagtaaaatatctttcacaataaattcttcatttaccaaacccacactctttcaatatatcagaacaaaaatatactaatctaaagtttttcagtttgttcttttgaaaaagaaaagaattatcataagttgactcaccaactctttaccatggttaagtaacttgttttgaagtctctatatatacaaatcactaacgacacatcataacatactactctcttaagccctttcataaccttgtaaaccattaagaggctttgctcaattacaagaagaagaaaaaatg

SEQ ID NO: 31358 - DNA, 3003 bp, Unknown
  misc_feature (1)..( 3003): 2750-1469P.txt file - cDNA_ID_3041316; gDNA_ID_1972069; Annot_ID_178535
gttgctatctttatgagaatgggtcgtgtattgtatctttcatatttctatttacatgatacatgtatcgtgtactaaagaagcttttgagatggagcaataattgtggatccttttctctatcgatcgacatacattattttgcataatatgttcttctccatgagaatggaactcttgcgtttgtgtggttgtaagttgttagcaaagagaatgatgataaaagcgatggttcttgacctttccttgtcacagaatgtgactcacagtcgactctctttttgtaaggaaataaatgatttgttttagtgtataatccttgcatgtattaacaccaattatcgatgcagatggttgtatagtttgcaagtataaaacatgattcctcccctcggaaattcaaggctttattaagcctttaatctccccatgcaaaaactatccgcaaaatatgcaattatgataagatgtatattattatcacgttccaagtgaggctcaaattaaatattcttgtttactaacaaaagataggtgaaaacaagattttacatgtcaaataaaagatttctgtgagatgtatattcttatcattaaaatttaaaatcacttttgagttcatctctttatttaattctttcgaatgactcttgcatataatttgtatacttttaacgttattccttttctatctataaaaaaacgaagaatctgtgatgacccgtcacaactctttagaatcaaaattaaaacactaatttattgctttgtcctcacaatcgtatgactatgaattgaagtgtcttggaacaagatttaattataattatttctctaaggtataagtttcttgaaccttattcgcttttataacttatgcccaagtatacatacccttttctaagttttatagaataagtagaggagtgagctagtggtctcggtttagattaaaaaactatgtgtagatatagataagaggtctatatatccggagaatatatacctcctaagactaagatagtcatttaaatttcgtccattcccttcaagttaaatcacattatgtcatagaataaaaatttggtacagtgagaacgcagatataatcgaaacaaaacaataaatcatgagaatgtattaatgcgtgtggtggaaatagattgttgggagtggaggaacaaatcaggaccgtttgaaagatgtgaagcgactgtttgttctaaagccccacgtcacatcgcagggcatcacagacatagtaactgtgagatttcatacattattaatttggatgattttagtgaatccatttacttcgttgtaaaaagattactcaagtctgattagttacttttctaaacacaatgcttgtaatatattcgacaattctatatagcataatttttatgtgcatgttaataacaacattagtgactataaatgatagatggtcaaaagacttcaaaaacaaaaacaaaaaaaaaagtaaagaggaaaacaaataaatgtaaaagaaatgataatgattttgaaggggatgtatctaagagtagaggggagggggtgtaaatagaaatgttgtagggtcgaataaaattgtcaaaagtccggtccaaattattttgtccctcactaatcgtggctaccatgaattgatacaactttattccattttcttcttaattagttttacaagtatatcattatcataaataatagctggctcccttcactgtgttcgttgagtcttattttgtcttcttttccttttggtttttcattcttttgtgggttgggtaaccataatttgacatgatgttttaaattagcatatcatttatttgtaatatacataaagtttttaactcttctgtatataaatgtatgcacaaaatatctaacgatgtgtataagttttgtatagattggagtttcatttgtttgaatcatagttttgaataatgtatatagtattagtctatacgaaatgctgtatgaaatcataatgtggcaggtcataattatttgaaacaggttatcgtgcatgcttaaaatttataaagaaaaacagtgactattttctaaagctattcacaactcatcaggagtttgatactcatcctaagattgctactgaaccacacaattaaagtgagcgtgataatagtcgtgtcaaacaacaaacaatttctcccaatctttttactccattaatcgtcgttcgatcatccgataatcttttgaatccctgagcagatcataacaaaaacagagccgtgcgtgaacacaagcaaaccataccaacagtcgagaacatgaaatatttataccgcgattaattcttcacgtgcttcttctatctcgtcattgcttcgacgttcttttatatatgacgaggatcgtgttcctaatctctcctctagctttttttattcaattctttcattttcttcttcacctcctcatcatctccatcatcaacttgcttcatcattttttttagttttacttggcatgtaccagtaaagttctagttccaagattggccacacaaagttttaactaaagcaagcctgacaagtaatcacccctaaaagacggaaacgacacacgtttttacgtaacacaaaaaatggttaatctaaagcccaataaaaggcacattggttcacattaagaagaaggagcactgaaacaatgatttaagtatggtaatctagtggaccaccaataaaaagcccattaattcataggcccaatattaacaacctgcgtttggaacaaactcacttcaactacaaaactcgaccctttgaaataagaagaagaaatctcggtgagtttttttgtggagattgaattttcttatctacctccactattcaatcgcatggcgtcagaggcccattagaaaagtcaagccaggggttttggattagatcgttcgttcttcaatttaaaagttttcttctttcttgttcggaactcagaaacacgatg

SEQ ID NO: 31359 - DNA, 3003 bp, Unknown
  misc_feature (1)..( 3003): 2750-1469P.txt file - cDNA_ID_3041323; gDNA_ID_1972069; Annot_ID_178533
aattactttatatttctccagcaactgcaaggagaagctgaaggagtacgtgatagatgggtttaagtctcatctcttaccacttccggtaagataatatctttgctttatatgatctttttaatataaagctatttacaatcttaactaaatgtttgatgatttttcagggtactgtctacacagtgtgcggtgggcccccttgccaagggatcagtgggtataaccggtatagaaacaatgaagcaccgcttgaagatcagaagaaccagcaacttttggtgtttttagacatcattgacttcctcaagccaaactatgtgctgatggaaaatgttgtagaccttcttaggttttcaaagggtttcctggcacgtcatgctgtagctagctttgttgcgatgaattaccagacgcggttgggcatgatggctgctggatcttatgggctccctcagcttagaaacagggtttttttatgggctgcacaaccatcagaggtaaatatatgttacagaatatttaccactaatatattgtcttttgaggaacatgatctttattgctctctcttgatttgtttgacagaaacttcccccttatcccctcccaacacatgaagttgctaaaaagttcaacacacctaaagaattcaaagcaagtgtggacagttgtacatttaaatttaatagactcttataagttataactgcattgcttattcatctgttataaatgtaggatttacaagttggacgtattcaaatggagttccttaaattggacaacgctcttacgctggctgatgctattagtgatctgccaccggtgtgtatctaaacttcagaactgccattgatgattatgttacaatatatctgtctgatcactgctctcttagtgctgcaggtgacaaattatgtggcaaatgatgtaatggattataatgatgctgctcctaagacagagtttgagaactttattagcctcaaaagatctggtgagcattttaaactcgtaaatttggtaggtaccactaatccaatactaacgtatctttcttgtttcagagacacttttacccgcatttggtggagatccgacacgcaggttgtttgatcaccaacccctcgtattaggagatgatgacttggaaagagtttcctacataccaaaacagaaggtgcgacatttttaaagtacttgcttcaagcattcaatgtataatcatttcttgttcatgtcattgtattcttattgttacagggggcaaactatcgcgacatgcctggtgttttagttcacaacaacaaagcggaaattaatcctaggtttcgagcaaagttgaaatctggaaaaaatgtggtataaaataaaccactcgcaaccttatcatttttctgctctagtttctttttgcaccttctatatgacatgtcttttggttttcacaggtccctgcttatgcaatttcattcataaaaggaaaatcaaaaaagtgagtttctccaactaatatgcttcttgtggatcctctttccataacgtaagaatgttaaattcattaaaagtaacacatctgttatctgaatttcaggccgtttggtagactttggggtgatgaaatcgttaacactgttgtgacaagggctgaacctcacaaccaggtaagcccttttgctttcatttcccatgtgtctgggtacgttccacttagaattctctagtggctggtttattaaaactggttgatgcagtgtgtaatccatccaatgcaaaaccgtgtgttgtctgttcgtgagaatgcgagattacaggggttccctgattgttacaagctctgtggaacaattaaggaaaagtaagtccttggttcttgctgcttttctatctatgtatatgattgtttttaaactggagatcctaatgtatgtaaaaactgggtttgaatctaaattttgtaggtacatccaggttgggaatgctgtggcagttcctgtaggggttgcattaggatatgcctttggtatggcgagtcaaggactgacggatgatgaaccagtaatcaagctgccattcaagtatcccgaatgcatgcaggcaaaggatcaaatctgattgacagtctccatcaagtcgtcatgatgaaactatctttaggaatcatacttcattttctagactttcttttaattttttgggttagcaagagctatatgctcaaacaatggcggcttaaactgtctagctctttcttgttggtttatctttgactttataatcatttggaaccattttatttcttatgatttttaatctcaagatttcaaattctattgcgtagacttcaatcctacgtgatgccatccaacaagaattaagaccaagcaaaagacagacaaaacctgttattgagcatccgaggtgctaggtacgtccgtgatctctcgacgaacattggttcgattttgcgtaattcagttgccaccgaccgaccgaaactctggtcaatgatcaccacttaccagcttttattagtgttattcattcattcgcaaaagctaagtaaattcgaaggcagttaggcccacaagcccatataatggtgaaagatttggttcacccaaataatgtccccactccttcggttgggcttttacgttataatattcggcccaaatttgatatctcataacagagcaaatttttcacatagaagaagcagagaaaccaattgatctactttttttttttttttgtttcttcctcttcatcaggcttgttcttcgattccctcacttaaagaagggtttcgaatttgctcgaaagattgaaaggaaaaaaagaaagaggtgaaccattctcaacataaatttgttgtttaggagatgtaagaatgataatttcttggatctaatcgcgttcagaaagtgagaaagttttaggattcataaatatctttgtgttcttctccaccctaataaacacattgatacagagatg

SEQ ID NO: 31360 - DNA, 3000 bp, Unknown; identical to SEQ ID NO: 9334
  misc_feature (1)..( 3000): 2750-1469P.txt file - cDNA_ID_3041331; gDNA_ID_1972069; Annot_ID_178525

SEQ ID NO: 31361 - DNA, 3003 bp, Unknown; identical to SEQ ID NO: 18227
  misc_feature (1)..( 3003): 2750-1469P.txt file - cDNA_ID_3041331; gDNA_ID_1621110; Annot_ID_171776

SEQ ID NO: 31362 - DNA, 3 bp, Unknown
  misc_feature (1)..( 3): 2750-1469P.txt file - cDNA_ID_3041335; gDNA_ID_2213666; Annot_ID_182092
aag

SEQ ID NO: 31363 - DNA, 3000 bp, Unknown; identical to SEQ ID NO: 9321
  misc_feature (1)..( 3000): 2750-1469P.txt file - cDNA_ID_3041335; gDNA_ID_1972069; Annot_ID_178524

SEQ ID NO: 31364 - DNA, 3003 bp, Unknown
  misc_feature (1)..( 3003): 2750-1469P.txt file - cDNA_ID_3041372; gDNA_ID_2214470; Annot_ID_182980
gaaatctgagttttggatatcggattgaagattaagccagagtttattgagctttgatatgtttccatggatgtctccgacgcagatcacagttcgtggtttttgggtcatcattagtcttgtttcttgcaatgcaatcaataattctaagcattatttgattcgatgatgtttgatagttttgtcaacaaaagtcaactgtttcaatggttatgattacataaggtacttcatcgcaaccgtcgaaatcttcgcgtgtaaacatttcagatcgtacggtcaaattcctatgtactcaatgacttttcttcattatttcataagaaaaaaaagactaattattattcacattactattacagcatcatacaattcttcaattctctcaatcgctcttcttgattctctcgtgtaattattattctgtaattgctctttttgacataaacatgttttggatattgttgtgttgtgtggagtataaaacggattaattttcttatagcggaaaaaactgggatgatgatattagctggctttttaactgtaataagatatcaattaatttgtactttcgtagtgcatgtggtaattaacataaagttttaggaggaatcaattaatccatggcaacatgtggtaattaaaccaactccattttaaaaattcttataaactacaatttatataagtcaatttcctgacaccggaagtatttttaaatattttatctcaaatttttattacttatttcgatggtggttcaaagaatatatacttgcccagagcatagcatgtggaaaacattggactgacttttgaggcataacttttttttttaaaacgccaacagaaatttttcttcatgatatattgatatgcttactagtttcttcacgtccctaattcattaattctcttacgttttctggtttgtgtaaataatatacattctttttctttgggcaaaaatataatattcattcttaaacggaaagtaacatggtataattgaatgagacggtgacgtatatacagccagactgcagtaataatattcgtgaatcgtgattataaattcataattacgtacatctccttcttaattaacttactcacgcaattccattcatggctaaaataatgtgctcttcaccaaacgttactaacttaccaattttatacacacatcatcttttcttttgataaaagctcttcccctttgtggtattgttcttaattacgataaatatcttcaatgattaaaacccaattcattccccttgttgcttctttaatcgaactcatgaggtggcttatataaatggtataattaatgtggattaaaattgtaccctttaattcatgtaatgtgtcatttccgtttcttcacgtaatctcaccgtaatctctatatataagcacacaagcaacacaatcgatcataaaccaaaaaaaacgagagagagagatggggaaggggggttggcttcttaactttctgaaccatgccaaaaatcaagaaagtgtggagaatcttgacaaaaacggtgccgtaaaggccccaagcagtgggtttaagatgccgttgcattacccaagatacacaaaggaggattatgaagagatggaagagtggagattggatttgcttctctcggaatacggacttcttgccttccatgacaatactctccatgagaagcgagcttttgcaatcgacacttttatatggcctcatcacccataatttcatctccttcatttatcttgtttatatttcttaagagtaacggagattgtagagatacaacattggaagagatgacaaaaaccgggatatcaatctaccggatatatatgtcacaaaaagattttagtatatttttagtaatttgatttctactatattctttagttttcattagatctctttatgttatgttatctatataagtttggctttggattttgcatatattaacctttccgttcaataaaatatagttttaccgcttcttatggtatcaaagccttcatccaaaacttactcaaatgagattgactctcatgttaaaacagagaaaaacagagaaaaaacaaaagatcattaaagtcactatataaacatcatgattcatctccatctccacccttaatttctttactagtccgttcgttctcgccactattgttgtccgtgattgtacttcttcataagcatcactgaggaagcaaattctaaaacaatagtatcttttaacaatcataaagtaaaacagtttttttttttttgttcttatatatatactacttattacacatttaaactttggttttgaacagtgaaaatgttgcttgcaatttttttaactttgtagaaatcaggcaagttcttaagttgacaaatgacatatactagtaattttcacgaacgttatcccactaaagtagtcatacccaaaacaaaattgtttaaataaaagtaacttaattatatcattgagattcgagtgaataatgccaatgaaatttaatattcattatctgacactctgaaactatgattaactacataattatttaatttaacgtttgtaccagctaatagtatacacgtttttatgacaaacatttttgaattttttgagttaaaaaataataatggttttcgtcgtaataggagaggacagacaattccaacgtgatatgtacgtttatcatgttacttagtcagcagatcatttcttcggattatataatagctatttagaaacattaaaggtgtggattatattatagtcaagtctttccaatatgaatattatatcatccaccaatacataattattgtcaaatacaagttgagtcagattagtcaaatacaggcaaccaagactcgagatcctcatcgtctctccactttatataaaccccaagtcagtacttctcataatataccaaaaacgaaactgagaaagaagttttatttattaattaatg

SEQ ID NO: 31365 - DNA, 3003 bp, Unknown; identical to SEQ ID NO: 31364
  misc_feature (1)..( 3003): 2750-1469P.txt file - cDNA_ID_3041372; gDNA_ID_1972096; Annot_ID_178603

SEQ ID NO: 31366 - DNA, 3000 bp, Unknown
  misc_feature (1)..( 3000): 2750-1469P.txt file - cDNA_ID_3041379; gDNA_ID_1972096; Annot_ID_178599
atatgataaatagtttaatgtcaacagtcgaaattccaatcctagaaatactcaacttcgacaaaaaaaaaaatggtaagtggctaagtgcaccagttcccggaagttaatccaaagagttaaatcattatttttcggcaccaaaaaatatgcgcagtatagtagatccatgatatagagttgttgaccaacatataaaggttatttttaaacatagtattatatattggaaatattcatctgatcatctctatgattaattaccatcatcgtaattaacgaagaaacataaacaaagaaatgatatgtctcatatggacgaagaagaaagattgaaagaatgggaagtatctttgcattttggcagttacgctaatccaactgacatccccaaagattctggcccctacgaaaccattgttgtcgctgtatgtatatacatttgattccttacaatattctaagtacataaatgttatggtaataaattgatgggtccttttagtcaaaaataataatattgcttgggcagactcttgtttaatagggagtgtatacatttaaggttcgaatgatcgcagaacaatgggaaacgttttcaactttttatttctgaaattttttgcgtcataaagtacaaagattccgtaataattaccattaactataatatattcgtaataaaattatctggcatggacattggagagggagacatacatacgacatatcattgatttaatggaaaatatgaggtttgatgagagacagcaaatcatttttcatgagaccattaaatcctaagtaagtgctgatgctggcaattaggtataaagtcgatatcctcttcctcaatcacgttcataatcatcacaattaagagttatattattaagagaatcaataaaattttgtgcaaaatttcttaatagaaagtaaagtttaaacggtgaagcatggaagacgtattcgattggtggcaaacgctttcaacacactattcgatttaagttttgtttcttatttgaacattaaaaactaaccattttgcgatcatttaacttacaaaaaatctggtttaagttgttagataaacacatcatcagttacacttattccgttgtagatattcagaatgttacataattttaatataatttacttagaaaacaaggacaagttgggatccataaaagaataattaaagaaaaagtatgggctccaaatgataatctggtgcacgcgataacacaaacaccggtttagtgggtcctttgtggcagagaagcacacgtcgagtaaggaaggatcaccctctttctatgtctttgatcggctcaatccccaccgtacattctaatctctacgatttggctttgcttcgaacaagtttattccttaaggaagttaacggaccttagctcagtttgatcacaaataaaaaaaattcaggtcgagctcaatcaaccaaaccgtataatactaactcacacttgaaatctgtttttgattattagactacatacaagacattagagacttgtaaaacaatatattggttttatgtcgattagtaggtaatctatctttctaaccctagctaattaaaacaacaaaaccttagcttgccaaagctcatccattaattgaaaaaagatctactaagtaagtatagttttgtatatactaatttgtgggacaaacaaaatttcaaaatggctaatgaggacaagatttataccccaccattaaaacaatgtgactagttatacatcgagttgatatgatggctagcttagaggaataatttatagtatactacattgaaataaaagtaaattccattaagagagaaaaggaaaaaaaaaaagtgaagaaaaaaaagaaatattcttgcttcgaaggcccgtagttgaagccgttggctgagtgggctactgctctttaccttcgtttttacgtttctcctctctcttttttctattgataactttcttttatcgaaagagaataacaaattcattagcaaaacgcttacttgagtacctctaaatttaccaaagtaaattaagtttgaccacttttatcggatacacgtcgaaaaacctataagatttacctctcttattattatttttctgttggatcacaattagtataatactttaaaatttatactagtaaagaatattgggatatatattctcatagtatatttattattagaagatcattttattattctcattttctcaattttcttcaatataagttatataaccgtggaccatagtttctttctttgtcaacaattatgtaatgtggttctaataaatgaaaaataactcaatagtgtgtatgctcagcaatggaatacctaattcaagtcattaaagagagagaaaaaaaaatcacgacgattggtaaatgttaatggaccaatggaaaaccagaattaaattaccggttaagtttggttcggaattgacggtttagacgggacagctgagttgttaacgagctgtcaccggattctacgggtcacccgttttgcttccttcatcagataataaaaagatccaacggttacaataatcagattctcttccctttattcctactttttatttttgattttttctttaaaaccctcactgtatctttttatcggttgttggtggcagttaggtaatttcacctaataacctttttttttttgcctgttatctctttttaatatacgtttcaatatattttaattattattaaaaagttcccgttatacgaataaaatagcatttaatatatttttgtttctggaaaatgtgtaattatctttatataaatgttcatatcagagcactatttctgggtttcaaaaagaaagctcagttagctattttctctaccacagaagaatctagacccagagagagagagagagagagagagagagatcagtaacgagagagtcaaagagaggagatttcagtgaagatg

SEQ ID NO: 31367 - DNA, 3003 bp, Unknown
  misc_feature (1)..( 3003): 2750-1469P.txt file - cDNA_ID_3041391; gDNA_ID_1972096; Annot_ID_178596
ggggcgaatgtgagaaagagggagaaatgtggggttggatttttaatttcgagttaatgttttagtgtaaaatgacttttcactatttctgtaaaaaataataattgatctgctagcattgaaatccaccattcggtggtcttttttcattatccaacataactctttttattacttattgttgtcatgtgctgtgtacttgcatggaagacaattagccagaggacacaatgtgtgagttaaatttcaatttcgagttgtgtatagttaaacagtatttatttgtgtgataataattaaatagagttgtggataatgcccgtaatggaacatggtaacaaaatggcatttaattatttatgatgacaagaagtttggtctgttctattaaatatctttgtaggatatgaacgccaagtgtcgtcttgagttctttatcaaatactaaaaaactctcgtctcgagttctttatccatacttctcaagtcccgagatttagtattgattagacacgacaattaaaggaaaactaaaatctttgagaaattatataaaacaaaagcaaaactgcaggctgtggggttcgaacccacgcgcacttatgtgcagaagaacttaagtcttcccccttaacctctcgggcaaacctgcgctgctgtttaaatattccatttttaagtttatttagtaatcgtatttctgtggtctgtgaaaattgagctactttcggcccaacgaaaaacttgcatatttaaacatataggcccagttacaactaaatcaaaagtatttatttttggatttacttaaatgtagtctttcatcctaacttctcacaaagacatatataaaattcatgcactctccttttatctagttggatcaatctcaagtaatttactgggaagaaataagaaacagctgctctctgttaggccttagtgttataccttaacaaattattaatgggctattagatattattttaggcccaattgaatcaagtactaatgcagatttaaggggggtgtattgacggcgttaaaacggtttctcaacggaatcgtacgtagtcacacgtgattttattgtttaccccggattggtcatgcgttccttcttttccacttgcgcggaccactcaatgacactctcttcttttgtagcagtggcccgacaccagaatgcagcatttaatctctcaaattaccattttgctcctacctcttttaccccttttggtattttgtgtcttttttctttctatttcgtgtgaaaaaggatctcttccttaatcgtattatttcttccgatatctacttttattctgttttctatttttggtaggttacatcttttttataaagaaaatatgagctaacacgacattagtgttgttaaccaaagaattggaaaaaagttataagagagataataagattctcttacagagactcacttcagtgaaaaaggaagaagcaagtggttcccttaagggaaaaaaaagtcacgtacgttcatatacaactttaatacgtactgtgtaactcaatagatcgtgcagtaatattcagtcgtattagtaagaaggaatttatttgctaagtaaactcaagcctcctttttctcttttttttctttttagtaaaaattaggctagtgttttttttgactcagcaacactctgcttaaatttaggagtaatttgacctattcctacgagtttctaagtgaattctgttggggtcaaagaagcaactagttgaattagtggaaaatcgtttcctttctttacgcatagttcacgttggacactcagtctcaatgctttcacgtttcacgtagcaacaacatatattcatcagtttgtgatcgtgccatcgtggataagttgcaattcagtgaaactctgcaccactttgtgcaattatttggccgtctaatctatttgtgagaattttacaatctaattgttctattatttcatttacttgtcatcaatttattatatttgtagccaatgaacgttgtaattaaagaaccaaaataaattaatatcttgaaatttgtaacagtcactagaagctgatttcttattaattgtatcactaaagtattattaaaaacggttacaaattatgataattatatatttaataaatttcgtgtgtcacatttcttttaaactacaattatgaatatctaaaactcattcatgcatatcttaaaatttgaattcaaaactttcttatcttatctttaggttcttaattaacagtcactaaaaatagtcaaagttttgaagtttatgaaaaaagataagagtataattaatggatacgcctcgtaacaaattcttgtaaagtatagataatatacatttgttaaatatgacacgtgtttattttttttttaaatatgatcaaaatatattttaactacctagatggtatgtatgtctccaattttgaataacaagtcaattgttattagaaatgtcataatataaagaagggaattaaatttgcaaagaaaaagtgaaaaacaaaggatttgtattttggagaaaattaaggactggatttgcaaaaacgaaaaagtaacttcatgtatattgtcttccttatagtctctataaactattatctcaaattttgtctggactctgaaactcacaagacttgactctggcttacttggcttcatctttttctctctggtaatctctcctgcaacttcaagctttcattttcaaataaatgtaatcaaatctgttattttcactcaagaactaattgagttctctatccctttcaattgaaattgacattaaaatgaaaagattttgaggaggtttcacctaccacaaccgaatcacttctttctccaaatattgtttctttcagtggccaagaatcacaatcaatttttgtatcttccacaggtaaattaattgtgattgaacagagaagaggacaagtgatcttggttcaaaagaaatg

SEQ ID NO: 31368 - DNA, 3003 bp, Unknown
  misc_feature (1)..( 3003): 2750-1469P.txt file - cDNA_ID_3041399; gDNA_ID_1972096; Annot_ID_178594
gagcttagaaatgccgcaaaatccaccaaatccccaaaattcaattcagttccagcatcctcatccttacaccacctccggcgaccaacaaactcagccgccgataaaatccttatacccatacgcctcaaaacccaaacaaatgtcacccattagcggtggcggttgcgacgacgaggatcgcgggtcgggttccggatccggttgcaaccctgaagacagcgcgggaactgacgggaagaggaaattgtcacaatggcatagaatgaaatggacggatacaatggttaggcttttgatcatggcggttttctacatcggtgacgaagctggtttaaacgatccagtcgacgccaagaaaaagaccggcggtggcggtggcggcggaggaggaggagggatgttgcagaagaaagggaagtggaaatcagtgtcgagagctatggtggagaaaggtttctctgtgtcaccacaacaatgtgaagacaagttcaatgatttgaacaagaggtacaagagagttaacgatattcttggtaaaggaatcgcttgtcgtgtcgttgagaatcaaggattgttagagagtatggatcatttgactccgaagttgaaagatgaagtcaagaagttgcttaattctaagcatcttttctttagagagatgtgtgcttatcataatagttgtggtcatcttggtggtcatgaccaacaaccaccgcaacagaatcctatttcgattccgattccgagtcagcagcagaactgttttcacgcggcggaagcagggaaaatggcgagaattgcggagagggtggaggtggaggaggaagtagagtctgatatggcggaggattcggagtcagagatggaggaatcagaggaagaagagacgaggaagaagcggaggatatcgacggcggtgaagaggttgagggaagaagcggcaagtgtagtggaagatgttgggaagagtgtgtgggagaagaaagagtggataaggagaaagatgttggagattgaggagaagaagattgggtatgagtgggaaggagtggagatggagaagcagagagtgaagtggatgagatataggagcaagaaagagagagagatggagaaggctaagcttgacaatcagagacggaggcttgagacggagaggatgattctcatgttacggcggagtgaaattgagttgaatgagttacagtcttcgggtacacgggttgacccgagttccgctaaggggtgatgctgattagtatttaggattagagattttttacaactttgtagtttctaatgttaggattctcacgttttagtgacattaggcagtaaattaaatcttaaaagtatgtactattgtagacaaaaggtctttaatcagcaaattgattaagcatgtctacttttgtagtttcaattttcgaataaggattctctcacgctgtcaatatttaagtggttaattggtaaaagtgagaagaaattaatcaatcgtacaaaggttaacacacatactaagggaaaaaaaaaatgacacacccggtgggactcgaacccacaatcgtttgattagaagtcaaacgccttatccattaggccacgggtgctctgcttgcactagagtattgagaaaacattaagaaacataattacaatcagtaaaactacccacggcccacgggcgatcctcgtttatttaaagaatatatgtttctctatttaataatttacccttcaaagcatcacaatggagagtttttcttctatttttaaccaactagagttttgtgtacaagtagttattaaagatataattcaagaactgttatgatatttgtaagaagaagagattttctattataaatacttgagtgaaagtttaggtaggttacacaatgtcaataatgtgacaaagattatttgagatgatagaacacaaaaaaatatcataccataccactatattccatttccatctagtgtttgagcagatattctgctttgtacatgtttcttgcacctacaataagattcaaaagtttaattagataccattggaactatagcgatagttgcagttttctctaaagttttcctataacatattttcggacatatggtaggagcatctggaagattatgaggatcaacaaatagcggaaaacaaattactgtatacacattgctttcaaaaaccaaacaatcttcgtcaaatgaattttgtaacttttgctgaatatgataccaagtggagtccaatgacaaacaatctccggtatgaatttagtgtcgtacgtgaagtatatataagttacaaatcatgtctttagaacaaatgatggaaagtgatatatcatatatacagtgagacacgatgcgatcaatcaaacgaccaaattaaaaaaaaaaattagtaacataattatgactcgttgttatatctaaaaatgacaggaaaacattggactaaaccatttttttcagttttaattgttgtaacacctgtttccaacgttttatattgatagtattaattattttcttcgttcacccgttacatcaattgaaaattgaattgttatcatcaaaggttttataattttataaattttaatcttacaaagacaaaatcattatgggaatatatatctgtgaaagaattttgataatatgtattttgttggaaagctgaaaaatatgaggtaacgtaggttattgactgtaacggaagcgaatttaactatgtttcggtttggattaaccaaaaccgaatagaataacgcaatttaactttggttcggtttggtttttgtgaattaacttttttttattccacccttaccacttgcctaacggagccgttgtgacggcccatccacttttgcgctagttcacgccttgacgccttctccttccgtttcttcagcctctcgccgctaattaacgccgtctctggttgctaccaccgccgtaaccctaacggcatttttaatg

SEQ ID NO: 31369 - DNA, 3000 bp, Unknown; identical to SEQ ID NO: 9344
  misc_feature (1)..( 3000): 2750-1469P.txt file - cDNA_ID_3041410; gDNA_ID_1972096; Annot_ID_178591

SEQ ID NO: 31370 - DNA, 3000 bp, Unknown
  misc_feature (1)..( 3000): 2750-1469P.txt file - cDNA_ID_3041419; gDNA_ID_1972096; Annot_ID_178586
aaaaaaaaaaaaaaaaaacaaagtgaagataaagaaatgatttttaatatattatagatttagagtctaaagcatcaatctttgataattaaattttttaacatcataataagaatttaattatccaaacgatataacatttgttcttcaaagcaaccaaaaacaatttgcaaagagaatcaacgaagtcttctagcttctctctcggactccagcaaggtgagaatatctccctctctgacaggtcctttaacgttcctcatgatgtaacggtccgagtcagtgaacttcactctaacctgagtcacttgaccccttgatccagtccttcccatcactttcactacaacagcgtgcttgatctgagaatccattctgattcaacaaaacaaaaacattcagagaccaaattttacaaaagaagtgaaaatccttagaaaaagagaattgttcacatttgaatcaagactgtataacctttataaaccaatcacagctctggagaacaacagatgcaaacaaagcagagaaaacactacaaaaacactaatcagtaaaagcaaaaaaacttaaagatcacatcatctaatgatttttaacaacttctcaattaatgatcaattgcaaaatgcagaaccaaacagcacttacaaatttgcaacacctgatgagttaagaagctagaagacgattgtatatatcaggtttcatttaactgagtgagaaactaggctcataaatctaacaagaaagagagaatcctacagatagattccaaagaacagagacaaggataagtagtaagagactgtaacctatccagtatatctagcagtgtaccttataatcagactacaaaagaaattccagaaagaaataaacttgaaaaccagtttataatatttctcaatcaacgtcagaaccctaacatacttaagctcaaaagcttggtttctcagtaaatcaggaactaaactgatatctaacaagccggagaggaaactgtaaagaaacagagcatggacattacagacaaaatgggggaaaccataaacgactctaaacgattacagaataacgacaatcagaagcaaaaacatatagtaacgaaacatatgtattgagtgagatcatgaagataacctttagagaggctctgcgatgggtagagagttttagcggcgataagagttttaagagcagagatcctagaaccctaattcgagagacgcaccaataattaactggtttcgtgagagaggacttataaaaataaaataatgtcgaccaaaagtcaaaaaaaacttgacccggttttaataagtgatcagttcagttaatctcagaccgaaccggttctttagtgtttcgaaagaaggtggagccatctccattcctctaccacgtgtaaccgttatagatttgtaacaattaagacctttagattttgtaacgatcaaagttgctaaaaaaaaaaagatgtctctggaggagctagatgctatttgctgaaagtttggctgaacatcattttatttgaacatttaaagttcacacatcagcaataacatagttcaattttttataaatctcgaaatcttgaatataaaaagaaaataattgatttggatggaaaagagtcattaatttgtcgcttaagataattttgttagagtaagattatcaaaatggtattttggtagcaagtataaaagagataggaaatctcggttgaaatattcaagaaattgtgtttttagttattatagagagatttatcaaaatgtttttgagttgttaatattattgacaataaatttgtttatttctaaaaccgaatcgtaagatttttcgagtattaaatattcgtagagagattaaatctctacatattttcaaatctctctttttctcttcatattacatattgacctcattagaatgtgggatacaaaagatgagtacatgacattcttgacatcaaaataagcataataacctggtcgaaacaagtggttttagacaaattacctagaaaaaaaaagctaatgtagtgaagaattaatatataaaagcacgtcagaatggtagctgtaaaagaaccttattacctcaagggttttgagcttctttccgtgcacctcaaccattatttcatacaaaaaaagaaccacaaattcctgcaccaacacacatatttgaagacctttaattttgagtggaaaaagatagtccaatagtttggctacacctatcttggactatatatattaaacacatttcgcaatcatccaaagactccatctcatacaactagacactacataaaaacgggtattctagcactcggaaaatgctatctaataataaagtaatgttgcaaatctataaagttgagcaagtagatatcacatgatcagtctaatttccatctcccataatttccttcatttgttgaattatttctctatcagtgtttgatcaggttagaacatgtggcgagctcatgactcaggcccattaacaggccagccgggatttcccggttcaatcgaattctcgattttattcacgttattcctcggtttaaaccggtattgtcggaggtgctaattcctgcaccaacaattagtccccccccagttcggcgaatccgagttgcttaattcgaaatttccgaacttagaaattgaatattcgatttaaatcttggaaagcgtgaattgatcattagatttccgaatcgattcgtatttcgaacgtatctgacacgtgtcaaatcaccgcgtctgtacgcgcgcgtgaagctcgggaaacgaagcgtcccgtaggtttaatgatgacctcgtaggtttgccgcccattcgcctttatttatattcgactaaaccctcgggaagtcattttccgccgcttgcaagaagaatcaaaggtagctctcgttctctcctttgcgacttattttgtactctcgattcttaatcgatttttccggcaatg

SEQ ID NO: 31371 - DNA, 3003 bp, Unknown
  misc_feature (1)..( 3003): 2750-1469P.txt file - cDNA_ID_3041427; gDNA_ID_1972096; Annot_ID_178583
gaagctcgtcagctcgtccgtctcaagtagctaatcagctcgcccttctcaagaagctcatcagctctcccttcttaagaaactcgttagctcgctcctcttcgtcaagcttctcaactcgttctcttcaccaagtccctcagctcgtcttcaagctatccagctcgtctttaatctctccaactcgcctttaagctcttcaagctcctcagctcgtcctcaagctcctcagctcgtcttcaagctcttcccatcacagcgaccatctcctcgtctagctatcagctcatccctcgactgcgaaactcatctacctcctcgcctagcggaagttcgtccattgactgcatagtccacctatctcgtcgtccagctcgtctagaccttcagcaaacaactcggtttgtccaactcgtctctctaccacggttcatccagctcatcgcacatctgccggctcgtcacctacctgccgacctacctccaacgatggcctagctcacttattctaatatgaactacgtgtggcttgatccctttctaagggtacgtaggcaaccttttacaaggttcagctataaaacgaataaactctattcttcctcggacatcaagatcgtcttccggcctcaagctcgtctttcatctacaatcggctcgttcttactccatttatgctcgttgaagaaatcatcctttgtaatccgtccaattcgcctaagtcgcgggctcgtcattaatagaaagattcttcttccttccctagagatcccattttcgtacttgtgtgattcgtgcatcaacagttggcgcgccaggtagggggatagctcgaagatatctctcaaaactacgaacccgcgacgaaccaaagtgacaacaaacggactacatggagcattcgataccgactcgtcaggctctggaagcaaaacgacaacgtcgatccccgggagagccagtcactcgacctcttcatccgatatcgcatcatgttctccgacctcttcatttccttggggtttagtaatctatcttggattttagggtatagtttttaattccattgcatttcctaaatgtttttagtattctatcttggctagtgtactagtctagtgtaccgaagtggtgtactgttctagtgttctcactttgtgtactatcatagtgtacgcatttggtgtactagtcttgtgtactaatggtgtactgttctagtgttctcacttggtgtactataatagtgtacccatttggtgtactattctagtctacttctagaatgtcaaagtatcaatccaaattataatacaatatatttcaattcaagtgttatgaagcataataataatctagggttatgactttgaattaggaatttatttatttacttggaattctaaattctagtaatctaaggctttagggtatagttttaaacttcattccatatgatatatggttttccttgggtttagtcttctctctttgtcttttagtgtatagttttgaatttcactacatttcaataatgtcttttagtgtatagttttagggtatagtttttaattccattgcatttcctaaatatttttagtataatagtagactagtctagtgcaccaaagtggtgtactgtttttaattcacttggttactaattggtgtacccatttggtgtactattctagtatactattatattctatcttggctagtgtactagtctagtgtactagtctagtgtactagtggtgtactattctagtgttctcacttggtgtactattatagtgtacccatttggtgtactgggtttctctcaaacgtctctcttctcgaactcgttcaccctcgatttgttgtacaccgactgtggctagggttcgtgaaaaaccaagaagagtaaagtaactcaatctcagaataaacacgggctcagaagttatttggataaaaaacgtaatgaaactatcgggctcaaatatttgggctcacttaatacgaattggagttaacgggcctaaaatgagttttaaaacccaatccaatttgtttcgtcgaacccagccggaatgtgtgtttttaaaacacaaggctactattgtatttgacacctcttttggatttttgctacctttttctatctcacatgaatcctattagacaaacccaataaaaagtaccctctcagcatatttccaaaaaaactgtctagttctcaaataattttctaaaaactgcctacttttacaataaacccttgtaaaaactatgatactgcagttaaatcctatggaatgattagacatatgatcatgaaagcgacatatgtgattgagttgtccaccaagaaagaataacagtaactggctcaatatgattttcttttgatttaaatattgttttaaaaagtatatcttcattacgaaaattatgttttggttttggtgtcttaatttttagtttggtttttcatatagagagggacatatctaccaattctaacttgttgatagccgtaaccaagattcaagaatagttacctgccaccacatcttcgcggcgtgtatctcaagcgtcatgatcgttgacgccgtctccaccagatgtttgtcgccgtaagctaaccctaataaagcggcggagtaataagcgtttacggcctcgcttgtgctctcttgattccggccgtcccagaactccgttaaccctccagcccatgagtgtagcttgaaaagatcaaaatttctcaaacgcggataactagaatttgaattattatcatcttttctcccaaacgtcatgaaatccgccaatagactgtacgcttgagctctgtatctctctccccacaaaggatcaaacttagcgagcacggcaatagcgtagagaaagtaaccaatatggtaatgatgattattatatataccgaacccgaaatcagcttgtttccacttcaggatcgaagtgaggaactaagcagcaatgtagaaaatg

SEQ ID NO: 31372 - DNA, 3003 bp, Unknown
  misc_feature (1)..( 3003): 2750-1469P.txt file - cDNA_ID_3041446; gDNA_ID_1972096; Annot_ID_178577
gtcagcacatcaacaatatttagcatcttttcagcagaactaggtcgtgatatcagaagctcttctgtgttcacacctattgattctgctagagaaggatccatggcattctctgcatcaagataagcgcaataacctggcacaaacaagtcttttagataaataaaaagctaatggagtgaagaacaaaagcaagtcagaatcaaactgtaacttcacaaaatcgaatcttacttatcgcactagaaacaagaaaggaaaaagtagaagatatgtgtccccaacttaggatggattctagtaacaagtcccaaggtttctgttcaaacaaatgtattgagaatgggattcaagaacagtacctccaagcttttgagcttccttgatgatatgcagagctagagttgtctttccagatgcttcttttccgtaaacctcaaccattcttccctacacaaaaaccaacaaagttctcttgtaaacacacatttagagacctcattaattgcaatacctttagcttggctagtcctatctgagactctaaattaacaacaacctttggcaatcctccaactccaagagctagatcaaggttgagggaacccgtggatatcacagaaactctcctttttctgtaaaaccgctgcaatgacaacttagagtctttatcaaaatcacctgaaagctgtgacaatgctaaatgtagagcagtgtctttctccgctacttttctatcatctggaacttcatcaagttcacaatctgaagcttcaactgaccaaacgaaacacactcataaagacaggatacagagtatggaaatcaaaagacaaaggaaattagtgattacctaaagacgaaagataacgattttcatagccagagcaagccaaaacgcttcttcttccattcagctacaaagcaagataagagtaaacacaagagacatttgtttagtcaggagcttgggcaaatcatcaatgctactctaaaggagataactttattttggttggagtgttgtcctaatttcttcatctgaaaaataaaatctttctttcttatactcaagctaagaattgttgagaaacattagagacgaagagaacctgagataagtaagagaagaaacggaatctctgaatcggactggcccatgagagtcgacccatgccccgttcttcttcaagcggctcctccttcgctgttcagtttcaattccacagttgtgtcttctccttttctactaacgatctccagtttccgccatggtcattgtccttaagaggtaagacctgaaccagaagtggatacataaaaatcgaaaaccgtattaaaccgatcggttcatggctaatggaatctaatttaacggtttgatatgaggaccggaaaagaggtaacaatttaagggaggtgtaactttagtctttttttttttttttttttttttttttttgtgtgtaactttagtcttatcccgaacattttgctcaaataagattttatttttctatataataataaatctgagaagataaatccctaaattaagattgttcatgcgtggagcataacctaaaggtctaagaatgtggagtgcaaattcaataatgaaattgttggttctcttgcttttggtggacgcttcattaatattgaatcgtatcctaagcatgaaaacatatccaacacataattccgaggttttccaaagcagacgcttcattacgtttgacttacgtacactaactggtgataaccagcgaagcggtgtggatcctgcttgcataccaaaatcaaaatgtgatgatagagtgatggaaataggtaatactccagattatcacagtagtaagttcattgatttgttggcacatctttaaacttgtaagctttttataattactttattttgtaggtatatggaggagaccgcgtactctttacagacctaaaaagttcgaccacgagattcatgacgaagaagaattatgaagttgttggtgctattttcttaaattttttggcgattggttttggtgttaattatcatcattttaatgtattagtttgtttttatttgcggaatatcatatgattaattagatggcccgaaacgtctggtacgtaagagtaagaagatatgaaagctaggtggagtcttgtgctattgacaagttctcgacccttgtaaagttgtgctcctccttcataatgccgtagagactaacacacaaactgctatttgggagataaaaacgaaaagaggaaacaacaaggctaagcggtaatgtccaataggatccattcaacttcattaatgtgagataataatatttttttaattaaaaactgttacattatttagtcgtatcccgaatattgtgttcaatcttacgaggaaaacgtcgttaaccctagtccaaagcgtttacgaaaaataaatgggagcttcttcttcgctttataaaaagtactaaataaagactgaaaagatatagaaatccctaaatattgattgttcctgcgtctccgagcataatgtaggtgtttctaacaatgtggagtgtatatgcatgcaacggcgaaattgcacttctccttgcttttttgatggatgcttcactgggtcgacattacgttttaaatgtatcgaaagcctagctagttacataatcacactctttgcagtaataaacccaaagtttttccgacatatcttcttcacaaacatcacatatgaactttgcaccggtgtgttgtagagaagagtgagtggatgttcgtcatcttcccgctccacagtctcaggggcctttgtggacttaaaaaaataaataagtgaaattccaaagggagataattaaaaatcgatttggtatgagaaaaatctaccggtatggtatgagagaaccaaaatcgagcggtcgttaataattagaacgaaaacagaacaaagagagaacgaaaacagaacaaagattgcgaagagaaatg

SEQ ID NO: 31373 - DNA, 3003 bp, Unknown
  misc_feature (1)..( 3003): 2750-1469P.txt file - cDNA_ID_3041466; gDNA_ID_1972097; Annot_ID_178640
aagacctccaccagcagcaagtaactggttcttaaaagcctccctcttttgagcttcagtcttttgctttgctgttagaagcttgccctctagcttcttcctcaacagtttctccttttccttttcctttctcttacgcttagcctcctcagcttgagcctcaagctcttcctgcctgcggcgctcctcttcctccttcctcaatttttcttcttcttccttcttttttcgctcttcagcttcttgccgacgagcaagagcctcttgcatctctctaacatgtttaggaattttcttctctgctgctttaccctttgcatccttcttcttcggctgtagtggctcagttactgattcttcttgtttttcctccttaacctctacagaagaggttgctgcagcagcagctgctgcttttttctccttctctttctccttcttctttttctttttcttcgcagcagcagtctcttcttctccttccttctcaccagcattctccacaggtgcaactggctcaggctgagctgctttctcttctacaggcgtagatgaagcaggtctttcagcagcaggggtttctccaagtgctgcaagaagtttgtccaaatcttcctcttcctgtactgtccttccactcttgttattcttcttctttttcttactctttccagtttccacaacctccacattcttagtatcagaagttttagtttcgtctgcaactgagtcatcacctactgaggccaaaacactgccgcccttctttttagaagatttcttcttacctgaaaacgttacttcagggctctcttcatcttcaattgtattttcgtcgtctctagagtttgaagcatcagtcccttcttcttcatcgagcaaatcagcggtaaacgagttagtgttcttcttcgaagacttagatgacttctttttcttaccagagaaggtgataggagactcttcttcctcatcttcgtgcacttcctctgtatcatcatcatcactaccaagtgcatcaaaagctgaagcggcaaatgaattaccgccttttttacccttcttagacgcatgcttcttacccgtaaaacttataactggctcatcatctttgtcaccatcagattcattatcctccttctcatcttcatcatcaagcaaggcaaagctaacagaaccaccgcccttcttacctttcgacttcttcttcccaacaaaagctatctcaggaacatcgtctttcacccccgcagccgaaaccttatcagaaaaatcatcatcatcatcctgctgcgtacccttcttattacctttcttacccttcttcttcccagtgataacaacaaccttctcttcctcaactttagactcctcagacaactcagtacctattgagtactcatcgtcatcaatttgagcacctttcttcttagatttagtagcaccaacgagagatgacgcaggaggttgctgctcagcatctccacctcgagcactcggcttcttccgccccattggaaaatttcaggtctggttcagaattggttccgaattcttccgactaatcaataaatcgaggtgaaatttcctacaattcgaacggaaacaaattaggttttctgggatcggcacaacacaatccttttagaaaatgaaaccacaagagagacgaggaagcgatactgtggctaagaggagagaatcgaagaagctttaccttattccggagaggaattaatcgataggctgagctaagtttagagagagagagcgcggcgcggagagagagagagagagagagagagagtagagaaccgagaaatagcgaagctttgagaaaccggcgtgaagcttcctagggttgagctaaacgctgtgtagattttaccgattctaataaaaaaaaattgtgacgtttgttaaatactatttttttctccgttttctttctcgatagtgttattttttcttttaaaataaaagatatgtcatattctttgttataaaatgtaatttctgaatgggattcaacagttgtaattttcacgttttaatatactgaaatctaacttatataattaagacacataaattttattaatatggactaaaataagggaaatcagcatgatttagctgtttaaagtattcatttaaaaaaataatcttctcgcgttatgatttgtttgaaatacttttctaaaacatatccgcatccaatgttttttgtttttggaagtttttaagagagagctttgttaaggcatgagcttctcgattcgtttctctaggaacaaaagaaaacgtaattgcttgaaaagacctaggattgccactcgcgtgcaagggagattgcttgagaccgggtttctctcggagagtcgtggcggtcgttgaaaattttctagtttcgggcaagtcagtgaagtatgatctcactccagctcaggtatcatggaacatgaacctttggcttatctctgatcttgactcatctctctccatcctcaacaatggacacatgcttctttagctgacttttgttagataggcataacattcatgcttgtgtggtttagtagaaacacttttcgactgtctatgattgattcagccattcaggtgagaacggggcagatatattattcctttttcttttgcttttgattttgtgaatttgggcttgttagaagaaaatgattaatgtttgtaaattgggttttgaatattgggcttgggagaggagctttaataattgggctaataatggattggaattagagttgagaaattagattaaaaaaaggattagattagtgatgaagtaagagtttttgctctctctcaaacggctcgctttgattactcacgtaaggtaagcttcttcgattctctcatctcctgtgtcctttgtgccgatcctcaaaaaaaactaatttttttttacctggattgattgattagccggaaagaatttggaaccggctctgtaatttatccatg

SEQ ID NO: 31374 - DNA, 3000 bp, Unknown; identical to SEQ ID NO: 9349
  misc_feature (1)..( 3000): 2750-1469P.txt file - cDNA_ID_3041470; gDNA_ID_1972097; Annot_ID_178639

SEQ ID NO: 31375 - DNA, 3003 bp, Unknown
  misc_feature (1)..( 3003): 2750-1469P.txt file - cDNA_ID_3041475; gDNA_ID_1972097; Annot_ID_178635
taataagcaaacagactacactggatcccaacatagaccaagtatactcattcatgatgaataatagtcaactagaactggttgatgaccactcaactaacacatgttatcatttgacaccaaaacaaactcaccaggttgcataatagtcaactagaactggtttatcagagttcacaagcagatcctcaaatgagtcaaatgtctgcttcttggcttcaatctgaagtatgaacaagaatggtttgtcatttagttcaatctaaatcaagaagtagataaaggcactcactttaaatcaattccaaactctagagaaaatcagctatagaaactaaaataagaaaaatttcaaaataggaaagctatcatcagctctaccatcagaagaaagtttgaagcttgaattcaataattcatagggtaaaattaagtaagctagaattgaacaaaatataagctttggaaaaagatgtttaagcagagaaaggcgattacacgtcgaggagtgcatcgagtcgttgaagataaagatggaaactttaagtctccggttcgaacccgacgaaccggaaactgaaatttgacggccgagatagaacgagaagcgaaagcagaaacacctgacgattctttcgaattcagcgacggaaccgtagaagaagagagagaaattgacgccatgaaagaatcagaaaaaaacaaacgatctcttgattcggcgttggcggttggttaggttgatgatgacaaaaaaagttggacacttgtggaaaaaaaactcgaattgaccaaaaagagagaacgaactctgaaagaaaatgacacaaggtactagaaagacaatgatgatccactacggtcaagtacaccgtatcttttttgttataggcccacaaacatgttctaggcccacatgttataggcccgttcccaaacaccgatcactcttcaatttaactttttgctcacaatcttcaggctcaatcatatgacatgacagatctcattgtaaatgcaatcgcaaagggttatcattatcaactagtactataaagatagctgttacttcccgccaacgcaactgggacagttaaaaccgttgagggtaacaaaagacaaaactcacgactccgtttttgagtttcctgaagatggaagttacgaatatgttcttgtgggcctcttcaaagaaacgatatgaaatagcctaatttaaacaaaactagaaaagtgtggactagagagagactttagcaaaaactaaaaacagatgtatcaaaagaagctcacaactaaaaaagatggagcttgaattaggtctgaagatcactcggactaaagacgatgtttcttcctctacagattttcgggttgccagagattcttttggtcatcgttcactttctcgagaaaccaactctgttttcttcctcattcttcatctcaaaggttctattccctctcatatttattcacctttttttcttacctagcatagagattgagattgaaaaccaaatgcaggatttaagaaggatggtatcgatatcgagataaacaaagaagggaatctgattaagatcagcggaagaaaacaggttgaagagatggttttggtaaagtgggtggaatggaaaaaggaaacagaaataaaggaattcaaaaaagtgtttcggattccagatattgtaattcttgacaagatcaaagcgaggtttaatgaagaagatgggactttaactgttacaatgcctaagaaagttaagggaattaccggtctgaagatcgaggaagaggacgaagaagaggagatgaaagagccgatagtagaagagaaaacagaggagaaaacagaaccagaagaagaaatcaaagaagagacaaaacctgaggaagaaaacgaagaagcagaagagccacagagagaagaggaagaagaggttgttgaggaaggaacaagagatcatgaggggaaaaaagaagaagaaatcgaagataaaccaagaaagaagagaagaaaaaagtttcgtttaccatgttttgcaggatccactctgcttatgtctattattgttttcattattcaactgattcaatccagaaataaatgaaaccacactccttaggtttttaagatagggttcttgttggtttttaaggatagaacccactttcttattatctgttcttcttagccttgttctttaaaacaataaaagtcaacgtgtaatacaatcaaaatacaatcagtatctaaaccaaaaattagtaggagcgtatcagctaataaatggaaagtatttgacccgaaccgtgtataacggctagattatcaccgaacctaaggtttgtgtttgctctggactataacaaaccctaagtgaaaaggaaaaaaggaaacttgaatgtcaaacaaataaatttatatacctgcgtctcgcgtctcctctcaagttaaaaacacaattgctctgcatttttttcaattctcttcttcgatttctgtctgcttcgtttgcctctctgttctcttcttcttcctttttgagatttcattattcatgtgttgttgcatctgcttgttggattcaccctaatctttggtgtgattcgttggtctggcctaagaacgactcatatatacaacggctctctctgttcacttaaaaagcaacgaagaagacgagagagatcacacacacaagcctcacgtcttaatttgtttgcctgcgatgataagatctatcatccaccgtagaaacagagacagagagagagatagacgattcgaaggacatgttgccgggattttaggcttcgagagtcatgatgttggaggttctatccggcgatggaggtgtcgatagattgaggaggtggagcgatcagaggattttaggcttcgggagtcatgatggtggagcaatcatcggagattggcgatggagatggcgatagattgaggaggtggagcgtattttccgttaacggataaagatg

SEQ ID NO: 31376 - DNA, 3000 bp, Unknown; identical to SEQ ID NO: 9351
  misc_feature (1)..( 3000): 2750-1469P.txt file - cDNA_ID_3041489; gDNA_ID_1972097; Annot_ID_178628

SEQ ID NO: 31377 - DNA, 3003 bp, Unknown
  misc_feature (1)..( 3003): 2750-1469P.txt file - cDNA_ID_3041495; gDNA_ID_1972097; Annot_ID_178624
tacagaagctttcacttctttacaataatgcttgctatgtagaatccattccaacacgcataccaccggaatcatgctcaatttcgaaatctaaagtgaaaatgaataagcaaaatcaaaacaacaatctttcaatcgaataaccgaaagagcaaatctccaagacaagttacctgatagaagccaacagagttgagcataagactaaagttcatagcagcgatagagatattagcaacaattgagaaccagagaagctcccaaagaggaacatgcttagaagctgatagtcccgttgcgtttgacaccataccaacaagagcagtgaatgcaaagtgaaatcccgttaacgttgtagctgtggaatatataaacaaagaaatcgtcagattcatgaagtgtgtaagctaatgggagatagatagatcagagtcagagagagagaggcataccaaagccaaaaccgaaaccagaggaagacatgagctgtttattagccatgatgattccaacggagctgattacattcatagcccatgcaccgacatcagacaccgccgatttcttctcgctctccggtttctccatttggatttgagaaaattgaacaccgacactatcagatctgaatctcgtgcaagcgaaaacgagatctgagaaatctcgattcgcttgcagattttgacagaatcaaacactgaaagagatgagatctggagaaaagtcgattcacgccgttcgtggaatcagcgaagaaagccaaaaagcgaaaaacacagacacacactcacgtatctctctctgtctctgctacttatgcttcactggttcttcactcgacgtagctgaatatattatcacaagcaagcttcttctcccaccattgatgctttccttggagttgttataaattcttttttaattctctgagatttcgaaaataatattatatatattaatggaatcattttaagtattaatttcattcattgacgcgtgtcgtttaccttatttgaccttcttctttcttcttttggtccacttgtttgttatttcaatatgagttctgtatagggatagttttgtcttttcgtgccgctggtaacgtcgtgcttttagttttcaaattaaattttaacttgcgagattattttattaaacgtttacttaagtgcttaaattaagccacaaggaactgataacagcgaattgttaacggtaatttataacggagtacgtacttactacttaatttcaaactatatatttaatttagacaggaaaatatcgcgatgtgtaactaatagtaccatttgattaaaatgtagaaatgtgttgttcattttcgaataatgcttgattttattataatcatatcgaaagtgaaaggaaataatcacaatttgccattggtcatagtcacaccgtcacactcaaagccaaacaatttcgaaactaaattattgagtttgtcctttgttcttccagctattctttacttgattacagtctcatttatatatacaaatgaaaaaaaaaaatcattacaacaacaaaatatcgtttttgttgtgtgtttgtatatcaagagttttggaaattgtactgtgtgttttatcgaatagttttagaaataatgatgggtctctgcaattattaatgctttgaagatgacaaaacctgtatatcttagcctgtgcctcaacacaaatagtaattgagaacacatgatctccaacacattgtcacaaaagagcttttgcatgtgctttcaacatcaattattttcttctaacaagcccaatttcacattagtttatgccaaaaccgaaaaaaagagagaatagttttacataatggcacacacattaaggggtttgaatggacatacatagaagaagccttggcttataaatcataacttatctttcgtgtattttcttggaaatatcaagtggagcttttgatgccataggatcgatgatcgcatcactgaaagaagatgaagaaaaacaagtaagcaccgacggaaaggaccgaacacttttgcaccaagaagatacatgttacaagacaaagagaccaacactgagatatcctgacttctccacgtgcatcatagctaggcgctgtgctataccagtataccacttagcactttaataggcctctcccgacacctgaacaagagaacttgcttagttgaaaaaagtacacaaaacaaaacgttataggccgacaagttttaggaattttataactgggctcataacataaacaaaattaaggcccaaatctgattctaacaaaaagaaaagagctctgtctctttcaaactgttgcaaagtggcttctgtagtttgttcctaaactagtcaagcaaggtgggctaacataaactcccaaaatggttggtttattacttctgtttgatgtgataatgccgcaattcaatgtgtattatgtctcttgaaatctttcatttgagtctcaattcacattcttttgattttatctttccttctttactatgttgcatatttcagagcatataattttttttttttgtcggtggtcaaagtttataaaatcaaaccaaataaaagaagtgattgaaatcatacgagaccccactggttatgttctgtataagcgccaatgaatcacaaagtcgaatcggaactgtagatgataggaaggaacaaagaaaggaatataggttaagttcaaagtggttaagctctctaatgtcgtcaatgaatacgtcatcatgaagaaataaataatttccaagtggatggacttggggaggtccacacatacgtcgtcaatgacgaccacgtcccttaaggcgaaataaacacttgccttcctaaattctctgatcaatcaatgtgtataaatatgcgcagatatatccattatcctccacaattcagggaaaatcttcaaagtgtttgcagagaaatctaaattcatcaacagttttttacaaaagaaatg

SEQ ID NO: 31378 - DNA, 3003 bp, Unknown
  misc_feature (1)..( 3003): 2750-1469P.txt file - cDNA_ID_3041521; gDNA_ID_1972104; Annot_ID_178674
ctggtcatgttgtaggtaccaaaagaagacagcgaagctaattcaggagatcacagcttctgcaaatgaagtagattgctcaaaaacgcttatcgtaacttgtcttatatgcaatgaattctttcgttaataactgctctgtgatcttcaaggtcgctcaagagacatactctttgatgagaaccgttcgtgtatatgggacagagaagcaagagtttaaaaggtgcgatctgtttccatgaaaaccattgacagtctcttttttctttatttatcttgtgaaaattttgcaatatcggccctatctgtttcaagactatttttggcagccaagttactttttgacatggattttcttcccttctgtggtggaaaggtacaatcactggcttcagagattggcggatataagtttgagacagagtgctgcatatggtatttggaactggagcttcaacactctataccatgcaactcaggtttctcaaatataacccctgttttgctttatttctctcttttgactgtttgtgggaaggatcaattaattttgtggttcttaaagatggtgatgctcatgctaagaatgtgacaagatccatcattcttttcttctcttatagattattgctgtcctggttggaggattgtctatcttagctggtcaaataacagcagagcagctgacaaagtttctgttgtatagtgagtggttaatctatgctacatggtgggtgggagataatttatcatctttgatgcaatcggttggagcaagtgaaaaggttttccaaatgatggatctcaagccaagtgatcaattcatatcaaaaggcaaggttcaaatttttggctaagagcactctgtcttagaaacatgttgaccatttatgagattgatgagagagtgagttaggttgttatcagtagatattactcttactatcaaaccccttccaggatgaaccacttaagagtatatgactttggacttcctacctggaggcttatagtgattgctacgctctaccatgtaatgtatttttatttatatactgttctgtaggaacgagactgcagagactgacaggacatatcgagtttgtagatgtgtcatttagctacccttcaagagatgaggtatgactgtaccgagtggaatctattttctgataatttttttgcttttgtgtgaatgtccttgaaccacagttttttgcttccaacgttttacaattgtgtgaatgtccttgaaccacagttttttgcttccaacgttttacaattgtgtgaatgtccttgaaccacagttttttgcttccaacgttttacaattgtgtgaatgttgcaaattaatggccaaatatatggttttgcatttgcatcattttacatttttgttgagtatattagaatttatgcacacacatcataaagagttttccagtcatgtttatagtatggggcactggggctcatatatcagtttttcataacaattatatcatatgtcaatctctcaggtagcggtggttcaaaacgtaaacatttccgtgcatcctggtgaagtggtagcaatcgtaagtaaatctcaaagtagttcaacaatgcaactgttttccttagaatttagcggaagtgatatgtgtgcttatttgttttgtttaggttggtctaagtggcagtggcaaaagtacactggttaatcttttgctgcaactctacgaaccaacaagtggtcaggtactgtaggttactcaaactcactgtagaataaccctttaaagtcttccttcttaatagctggctttttgaattccagattctactagatggggttcctttgaaagagttggatgtcaagtggcttaggcaaagaatcggatacgtggggcaggttctcctcgcttttcgtctttgtagaacaaataaactttgatgaatttcactatccctttctaaagctgtcacaatgaaacaggaaccaaagctcttccgcacagacatcagttcgaacatcaagtacggatgtgatcgtaatatatcgcaagaagatataatatcggctgcaaagcaagcctatgcacatgactttatcacagcacttccgaatggttacaacacaattgttgatgatgatctactcagtggagggcagaaacaacggattgccattgctcgtgccatccttagagatcctagaatcctcatcctcgatgaagccacaagtgcactcgatgcagagagcgaacacaatgttaaggtaacctctctattaccaaaaagacaaattacttggatgcaagaattcttaagccttttgtttttccagggcgtacttcgttctatcggaaacgactcagcaacaaagagaagcgtcatagtgatagcacacaggtatctttttcttgcactgatccaatcttttacatgttttgatcattgatttataacattctgttccttcacagactttctacaattcaagctgcggatagaatagtggctatggacagtggacgagtcgtcgaggtaagccactatcttacggttttgataaatacatagaaaccattgatggctttgattttgactgttatatttgtacacaaaacagatgggcagtcacaaagaacttttgagcaaagatggcttatacgcgagattgacgaagagacaaaacgatgccgtcttatgattgatcctacacatgctaaactgttcatgaaatagtcatgattatgtttttgaatggtcatgacgatatgtaatggcaaaattatgtaaagtgtaaccatagagaattcttattatttcacacaaatcgtgtcgttctagtatagttgacataaactgcctgccgtttctatatttcctgttaaagcacgaaaatttatagaaagtggaaaccactgaagacgacctgtagtttatcaattcgagaacaagcaagcaagcgatctcaaacgcaagagtcaaggactcaagaccttgctgctaatg

SEQ ID NO: 31379 - DNA, 3003 bp, Unknown
  misc_feature (1)..( 3003): 2750-1469P.txt file - cDNA_ID_3041525; gDNA_ID_1972104; Annot_ID_178673
gaatttgtggagcctttttctgagcaatttgattgcttctatctgcagttcaaccttcaaatcccaaggaagcgatgaaatggttgaaacaatctgcagagaatggttatgttcgagcacagtatcagttagctctttgtttacaccatggtcgggtcgtgcaaaccaatctgcttgaagctgtatgtgccttcttctgattcttttcttcatgcttctagttgagattctatattgttttcatgaggtgaagctgttatctagattgaaagtagtatctagtcgtttatactaatggctgcactcttggtggaaactgataatcctatgtatagacatgtgcttagttcgtttgtggaaactgatactgctatgtttggatgggttattggttcatttgtggaagctgataatgctatgtttggacatgtgcttagttcatttgtggaaatgtgcggtttctgtttttcatctttctagaatcagtaaagtttgtatcgatatgatgattggattttttttctctttttcgacagactaaatggtacctaaaggcagcagaaggtgggtatgtacgagcgatgtataacatttcgctttgttattcggttggagaaggcttaccacaaaaccgcaagctagcaagaaaatggatgaaacgagcagctgatcacggccacagtaaagctcagtttgaacacggccttgctctattttctgtaagcacctcaactcaactactgcttctgagagtctacttctcttagtagtaatagggataacttatcgacttatgtatatccagaaacaaacatattacgcaatgagttcattcgattttaggttatgagaaggtttggatatgtaagtaatgaatgtaatgggttgatgcaggaaggggagatgctgaagtcagtgctttacttagaacttgccgaacgtggtggcgaagcagctgctactcccgtcaaagaagttgtacaccaacagctttctgcaacttttggtggtcaggccgtacaccatgccatacaccaagccaataactggcgtcctctaccagttactcgatgactcctatcatttatttcagtgaggtctagtgattggctagttacatgtccataacttaaattccaatttgacaatgtatcaatgacaaaaccttatttcagatttctacttttagttcgtactcatgttttaatccaaatggtgcgactgataaatttgtatccacacaataccaccaaaattgtaaatccgcgtttgcagtaggataataaatattacagattgtttcgattttggttttcttttgtgggtttgaaatgttccatggtgtagtgtacaagtaatgatgatttgaaaacacaaactttatatgaataacatgtaaaccaagcttatcccaaacatatgcgatatgataaatatcatacggtatatcatttctcatagcacgacactgagcgtaccatttgaaaaattcaacgatttcttcagatcttgcttgaaaataaagtttgaatctcaaaactccgttcaaaatagaagaatatcaaaaacacgatggatacagtataatatccaaacacattattttttcgtccaaatctatgtgactatgttgactccgttcaaatctatgtgacaatctgtactattgggaaatttgaaatgcatttccgcatatttacgtaaatacattactaagcaaaatcacattctagctgtttcaacgttacatataactaatcaaatgcaacaacaccttctcactttgatgacaatcgaacatccaattaaaaattcaacaagaacaatgcatatgtatggtagaaacaatcacaacgagttaaaaggatcgtaacgaatgaatcatgacagacaattaaaccagcatacgcaattataagtctgaattcggaataccaaacatttatcaaaatccaacaaaaggttcataaaactactaactttaaagagatctcgctctttccaaaatccaaaagacaacaaaagatgataaaactccatagaagattcaaaaacagagttaagcaaataaattcacctaacttaagcagtaagcacaacagcaccaccagcttccttaatcttcttctcagcagtcttcgaaataagcttcgccttcacaacgaacggcttgttctcaggcaaatgacctttacccaaaaccttgaagaaaccatgttgagtcacatcgatcaacggaacattgtccttggttgatttcgccttcacatcttcagggacgagtgaccaaagcttgtcgaggttaacgattgggcagaagaacttgttcctcagcttgtggaaatacctcataccaactttaccgaagtaacctggatggtacttgtcgaagaggatcctgtggtgatgcatacctccagcgttaccacgacctccgggatgcttacggtgcttaccgatacgtccatgtccggcgctgacgtgacctctcttcttcctgttcttcttgaatctggttgtcattttcgccgatctgctacactctcctccctccctttctctctttgcggctagggtttcttaagatatcactgagtttataaagacgataaggatttttacgtttcctattttaccctctagggtttacgacattttgggctatttagttataacgcgagatgggcctttaggcccgattatatcgtagagggggaagagagatcatctaccacaaccacatgattgaaccttcacgcgcctttctgacgcgccggtgttgttgttgttaccatgtggttcatgccttcggtggtggatctccgtgggttccacctcggtttattttggttgacacgattcttccttacgtgacgtctttcttcttcaatttcgaaacgacgcgttttaattcttcttctgcatttcatatgaaccaaggaaaaagcttgaagcgtcgtgactcgtgaagcttcttcatctttagtccaccgaacataaatg

SEQ ID NO: 31380 - DNA, 3003 bp, Unknown
  misc_feature (1)..( 3003): 2750-1469P.txt file - cDNA_ID_3041529; gDNA_ID_1972104; Annot_ID_178669
gaggaacaaatgctgaagtttatgggagcaaacacacacttgtctgttcagcaggcaaaagaactcatcgaggtgcctacaataatttaaactaatgtcctacaggttttctctattttttatgtctatctttctcctgtcagcctatatctatgatttacgcgatctataaaaatgctgtttgattcttccaggacgagaaggctggatttgcatatctcagtctacgagaagctcggccatctttgtatgaaatctgagaaacatttatttgtgatatacaaatgcatacgacattttcctgttcttccataagcagtttggtggtaaagataacatctgatcgtattgacaaatttctttgacaaatttgcagatattcactaatcgaaatgagggagcatataaagaagcgccctcctctggcaacaacggagaaagttcagcaatttgtgagggtaagggatctatgaaatgtcaccgccttatatgctccacgcaaatagaatttaacaactcatgtgactaagacaagtttaagggggaaagatatcatagggcttgacagaaagtgaccgtatgcagacatttcatggactgtttttcaatgcaggcgacagggaaagaagccattgttgctgggttttaccatgaaggctacgaagagcctctcttaatgcttatgagacgaagaggtgtccattctggtttggtggttaaggttgagtctctctcttttaccatcaaatatatattaatgccctacgagctactacacacttgggacgtagacttagaacctgaattctgttggaagctctttccatatgaagttttgaacttttagtagagaaaatttcaggtctgattgtaagggaatttataaggcttcttttggtaatgcagggtgaggagggggccctttcaatgacaacacgggtgcgagctgcaagtgcatcaaaagggtttccagtcaactactgttccgggtttcgttcattgagttcggacacggctctagaagctgacggttagaatagctataataactttccttgtttcaaactagaatctactgcttgaatatatgaaccgagtccagacagggttgacacttaatttcacaggtgcaaattagtgttgtagtaaaccggattgtaggtggtaggagttcataggctaataaactattagctaatcttatatttggtcgatatggagtcatgatgtatcattttaccttggtgatggaagtcttttggtggattagcctaatctagagtgctatgaaatctaattcagattagattggtctttgtgctatctgatattaaacttatttgccttatgccttggtactagtatatgtcttgttgtacatcaatatagtttatgctcctaaaactcatggctaaactaacttctggaatcgtaggtgtatcgcgtcagagtttcaatcttgaggtggatgcgagaaactatgggtttgaaccaaccgagactccacgaactgatcgttcggtaaaacttccagaagccatttgtttcacaatgttgaggactgttagaaaaagaaaaaaaaagagaaaacttaagtcatacttttgtttaatgaacaggtgtcaaagaacatagagctggggctggcagcgcttcgtggtgagaaaggagcggcttatgatagaatcgtcctaaatgctgggattgtggaccatttgttgggaagtgaaggtgcagaggatgtagctgtggcaatggagagagcaaaggaagctattgacagtgggaaggctttaaagaaacttttgaattacatagaaatctcacgcaagataaaatagttcaaccaacctgaagagtctgaaaaatcatacacggaatagagaaaagcatacacctttctgattcttattgatttcgttttgtgtaatatgtttttgaaacttgaaagtgtttttttacagaattggacacacaacacaatgtggatgtctagtgaatcacgtgtacagagtctgagaacaaaacttggttatttctaatgtgtttaatgtttcttaatcattttgcacattcatgttacttaattagtttagtcccgtcaaagattctgatggagacattcgagccactctttctcttgaggataatgggaaacaaacaagcgagtcaatgtccggaaaatgacattgaagccgaaggcaagggacgtgggacgattttataggttgtgttgcagaaaaaacagagtccatatcaattctctcactcgttttttttaatccgttttgtagcaaaaagctagaaatgacttttggttataaaatctttctttttgccgattcaagtggctcagctgcttcgtctttttgtgttctccttatgccacatgatctgatcagacgagtgtccaaattcacgtcagacacacaattgtaatctaccgaagattttattttaatatcatataaaacgctattgcaataagcgcccacacaagtctttcttacttgccctgctctggaacgtgactttggaggtaacgaaactgtgtcgtgagttgatctaaggttggtataatttcttgtagttttgtccgatttcgaaaacccatttcaaaaggcgtcgcctttacttttatatcgtttgagactgttctgtagattttgagttgtggggttcactctctacgtgggttggtgatgatttttttttagctctgttcactgttgttttattggaataagttgatggtacgttctgtagttatagattcgataaaaaaccaatctttatgatcgactcaataagtcaaatcttgttgtgttaagtgaaatctatagtagtgaaagggtctccacttagctgtttggttagtcttgttataagctcgattatgtcctttcttgtgatcagtgtattaatacatctgcttattttggttgtagaggggaagtgaggaatcattttgcttttagctttgaaaagtaaatcctggaaatg

SEQ ID NO: 31381 - DNA, 3000 bp, Unknown; identical to SEQ ID NO: 9361
  misc_feature (1)..( 3000): 2750-1469P.txt file - cDNA_ID_3041537; gDNA_ID_1972104; Annot_ID_178663

SEQ ID NO: 31382 - DNA, 3000 bp, Unknown; identical to SEQ ID NO: 9370
  misc_feature (1)..( 3000): 2750-1469P.txt file - cDNA_ID_3041585; gDNA_ID_1972105; Annot_ID_178716

SEQ ID NO: 31383 - DNA, 3000 bp, Unknown; identical to SEQ ID NO: 9373
  misc_feature (1)..( 3000): 2750-1469P.txt file - cDNA_ID_3041592; gDNA_ID_1972105; Annot_ID_178710

SEQ ID NO: 31384 - DNA, 3003 bp, Unknown
  misc_feature (1)..( 3003): 2750-1469P.txt file - cDNA_ID_3041596; gDNA_ID_1972105; Annot_ID_178707
ttggataacccaaagtctgaaactttggctacccagttctcatctacgaggatgttagttgttttaacgtctctgtgtataatcgtgtactttgctcctgtgtgaaggtaatgtaatcctcttgctgctccaatagctatctctagccttcgtttccaagttaattgtggtttctttgtgttgtatagatgctcacggagtgttccaaatgccatgtaatcgtatacgagacacatttctcctccctcgtcgcagtatcctatcaaggagactaagtgtttgtgtcttagtcttgagaggagttcgatttctgtctcgaattcgttgagtccttgttctgaatttgggtttgatttttttaccgctactttagttgtgccgtctataactcctttgtagactttaccaaaccctccaactccaatgacgttggaatcatcgaagttttgtgttccgtgtttgatttctggtaaagagaatctacggcataaacctgctgcgagattggataggtgacttccattgttgctcttccctgagatggttgatttggttcctgatgtggtagagtttccatatataggaagccaacttgatgtgtgagagtcgcctccttgatatccttgtttcttcttgtaggccgtgaaacacaaggcaccgattaaaaccgctaaaactcctccggccgaaccaatgatgaaagcgtgtctcttttcgttcttgaattcttttttaacctcttcctcagcttgcataggcgatggctcggggtttggacccgcaagatttttcatggtgtccatcttgaaaatctctaacccgttaagagatgaatcataatattccggttgaccaaaagttgatggagtcatctgaagtgtaatctcttcgcctccgttgttggcatcaacatatatcgcgtagtctttgtacatcgggattcctttctctcctgtccaccctattatatctgcaggagtagtatctgcctgcgctgttctgttattgatgtaaatgttgaaaaccttctggttgatcttggaaagctggaattcgcagaaatggagtctcaaaatgtaggtgaagttcttatcgatttggaacatccatgtaagattggatttgaggttgatatctccgtttgggccttgagatcttgcggttttgtatatatcggctggagctatagacaccggcatgttctggtagttgatcctaaaattgttgcttgcttgaagtgtaacaccaagacccgcactaaagatgtaaggtgcatcattataccaagttcttgtcaacccaccggagtcttggcttccagggatgtcctgaccaccaacattaagtctaaacattgactgaagattcgcagtcttggcatccattgtttggtctgtgaaaccaacaagagccgccgtgtcaaacaattccggcatctgaatcacctcgataccgtttataaaggcaaatgcgtctcggtatttatctgaaggggtaaacttgatgctcaaaacatctttgtcagtgggtgcaagagagtattctttaaccagataagcttgagtcaaagcttgacacgtaatcgcggcgctgaaattgctcagtaaggtaacatcgttagcttccacagtgaaatacgagttggaaatgttgagaccggtgtatgttgatgggtagaaatataaccgaagcaaatgtcttttatctcctttaatcgggatttcataagttgctggagctgtaaagattctggctgtcatataaggaactgttgagagaagtgaagggtcttgatatgtagccgttgcgtgaattgagtttccagtctttaaaaactttgtatctggttcccattttttcttatcttggtcagcagaagcttctgatgtcccgcagctcagagctaaatcttgtccgttagatctagttggaaaaaccaatagaaaggagagacatgtgaggaaaaagagaatccgagttttcccgctcatggctgacacatcaacgggtagagactctttgccttaaacaaaaaatgaggagagaaaagctttcttttttgtaagaattaagatcacttttacgcttgtggacaaaattagaagtttatttcttattgtctctgtaacctaaccatagaaagtcaggacttgcatggatgaacaagaagcaaaaaccttgcaagaaaaaaaaaaacaaggtacacactcttttttcttttctattttctcgttttgtctagtttttttttgtttgtaattatgaggttactggtgtttttctcattttccgtcgttctgtctgaaagagaaacaaaattagttagaaaaattcgtggtggagaggattacccgaacaagctatgtttagcatatagttagagaaactgaaaagacttttgttctttgactacaacatgaaaattcatgtaatctaaatatagaactcttagaccatattgtttcaataacattattacaaacttttgaaagtttgacttgatagagatagactacgacatgttttgaaactcttttcttagaatggtcaaggatctaaacaaagaaagtccctaaagatctggatgaatcaatcgtcaaattttaagcaatggaagaaaatagctttttgacttttatccattacatagatcaatggtggaaactagtttgttattctccattaaagcactaagagtctcttcaaagtttatctggtcgggttgggaaaaatccaactagagaagagcataaaagtagacatctgatcaacccgacccataataacctttttttgttggccgcgtaatatgttcgagcgcggccatcacactaagaacattcataaaaaaaaatccacaggattcaaagcccttaagctttgatcatagtctcttaaagaggtagtaaaaccataaactagagccccaatttgcattcacaagccacctaacacattagcttctggtcatttctgctttatatacacatcaagtaaaaaatg

SEQ ID NO: 31385 - DNA, 3000 bp, Unknown; identical to SEQ ID NO: 9367
  misc_feature (1)..( 3000): 2750-1469P.txt file - cDNA_ID_3041600; gDNA_ID_1972105; Annot_ID_178706

SEQ ID NO: 31386 - DNA, 3000 bp, Unknown; identical to SEQ ID NO: 9375
  misc_feature (1)..( 3000): 2750-1469P.txt file - cDNA_ID_3041604; gDNA_ID_1972105; Annot_ID_178705

SEQ ID NO: 31387 - DNA, 3000 bp, Unknown
  misc_feature (1)..( 3000): 2750-1469P.txt file - cDNA_ID_3041614; gDNA_ID_1972105; Annot_ID_178696
tatcaacatctaaaagttatataaatcaggattataatatcaaaaaaattatattattaaagtttggtttaaatttttttattaacttacatgatcaatgggatccaaaatcagtttacctctcacattgttttggtgctgaaaagaaatatatagatgggtttttaaaagaaacttaggcccatttaggttgcaaacaaaataactcaggcccatttagatttacaaaaggctcaaccactaaatttttatacctcacaagcatagtggtctctctccgtcattcgctctttactcggtcaacgaaccgtttgaagacgaacacgtgtcacgttttagtaggacttacgagaagcgcaacgagtgctatataaatgccgttaagcgtcgtaacggttttctaattccccgagagtaaccaacaacccaaagcgatcaaagaacttttcccgctagagagagagagagaagaagaagaagaagaaaagttacgcagagagactgaaagaagagtgatcgatcggagaaagatggcgatggaagtagcaacaccggctccggcaccaatcccatcggagaggaacatcgttctcgcgcctgcaacaacaacaacaaccgccactgttgagactcacaagaagaacaggatccaagtttccaacaccaagaagccattgttcttctacgttaatctcgccaaggtaatgatcggaaacctaaattcatcaccggatctacggtttttcagatcaacgagtcttcctttttctcaattttgactgattctgtttactagagttcgagattcgcttgattttaagattgtagattcagttaacgaaacatcgttttagtatcttgaaacgaacaatcagtattcgcctggattttgtttccgatctgtttttggatacttgtagtattgattcaggatcgatctttatctatttgatactttgtgtccaccaagtgtttgattgtattacttagagagtaattggatcttttcgttgtttgatgcagaggtacattcagcaacacaacgaggtcgagctttctgcacttggaatgggtatatagactctttcttttacctttatcttttttatttgatcggtttctcatcttttgcgtgtatatgtatataatcattaatgtgtgtatagcaatcacaactgtggtaacaatctctgagatcttgaagaacaatggacttgcaacagagaagagtgagtcagatctctcccttcttaccatcaatctttgaacctttcgttctattgaagaaactgtttcatctctggtctgtgttgaattacagaggtgctaacatcgactgtgggaatgaaagatgagacaaaagggaagatggtccagaaggcaaaggcgagtttcttttttactacttccttatacccttttgaagttttatttatctccttttgggtttgttattgttgcagattgagatagtgttgggcaagtcagacaagtttgactctttggtgccacctgtgaccaacggcaagactccggaggaggaagccagtgcagagacggaagcttccgtggaagcacaagaagaagttgccgctgccaccgaggtctaggttggagccggttgagagatttactgcagaaggactgatttctcttttactatgttttgttggcttttgtttcgtttgtgacatatcgaacataatactctagatatgatagtaattgtttgtttagcaacaaatagtattcttcactctctgcttccatttaggatcttgaacaatattgatataaatatttttctctgatttttctcaacttttttagtctttgtccttaaggcaaaaataaagaaaagaagttttcaaattaaaatttgtttcgtggaaagcactcccatttgtgctaaataactgaagaccaaaacaatgttgcaaccttagcaccaaatttttgtagttattatttgacgactctataatatcaaaatcttctataaggtgtccactatctgcaaaatcaatgcaatttctgtgaaataactaagcttacatagtaaagtctaatgagaatagtataatgttagcctaaaaaaaagcaaagttaaaagaaaattaaaacaggtataaattgaactaataataaataaattaataagaaaaaaatgtttgttcaatgacctatcccacttccaaatcaataaaatagatgttaaaaaaaaaagttatgataggccttaaagcagatcacggcccatacgaatgtgactttggattataaatatacgggctagctcaatttgacaaaactagaagctgttaaaattagaaggactaaagtgttaataaaagaaaagttcactagttgtcgatctcaactttaagataattttcacccgcctccattgttaccggaatctctctctttctccgccgaacttcttcgaatcaagtttccgtttatcactctaatattgttaaagtttccactgataccacgtaatttcactgggttatctttaatcctaagtttaagcttttggggctatagttctttctttttcattgtcaattctagggttcctcgctggggtctatatgttcgctgtgttaatttagggttttcactagtccgaaaacgatattttcgtgtttcattaagcttatatttttctttactaactgcctctagtttatagatgctattttctgcagaataagcttaggctaagttgatacctcttatatgaagcagctattaggtgacctagaataatttgttagattttgaattttgagcatattattggcgaagctgttactttatagatgcaaatgttttaattctaggcgttatatttctttctaacacatgctttataacaataacttgttgaaggaagtgaaatcttcaatgaaactttaactgtttgtatatgtataacgggactaatgtgtgttatctggactctgaatttatgtcagcgctctagtcatg

SEQ ID NO: 31388 - DNA, 3000 bp, Unknown; identical to SEQ ID NO: 9378
  misc_feature (1)..( 3000): 2750-1469P.txt file - cDNA_ID_3041624; gDNA_ID_1972105; Annot_ID_178689

SEQ ID NO: 31389 - DNA, 3003 bp, Unknown
  misc_feature (1)..( 3003): 2750-1469P.txt file - cDNA_ID_3041628; gDNA_ID_1972105; Annot_ID_178688
gacaacgtcttagtcgatctcgtaagcggcggtgttaagctctgtgatttcggatcagcggtgtggttaggcggagaaacggcggagggagttgtgggaacaccgtattacgtggcgccggaggtagtgatggggaggaagtacgacgagaaggttgatatatggagcgctggtgtagtgatatacacgatgctagctggagaaccgccgtttaacggtgagacggcggaagatatatttgaatcgatattgagagggaatttgaggtttccgccgaagaagtttgggtctgtatcatcggaagcgaaggatttgttgaggaaaatgatatgtcgtgatgtttctcggcgattttctgcagaggatgctcttcgtaagtcatcttttttttctcgattttttttttttttttgagtttgctcatcaatttgtaatggtgaattgcaggacattcatggatgatgaacgttggaaacctccaaagcaattagtcgaagcttttcagatatgtgattagagagtgtaattagagaagtcgtaatatagatgtgagtgtgtaattgtttgattcgaatagtcaaacgtagttgtgtgtttcagcaatcttcctacgttttgtcactagagaaagtatgttgaaaactttttgtaacgattcgccagattcagaataaaattgattttgagatcattgttgagagttaggtcaaaatctgaattcgattatttgctccccaagaaacaaaaagaaaagattactatggttggtaaatctgggccagtagaagggatctttcggaaattgggcctaactgatgaagtttagatattttgggctagatttgtcgaattttggggcccgtttcaggctaattatgatttgttcgagaaaaaaaaggtttcgaagtcaatgcaaaggcaaatggagttcaattattctccagacctggttttcacattaactaatactcaagtaattcgtctagactctaatgtatactagggtttttaaactaaaagggacatttcgtttttaaaaacagccgtggactgatttactaaataattcttttctatataaaaatatcttatagccaaaataaaatattattagtatatatgtgaaagaatatccaccaatgttaagaaacaaatctttttttaagtcaaaataaaatatggttggtatattgatatatggaagatacatcaatggtgagaaagagaaatgtcaaccttgaacctaaatgttctataaattcatcttttacttacaatccagaaaatcacaacatcttttttgaatagattttatagctgatacaacgagcaagagaaaatggccatcacaaagacttcagtgactcttttacttttaataataatggctgcttcgttgtctaatttcagcgtcttggcttcaggtatgtttgaaataattctatgctgttaatttcttattaggtttcatcacttgaaagcaatgacattgatatgtatgtatgtacttaaatcatgcatatatatatatatatatatatatatagtcatatagatatgatattcatgttgtgagtttgtggacatgcagagatcaaacctacaggaagagttgataatcaatgcaaggagatgtgttcggcaacgtttggggacggtaaatgtgccgcagactgtaggaaggctggtttctcatccggacgatgtcttacttcttctcctttcggaaataaatgttgttgcacctagtgatagctagaaccaatctatatgactatatgagttttctcttgttgtattgccacatattataattgtactgcaatagaataaaataattttattgttatatttttctttaatcatcaaaagtaggagctacaattacaatgcacgagtcgattaacatactcttatgactctttaactactcaattattacgtacgagaagttttctaaaatttcaatactgaagtggtgatattgtttacacaacgcaatgtcaagttttttcataaaaaaataaaataatcataaaaatatatgtttgcttgtgtttaaacaatcctaaacattttgtaaaacttcagaataaaaatgattaatttcaaattatgattgtcagttaggtcgaaatcccaaatcgaccatacccttatcggattggactttagatcttttgttaacaatgacgtgcataaatgaattatgaaaagttgagttaataaggctttttttgttcctgctctaaaaagatggccaatattgccagtaaagaaaagaaaacaaaaagaagcaagcaaataagtgttaacattcatggcttaactatgatgaatattgatgattacttttctatatccaacataatgatacctgttacttacattcataaacaagtttgaaaaaatcgcctagagatgctagattagtttagttattgcaaggagagatgagccattgatgtatgggtgaaagctcgattcgattagtcaacgtagctgagaaagttaagttggaaacattattttgtaacgtttcggaacaaaaaggatcttttgggcctatctagcaaatttgtgggccgttctcaggctaattatggtttgcttataacttagttattcgcatcactcctacgatttgttctaggatctgtggtcaaccttggttttgaaacaaaaagggacattttgtatttcaaaatagccacggattgatttgttaaacaatacattttacaaaagaaaaaatcttttagtcccaaataaaatgttattagatacatgtggaagatccaccaaatccaatgttaaggaaaaaatctttttaaatcaaaataaaatattattaatatagaaagatccatcaacggtcttcttttctacaaccacaataacctaaaatgttgtataaataaagcttctacttacaatctacgaaaacacaacatttttttgaatagattttatagttaatacaacgaggaagacaaaataatg

SEQ ID NO: 31390 - DNA, 3003 bp, Unknown
  misc_feature (1)..( 3003): 2750-1469P.txt file - cDNA_ID_3041647; gDNA_ID_2213663; Annot_ID_181914
tagaaaacgattataagcatagatatgattcatttcaaatgaacatgctccacctataattctagctaggtgcaaaattgttgacatagacgaatcaaaagtcacacgtgtggttgcatgcacgttgactatataatcttccatgcttcttagtttattacaacgttttaattggttgattatatattttaatatttgaaggagacttttggagtttcttaactttgacaatcttagtataactacgtatgagaaactccatttcatacaaaccaaaccaaaaagtcacattttgatcaatttcttgccgagtgttttattcgagatgttttgaaagacttgccgtgtaacatgtatcctttacttacagttgcagtttttgtcataggtttccttctatgcgaactttttcataatcagtatatttaacgttgatgtcacattattcgactattaataaaactaatgaaactaatttaacaaaaaaaattaactacatatgcagtacaataaaaaactgttcataaatcttttaattcgttagcaatataaatagtgcacaaaaacttaaacaaaatcaactttttaaaacaattttttttttgtaaataattaaataataaaaaacagattgagtaattgacaaccatatatttttttctaaatagaagaaacttgtttttgaagtatcttttatacggtgaagggtgaactaaagttcaattattgttttaatctctctcttttttttttatcaaaaactattgttttgattgactgcacgattaccgaaatataaatagctggaaaagtaaataactgccacgtataaaaatgagaagaaatcaaaatcaagggtattttggcttagcgtgtggttagcgtgtgtgtgtgaatgccgatgtggcatgtcattttttttaagtagaaaaacttatctaaattatgtatgtataaataacataattctaggatatttaacttagtaaactgcgttttaaagaaaacgttaactagatcatgtgggtgtttatgattccacgtttgctcttctgagaagaaacaaattaaatgttttaatttggtttgcatcccagcaagaaacatatcaaattaagattagtttaatacttgcttcattagacaaaacacgttattacttataagttatactactaacattaatcaaaattattggtatttgattttgtcaacaaattattgttgatctttagcctttacacatttatttttatatatggatttgattcaaacttttgggttagttcttatctcatttaatccaatcagatctcggtttgtttttatgttttactttttgactcgatttattatttttcatgatttttttttgttctacatcacagcaaagatgagatacatatcttgttaagcatgatatatgtataactatgcagtatactttttgtttatgcatatacattaacaactgtgtaaaggattttatcattttaagttgttcttatccctttagtttatatttgagggaagaagaaaatcactttcatatgtttgatttctatttttgtacatactacctaatttcaccatttatgcatgataattgctatatatgctagaaaaacagggaaaattcaattaacctaacaaaattggaaaagttcataaatcagataaagcagcgagcatcgcattcaaaacaatacgttaggctgtgcgtactgttttattaattttaatttctttacaaaaattgaagataaataactcaaaaacaaaaaacagaagtgaatttacagtctcatgatcttattttacattatatatacgaatatgcattatgctatagttcttctattcaagttttctcgaaatttttcactcagaaaaaggatacaataaactaggactatagtatgatgattgcgtcatcagccgcatctgggcttacgtggatatggttaggacaaaagtaaaactaaccaatcagatgtcatcccagaggacacagctgtctcatttgggtccacttctctaacaaaacttcttcaattattcacacacaatacaatgacacatataaacaatttaaataatttattaaatattgaaacggaaattttgtgttcatacttaggttcttactatgttattgtattttttggaaaagcttgaggactatttctcataagtatataaattttttgtactcaaaatttcggattcaatccctagaaatacatttatcaaacaaatccaatttgagttttatttacaaatacaaatttgcaatttaatatgacatgggtctcagactttacaaaataataaagtctagatactacgaactcgttcgtaattagcaatatatatatatatatatatatatatttttccacttagcaatctttgttttgaatgtataaacaatgaagcctttacataaaaagtctaattagacataaataatgcatttaatattaggagaatatatagactacgtgcacaaaacgaccaaaattgagtaagatattaataagaaatatataaattatatattcaagtttctgttcataaaacatgcttgagtttcgatgacgatatttgctagtttctccataaagttctaataagttttttaaaaaggttcttttatttggttgaagatattaatactaactgattttatttactttttatccactacttgacactattttggatcttttcctccggtctactttacagaaaataatattctatatttttcataaatatttcaatctcaattttctttaaaaaattatacattcaagcactaaacgacagaactctacacaccataaattgccctcaaaacctgctctacgaaaaatttcaatctttggctcacttctttgtttatctcatagctcttcaccaaaaccaatattttctcctttgttgttctttcttttctatcaaaactttctacttaaaatatcattcctttaaacaatg

SEQ ID NO: 31391 - DNA, 3000 bp, Unknown; identical to SEQ ID NO: 9380
  misc_feature (1)..( 3000): 2750-1469P.txt file - cDNA_ID_3041647; gDNA_ID_1972110; Annot_ID_178757

SEQ ID NO: 31392 - DNA, 3000 bp, Unknown; identical to SEQ ID NO: 9383
  misc_feature (1)..( 3000): 2750-1469P.txt file - cDNA_ID_3041654; gDNA_ID_1972110; Annot_ID_178751

SEQ ID NO: 31393 - DNA, 3003 bp, Unknown
  misc_feature (1)..( 3003): 2750-1469P.txt file - cDNA_ID_3041658; gDNA_ID_1972110; Annot_ID_178743
taatggtgttgcatatttcaatcaaaagcatttttggccaaatttatatcttatcaatgatactcgtggctccacaatatcatattaatcaataatctataagctccctaatggaaaacaacaacgccaatagaccaacaaaatcaacaaaaaagctaactacctccatagatcgatcaacacaagcttctattgattttcattttcacacatatacaaatcgaaagcaaaagtaataagatagattcacaaaaagttgaaaagtataaacatttgcatagtcactttaatagaaacatgttcaatcatcgtcaaaaatcacgatctttcgcatagtgataacaaaatgtagcaagaaagtctcagctcaacaacatagaaatcgaatcgagatgtcaaaaggatgtttaccagaaaaaaaatcgattttgtttgtagagagcttcgaaaataacgatgatcggaagatgaagagagtggaacaggaacgatccagaacaacaacaaaaaaaaaaaactttcagatctctcctcaaagttccaaaatgagaaagtgattagcttccttctccaggtgtgacgattcgaaaacgcttttagagctgtgggagtaaacagagggagatagagaaagagacctagagagagaggtagttgcggctagatttagggttaataatgaagaagacgaagaagatgagacgatgaagaagaggttgcaatttttgtaaagagatttttgagttttggcaaaaaaaagtaagtttttttttttgtttcttgggggaaggattgattcacttttttcgatatttttttctacgtaaaaaatattactaataataatattttgagaatttaacactaattaatttttctctttttaaaaaaaatcatttttgcaacgttaacttttttttgttctctgtgctcatcatccctaatcgcagatgctacttattggctatcgctgttccgctttgggttcctcgcgtgcctttttttttgtacagatatttgttcatagaaatattctaaaatgttatatgaagaaaacttaattaagaaaatgctttgttatgtcatacgtgtaagcacatttatcacataaattttcactcgatttgttttgaaacaatgaaaaaaaagaaagaggaacttgtttctttttgttgacaacaaatcgtatgtcacaaaatccattaattcatggagatcggtgaagcacatcgcgctgtatgcataatggctttgtatatttgtattagaagtcaatgatttggaattaatatgtcaagtgattattaaaaaaaaaacgtaagattcaagtacatttcatattgtttggctataaattctaggcaatcaaattatttaaaacatgcttagaataaatatatttaactctaatatcagtcgagtgagatggcatagaaagacttcaaagttatcatgtgtttacttaatatcttatatatatttcttctctagtgagtgtttttaaagtggttaaaaatctggttgcaaaaataaaattgttgcatctaacaccaatttaatggtgcatatactgtatgtggaattaagttgttgggaatgtttttgagttttttccggccttgaggatgatgttgtccttaccgcctcatacaactaatgaatgagagaacatgtgagacaaaggataaacatattgatcagttttgtgcaactccatgtgatgtttgccaaaaataatttaatgctatttatatttgagaatccatcacgagcacaagttaaataacttttgaaaagctatacatagcagaaaccaaactctaaagattttgagtttatttatataaaaatttaaaaaacgttttccaattcaccataaataatttgaattaattattattttaaacatgacttgaatttgtctactatttttgttgtatgtgagaccacaatactagtaaccccacaaatcaacctaagattttatttttctcatacacctacttatgttagaaaatccacagaaattaaaatatatcaccagttcaaggcctacctttctttttttatagaagtttaggtaagaagcaaaattatggatcgatgcctaacataaggttcgtatccccttggaatcatctttgaagccatctaagactcgtttatgaagcatcatcccttttacatatgtgcaatgaaggaataattttagatgcgataccgatagatatggtgtgttgattagcttacggagtctaatcacatacacactcaattttttgtcctagccaagaaaacccatgtttgcgaccgatcattttatatataatttttggcctaaaatttgtaaaagttttcttgagttgaattcaaaattaacggattttcatattttaatgttgtcaatatgaaaaccatatttgtaaatttctcgcgaatgattagcaaagttttaatatatcccaaccaccactccttttgtatgtgtatgttacaattaacaaacatcaccatggttagtacttcctaaacaaatggaattcatgataatttctcttaagcaaaagtcctaaaagtgtagttaagctttactgattcgctatattgattttaagttaagaagaaaaagaggtctcactaataaaagcaatcaacgtcaaattttcagaatcttctcgtgtgacgaaaaatcgtcattaagaagaggagccttatctttttgggttaaaggagcaaaaaaatcgaaatttgtcgcttagaattcctcgtaaatttgacccatttgggggcatttctgttctttgttaaagatcaccgccttacgttaaaggggaaggaagacgaagaaaacaaaaaagaacggaactttctaaaaccccccacacaccaaaagcgctctctctctctgggtttttcgaggttgcgtttgctttcatctgcccaaccttctagggttttccttctcttaaagcttatcccttttttttgccttctctcgatatg

SEQ ID NO: 31394 - DNA, 3000 bp, Unknown
  misc_feature (1)..( 3000): 2750-1469P.txt file - cDNA_ID_3041662; gDNA_ID_1972110; Annot_ID_178741
ttttttgctcctttaacccaaaaagataaggctcctcttcttaatgacgatttttcgtcacacgagaagattctgaaaatttgacgttgattgcttttattagtgagacctctttttcttcttaacttaaaatcaatatagcgaatcagtaaagcttaactacacttttaggacttttgcttaagagaaattatcatgaattccatttgtttaggaagtactaaccatggtgatgtttgttaattgtaacatacacatacaaaaggagtggtggttgggatatattaaaactttgctaatcattcgcgagaaatttacaaatatggttttcatattgacaacattaaaatatgaaaatccgttaattttgaattcaactcaagaaaacttttacaaattttaggccaaaaattatatataaaatgatcggtcgcaaacatgggttttcttggctaggacaaaaaattgagtgtgtatgtgattagactccgtaagctaatcaacacaccatatctatcggtatcgcatctaaaattattccttcattgcacatatgtaaaagggatgatgcttcataaacgagtcttagatggcttcaaagatgattccaaggggatacgaaccttatgttaggcatcgatccataattttgcttcttacctaaacttctataaaaaaagaaaggtaggccttgaactggtgatatattttaatttctgtggattttctaacataagtaggtgtatgagaaaaataaaatcttaggttgatttgtggggttactagtattgtggtctcacatacaacaaaaatagtagacaaattcaagtcatgtttaaaataataattaattcaaattatttatggtgaattggaaaacgttttttaaatttttatataaataaactcaaaatctttagagtttggtttctgctatgtatagcttttcaaaagttatttaacttgtgctcgtgatggattctcaaatataaatagcattaaattatttttggcaaacatcacatggagttgcacaaaactgatcaatatgtttatcctttgtctcacatgttctctcattcattagttgtatgaggcggtaaggacaacatcatcctcaaggccggaaaaaactcaaaaacattcccaacaacttaattccacatacagtatatgcaccattaaattggtgttagatgcaacaattttatttttgcaaccagatttttaaccactttaaaaacactcactagagaagaaatatatataagatattaagtaaacacatgataactttgaagtctttctatgccatctcactcgactgatattagagttaaatatatttattctaagcatgttttaaataatttgattgcctagaatttatagccaaacaatatgaaatgtacttgaatcttacgttttttttttaataatcacttgacatattaattccaaatcattgacttctaatacaaatatacaaagccattatgcatacagcgcgatgtgcttcaccgatctccatgaattaatggattttgtgacatacgatttgttgtcaacaaaaagaaacaagttcctctttcttttttttcattgtttcaaaacaaatcgagtgaaaatttatgtgataaatgtgcttacacgtatgacataacaaagcattttcttaattaagttttcttcatataacattttagaatatttctatgaacaaatatctgtacaaaaaaaaaggcacgcgaggaacccaaagcggaacagcgatagccaataagtagcatctgcgattagggatgatgagcacagagaacaaaaaaaagttaacgttgcaaaaatgattttttttaaaaagagaaaaattaattagtgttaaattctcaaaatattattattagtaatattttttacgtagaaaaaaatatcgaaaaaagtgaatcaatccttcccccaagaaacaaaaaaaaaaacttacttttttttgccaaaactcaaaaatctctttacaaaaattgcaacctcttcttcatcgtctcatcttcttcgtcttcttcattattaaccctaaatctagccgcaactacctctctctctaggtctctttctctatctccctctgtttactcccacagctctaaaagcgttttcgaatcgtcacacctggagaaggaagctaatcactttctcattttggaactttgaggagagatctgaaagttttttttttttgttgttgttctggatcgttcctgttccactctcttcatcttccgatcatcgttattttcgaagctctctacaaacaaaatcgattttttttctggtaaacatccttttgacatctcgattcgatttctatgttgttgagctgagactttcttgctacattttgttatcactatgcgaaagatcgtgatttttgacgatgattgaacatgtttctattaaagtgactatgcaaatgtttatacttttcaactttttgtgaatctatcttattacttttgctttcgatttgtatatgtgtgaaaatgaaaatcaatagaagcttgtgttgatcgatctatggaggtagttagcttttttgttgattttgttggtctattggcgttgttgttttccattagggagcttatagattattgattaatatgatattgtggagccacgagtatcattgataagatataaatttggccaaaaatgcttttgattgaaatatgcaacaccattaagagtgtttttgtgaaaaaggaatgctcgtactgcaagctatggtttcttctattgtatgacattgccattacttgctatctctattgattcattttaagcactttcctgataaagaatctgttttatccggttgattgctcttatttgtctgttactgctcaaaccttacactatactcccaatgtttctatgccacaggttaatctaaagaggtgaccgaaagaagaaaacttttacgttttgcatggagtaagaatg

SEQ ID NO: 31395 - DNA, 3003 bp, Unknown
  misc_feature (1)..( 3003): 2750-1469P.txt file - cDNA_ID_3041697; gDNA_ID_1972112; Annot_ID_178798
tatgtcctttttctttatgcgtactcttatcttaccatgctggactagaactgtatcatcatcatctccaggttcttcaaccacagtacctaacttatctcccagtccagttacaagaactttttcaccagcttgtggtgagtagtcactgtattcttcttctaaggaatcaggatccataggacagcaagcttcaataatctctgcaactgcctcttcggttttcaggattaaggaattgtattgatcagcttgagtgatttctagttgactttcaaattcagccaccagtctctccatctttgacttagcagagtttagatcttcttgcaccttttgcgtttcttttttcagaagagccctctcacgtttatcaagatcatgcgactcatgctcaagcttcaggaaaaatcaagaacagaaacatacattacaagagattaataatatcaataaaacaacattcttaaatacctcgtggtaaaggttcattaagtctctatgaaaagctgcagtcttagttgcctgaagctttagtttatttctttcttccataagggactgaaagagtgagcctttccgctctacatcctgctcgggattcaatttctccgtccacttatgcgcattctctaatattcttttattgaaaccaatggacttagctactctcaatgcatttgatagaccagtacttccccagagtactcgaaatgtaggctgcaaagtttccatggagaactccattgcagcattttggaatcgaggttcattatccttcaagcgacttaagtcaccgtaatgtgttgatacaactgccacattaacacggtttttaatatactgtaggatgctagtagcaagtgcaaccccttctgaaggatcagttccactacatatttcgtctagtaagacaagtgaattttctgaagcaatgtcaagtatctgtcgtatccgtgagatgtggccactaaaggttgaaagactttgctccaaagactgcaataagaagtttataaaagaaaattctcgcaaatgtaaacctcgataagaagataatcaagacgttagtagctctattatcttgcaaggaattcataaggtaatacctgaggatctccaatgtcagccagaataagatcaaaccaaggcaaccttgggcagttcttagcaggcaaatacatcccggacttggacataagagacaataatcccaatgtctttaacaaagcggtctttcctcctgtgtttggacccgagatgacgactactttggcactgctttcaactttaatgtctactggcacagggaaaatgtctccaccatttgggctgcctaatactgaaccaagaagtagcgggtgctgcgcagaatcaatgtctacagctaagcccggtgtttttgtgtgttctgaagttacgttgggatagacaccattaatccaatttgcatgtgatgctcttgcaaaagcaatgtcaagttctaatattctatccaacaaatgcaatatctctctctgcgccatcaccacctcagatgtcaaaatgctcaaaatcgccatttcctcagctttctcggagttcgcatgtctcacttccatattattaagctccactgcctctttcggttctataaagcatgttgccctagagctactaacacttaaaacaacaccacctggaagtaaacttttgtgtgtagctctaatagctacacacatccttgatctcctctgcgttatcaaaggcttgttaatccccccagctagaaaaatcttagttgatattttcttcaaaagagaatccaaattctccatgtttctcctccgttcagatcttataatctctaaatcttcactagctctatcaagaatcatagtcatgttgcagtctatacaaaaactaatcttctgctgtaatgtatccttgaaatcacaaccctgtagtatatctacaagtggagtaaccctacaaaataacagaagcaaaagctagaaccataagcatctcaatagcaataagaacatctaataactataactgattcggtagcgtaccacggttcaatcatcttataaacaattcaagaagactaaaaaatttcaaaatgtctacattagaagcagaacacaaacctgttatcactaatggctgcttttcggagtttctgaaacgttgatgtagcagccgttaacgtgcttcgaacggtacagagttctctaacggtaagcaattgaccggacacagcacgctcaacgatatcagacaagtcttggatttcagaaagacctaatcctcgcgatttcatcatctccatagcagctaatgcagctgaggtctcgttaaggagattcctgctttcttccggcgagtttcccaccggaatttcggcgtttttggtggcggaaaggcccatggttgtggaagcgaacggagagagctgattgcagagggcacgccattcgaggacttctagagtttggttttcgactgactgtgagtcgtctgaggaggcggcgcgtataattaacggagaagcgacgcgtaatgatgacggtgaggcggcgcgtgaggatttgagatgaataggcgtcggtatgagttggagtggggaataagtgttcatgcctgtggtgaatgaattatctattatccttttttaatatgtggacaatcggaagtttcacagttcagttaggttctgtccggaacttcagtttgttcgggttaaaggaaattgttccggattgaaccgttttaacaattttgttcggtcaatattctttgataatttcggtttactgggttaaatatcgattttttgtttgtaattttggtttatttttataataatttctgtacatttaacaaacttcggtttggtttagaccaaaaccgattggttcagccttacagaatcaaagcaaactagttcttcagaagtcaaaaacctcttgttgaagtctctgtctgggttttaggcaaaagaaaaaaactggaatg

SEQ ID NO: 31396 - DNA, 3000 bp, Unknown; identical to SEQ ID NO: 9393
  misc_feature (1)..( 3000): 2750-1469P.txt file - cDNA_ID_3041701; gDNA_ID_1972112; Annot_ID_178795

SEQ ID NO: 31397 - DNA, 2086 bp, Unknown; identical to SEQ ID NO: 9389
  misc_feature (1)..( 2086): 2750-1469P.txt file - cDNA_ID_3041709; gDNA_ID_1972112; Annot_ID_178792

SEQ ID NO: 31398 - DNA, 3003 bp, Unknown
  misc_feature (1)..( 3003): 2750-1469P.txt file - cDNA_ID_3041732; gDNA_ID_1972113; Annot_ID_178828
gagagaaatcgtctttgtgtgttaatccaatgagaaacttttaggataccacttttttatacgaaaaaaaacaagtaaggttgagctaaatgtgaaaatcccaatttctaggaattgcacttaactcttgttattgaattacttggtatcttccattacaaaacagacgggagagagtaaagtgtagattgttgatcaaatgctcgttgcatattatgctcatgattgtagttgccagatatcagtttttctagtagtagaagaaagctgttcatgaaaacaccactgatgctacgatcatcgggacatatatgcctatctccgtacctaagacttcactatatccgtctttggttgcagttggcaatatacattctcgttgcaggaattctgtgcatttacataaactatgactgtgatagacaaaggcaagagttcaggaggacaaacgggaaatgtttggtttggggaagggccccgtcaaaggtgtgatcataataagccccaactagcttagtgaacttagctatattccttttcagacctaaacattttgatgtgtatgaatctctcttggtctctcggtttgttgcagattgtggcgtcgtatactacaacatctggtgaaactaaaactagtcttctcttaacgtctggatggtgagactattctacattatacagttacaaccataaaagtagacgttgttcatcatcaatggctttgaatgtgcaggtggggattggctcgtcatttccattatgttcctgagatcttaagtgctttcttctggaccgtaccggctctcttcgataacgtaaaatactatccatctatttgctatattcgaagctcttcttgcaagttaaacgcacttaacatataaatcatctttgtttaaaccagttcttggcatacttctacgtcatatttctcacccttcttctctttgatcgagccaagagagacgatgaccgatgccgatcaaagtaagcaccaaatctaaatgatttattttacacatcctctttgatcttactctgatttgctgacaatattcgggttttgttttggtaaaaaggtatgggaaatattggaagctgtattgtgagaaagtcaaatacaggatcattccgggaatttattgattgtaacgaagtctgttgttctcattttctacttattacgttaattcgaacgttggaatcatcaaaagaccgtgccaaaacaaaaatgcaaattgatgcgatagacattcttttgctgatttgtatgctataggttttcaaatctctagctacacttatgtatttccctagattatcaaagttagcctgccgttttctaattttattatttgatattttgattatactgcttcttaatgcatcaaataagttgattcatccatctaatattttaactacatcaaatgaagtcttttataagtacaggcactaattgaacttgaaccctataaaatacatgaataatcacaaagaattgatagtgttctttcagtttttcaatcacaaagaactcaccgacattatcaagttgacttcacttttagacttaattggtgttctggaggatccacaaaactactattacacagttttcacaaaattgtgattctttattttttattttctttggtcaaactaacatttcattcaactttaaacgagagttgcctccacgtggagagtatacacaaaaagctacgaggacaaatgctcaaacaaaaagacataagaaggggagctcagaagctcaacccgagtagcagcatccaaagttgctaaaacagaaccatcatttacttctgaggcggtcttcgtaccaagctccttcagcaaaattgtgattctatgtttggatatcatgagatctaactacaaagtttttaataacaaaaacttaccattctctaatttgtagtcaaagctaaacaaatttcatactaaaacaattttactgtgttgttatggatgcatatttttctcactttatagtactattttactattgataagatgaaaaaaaagttgaggtacaatagtagtaaaatagcatcattctttttctgtagaatctctctggtcaatggtctttttagtttaaaaactgaataatgttctctctcacacagtaaaaaacaaagagagagagaaagaagagaagaagacaaaaatgtaggcattaaaaagaagaaaaagacaaagagaaaagtaatgaaaagacaatgaacatttaaagaagacagacaaatcccacacccaagcctcagcctcatctcttttattgttatttgtttttctaacaaaacaacaaaaacaaaagagatggtttttgggttttgttttgtctttgttagggcgtgtttggacgtttccttcttctcagaatcaatattttaccaaaacagctttctttttttctctttaacaatttttttgatgtagaaatatatagtcatgattccaaatccacctcatgccatgacaaaaacccataaaagtggaggttccaatctcgaatacagacatatatgttgtattcgtgtatgtatctattataagataattccaatttgtataatgccaaatgggttcattgaacttcttcttccttcataattaagtgttgctttttcttcttagttcctctaaatcaagaaaattctaggtgaaacttctcttatcttgactttatataaaataataactataaaaataatcaataagactaattcctacaagtcttacaaatttaaaagaaaatgaaaatgcaacattagctaatacacataatagtataagattgatggatgtattcttattcagttttatttataaatgcaacataagctaatacactctcattcagttttatttattaatgttacaccactttaagagcactcaaaatcaaaatacgtattcttatatgatattcattcatgtagtactagtacacataatagtataagatagatg

SEQ ID NO: 31399 - DNA, 3003 bp, Unknown
  misc_feature (1)..( 3003): 2750-1469P.txt file - cDNA_ID_3041736; gDNA_ID_1972113; Annot_ID_178827
tgtctcaatgagggtaagtgaaaaaacagataattgcaaaataattttgcagtagttatttcggtgactcattgttacttatgttaaactctttgggaaggttgatttggagtgctcggatggacggaccacagttgggttatttagtcataaaaaactatcagtgtgagtctccttaacatcccctatatacaacattaatacatatataaagctatgtatgagaaccgatacatgttgtgtttacagatccgttggagtttcgaccgcagcttttgttgcagcaatgcttgaaggaagcacacaaccaggggtttggtttccagaagaggtatttctctctagattccctaagagaccttcatttttaaaaatatttgatttatgatgaaatataatgtttaaattttgttctacagcctcaagggatcgcagtggaagcaagggaagttcttctcaaacgtgcatcacaaggaacattcaatttcatactgaacaagtgagccatttttgttcctcttattgcagatatcgattctttatttcctctattttagtttaataatgtatttgctttggtttcttctgatatataggccaccctggatggttgagaccgagccgaaggaggtggttttagggatatacgtatgagttcgactgaggaagaagaaacatagatgatcatcgatactttactttgtaaaccaatttacttctgatatgtatactcgaacagataaacatgttcatcagaagatatacaacttaaaaaaaaaaaaaaatcaaaaaaccacttggagatgacacaatcgttcgttgaagcaaccatataaatcaatgaagaatataatttacaggtgacatgaagagtaaagatccaacaagctcttttcttgtagtatatgttcaataaagtcccaacatttttagttccatcacatgactctgatcaagctcaggaacattcttgcagtcgcggtcttccactatatattcctgttgtgagtgacacgaaaacagtgatgtataccagaaaagtgattaccgtaaatcaagaacagaaaagctgcaagatatcagacctttgtgagttcttgtttggcgagaacatggtaatgccgctcgttgatcttttggccacatattatggcgatgaagaatccatatagcagtcctaccaagacaatggccaaaactgcaacaaaaaatagaccatcatgttcattatacgctcaagtggttcagcacaaagatgattctgattgactctaatcctggtgactgggctaatgtccatgagcctatagaaaacaaaaatagttgtaccagccaatgtgtagaacccataaggatgttcctcataaccaaacatttctcgtagttcttcaccgtagaacttgtaaactagtaaccccaagaatgctacaatctgttgatacgagaagcctttgttcattagtatataaatgcattcactaagagcatcaaatgtatcatccaatccgaattcatacaagggatctcctgtttcggtgttcaaatgcgataagaaaccaatagtttggtcataaactgctatgtggcaattatagctaaggatttgcattctcatgattgaattctagtatatagtaacattatagaagaaagtctataaacactaaactcaatcatgagaatgcaaatccttagctatatgaccaattttatagctaggaaacaacgaatttggtcataaaatgggagattgggagtcaagaagctagtaacatcatagaagaagaaagtgtattaaacactaaaatcaaaaaaaggaaacaagtcatgtaccatctggacagaaatgaagatgaaggcatgatctctagcaaccagcagctgaaatctcaatctcaaccaccatctatcagcaggcacattggctcggagtttgaaaaaggctctacactctgtacaatgcgaaaatgcaaaaccttcctgaaacatatattgcatagaaacaaaatacacttcataagctaagtaaaccattcattcaaaagaagaagaaactttctggaaacggtgacgataatataccttggtggagcgccaattatcgagacaagatctgtgaacgtgcttttgagtacctttacaattgcacggagcaatcagatcttcccctgcaatcaaagaacaaaccaagtcgtctcattgtatcctcactcaattgagttaaggaattgcttttattatacctccaacatcaaggcaaattcgacattgtggttgatctccagaaacaagaagtgtggtttcgtcatcatcagtctcagctatttctgaaacttgtccttcctccacaacacgatctcctctttccgctgctacgatttcgtttgaggatgttgattcgtcgaataaaatctgttcctttctatcatcatcatcatcactaggcactaattgcatctcttaaacatactaaaatttctggaaatgaaaaaaaactgagaaacgcaaaagaattcaacacagcatcagaaaactagatctaggtttcgccgggagttaccaaaaacattagaaaaaatcgatacttacacgaattcaaccaattctggagaattttcttccaaggcaagccattgcttgcgagttagaagaaattggtaaactatgactgcgaatcagagtgaagagaatttgattttgttagtctcgattcatcactatgtgttgaatacagagatgacgaagatcttttgagggttgagagagaagaagctaagaagattgggatcaatcaaaaacgatggcgaagaaaagtctcaagggtaaaattggaattagaaaaaacatgtggagagcacgtgacacgtgggatttatctgagtttcacagtagacctgtgaagttcatcgtcttcatcgttaacttcgcagactctgttgattagtcaacacagatcagaatctgaggctttggccgagacgagagaagcagaagaagaaaatg

SEQ ID NO: 31400 - DNA, 3000 bp, Unknown
  misc_feature (1)..( 3000): 2750-1469P.txt file - cDNA_ID_3041740; gDNA_ID_1972113; Annot_ID_178824
attgcaacgtgcgttttcatgggctctgacgctatttgtccctcaccatttgtagatattttaatttcccaacaatttaaacatttcttttcctttaaaaacaaacaaaattgatattaaaaaaaaaaaactataatgtaaaattaaaattgccagcttttatgctgctgttcgccacattcatacaccaaaggacattcgaatactatttagtatttaataatctcatatatttacaaactttttaacaactatagaatcttccatttaaattttctaaaaataaaaaatttatagaaatttttttcgtttatagtaatcttgtatattttttttgtctaagtatatatgttccaacggtttataatttatatacttcagatttttaccgtttgcatttattctttatatactgttcataaaacggttaaacttaagatgtttttatgtgaaataaattaatttaagttacataataaaaattgcaataatggctggcagaaaataataatgccaatgtgaaaaaaatgcacataatattgccaagttggctaaaaatgtagggcatggtacaaaaaggagcaaaacaaaggtgaatattacaattgaacccctatacagtagggtttattggactagatttagccacgagtcattatcaataattagatcatggactggttttattattgctaattaaattattccgatggttaaaagaattcttctaattatttaatgtttgggtgatgagagagagattcccaacggcaaaaagagcacgccgttgaaatttaattcaaagcagagtcttaataaatcgaacggtcaaaggtcaaactagttgtattactcttttctactttattttattcttaaaaatgattggaatttaaatttagttacgtttggtgatctcctatttgtaactgaccttgaaataaagtgcgattaaagtaaaagatatagacgaccggtcacgacggtaatattatacaaatagagggtagaaatgcaaaacaatattgtttggtaaccatacaaaaaaaaacatcgttaatatttagagtggaaccaattattgacaaaactttaaattctctcttttatgaattttatttttgtcatatgtttaatcattttgtttctattattggccatgttcaagataattaggttgataaagaagcgtaagttaactacattatgtaggcctgggagatcggttaaatcgggttaaacggttcggtttaatcggttttccggtttgttcggctacacaaaattctgccgaattgaacagaataaaagttcggttcggttcggttcggtactcgggtttttcggttcggttaataagatttattattcaccgaaattgcaccgaatattttttttctcggttttaatcggttaaccaaatcgttgtgggtcaatttatgcattctgggcttaacttttgtgcataatgggcttaagttattcaaatcctaaatatgtttttagattttaaaagcccaaatgtttttttcccctgagatcaactcaagtccaccacccagatctaggttttcggtgttcacttttttaaggtgacggtaatacggatggagtaaagtgaagatggatctgtgaagtgaaggaaaacaacggtgatgtgtgaagaagaacaacaacgtaacagagaagatgtgtaaagaagaacaacaacgtaacagagaagatggatctgtgcgacgcggtgtcgagaagaaatgtagaaatccatgaaataaattgctgccgctaaagtcgatgccggagagaattaatgtcgtggcggcttgatagaaggtatcctacgaaagaaaatggtggagaagaagaaggaacacaaggagaagaaggaagaagaatgaagaagaagaagattgaagaagataaaaactataaaaaaggttagagaagaggacaaagaaaggttcgtgaggaggaaacaaaaaatatgaagtggtagatctagggtttctattttttataaggtatccccttttaaccgaataaaccgatcggttttgatgaaccgaaccgaaaaatccgaaaaccgaaatcaatttaaaattccaccgatcgggttataacagtaaatcggttcggaaccgaaaaccgaaatcctcggtttgtccggttcggtttaaacggttaatgccgaaatcccaggcctaacattatgacaacaaaaaaattaacaaccaaacaaattattttgtgtattttgatcagaaaaaatgaaaaaaaaatctcttctgttttcttattattaattttaaaataaataaattaaccaaaaattagctgaatgggtggtaaaaatatttttctttcataattattttttgagccaattcttttgtcaaaataatataaagaatatgttctaaaatttgagtaatcaaaagataatttcaatatcgaaaacaatttaataaactgaaaattaacgagggagaaaaggaaaaaaaaaacaaaaaaacgaaaccgtcgacatctaaaaaagacgagagggtaatattgtaattacatatatacacacttatatatatagtagtatatatatacactggttcgctttccagccccttctctctccttccgcttttgtctctgccgaaatccataaatctcttcctctctctctttcttatttaatcgtcacttgaccgccggtaagaaactcgagagtttgaatcgttttttaaccctcgccggtgattattgactggaaaacaccaaacgaatcgaagcagttagtttacaggtagagcagtgacagctgagcaaaaaaaaaggcggcggaaaaaaaagtagtagtagttgatgatgatgaagatggtgaaacagattcgtatagggttttctaatcggcggtgttcgctgttcgtgaactctttattggagtaagtaaaaagcgccagagagagagatattgtgtatttgtctttttggttctgttttgggatg

SEQ ID NO: 31401 - DNA, 3003 bp, Unknown
  misc_feature (1)..( 3003): 2750-1469P.txt file - cDNA_ID_3041746; gDNA_ID_1972113; Annot_ID_178819
gctgattcgataagatttccagcggctgaatggtgtttcggaattggaatggcaaatagaatccccgcctgacggtttagcttcatgtttgcatctggcaaaagtggttttatctcaaggtggtaagggatcaaagtgcataaatacgttttaaaagaggaaattttgagagaaagactacacttgcctattactctagcacagtcttcagggctatttacacgggaaggtgcctaaagaagtcaatatatccacatcagaactaaatatctatgcagaagcacctgattgagttcagtgataatgaacaattttgcaccttacagccacttttttctgtgaaaaatgctggaaactcatcgctcttgtatgcagcaacatacacttcttgagtttcctgcattgtcaacaaatagctgttgtgaaaacttaaactcttgattgttgactattaaatatgcctcggcaacagactatataccaaatattcaagagtctttggaatatcaagtattgatttaacgcctgctgatatcactgctattggagtcctcccaagtgcagtaagatcagatgatatgtccatcgctgcatcacaaacacaaattagcagcgcatgcagggtgaatattggcatcaacaccatcatctaaacagagtttctaatcatgtaactaatttttttttgtaagaaaggaataaaacggacatgaaacatacaatggttggcatgtctatggacaccacctatcccgcccgtcacaaaaacttggatgccaacctacaataaccaaaaatcctctgaaatgcaataaatgataccaaaactactaaagaaagatcctcctaggaacaaagccaattaccattgaagcgaaaaacaacgttgcagagactgtagttgcaccgtttcctcttgtagccacctgaaggaaaacatttaggcatatggaggagcaaaaagtccatgcattgattgatagaggtgtggaaatgtaaataacgtggttgtctctatataagaagctagttcagggtaggttgcttagattgatgcaatttgattttgtgaactaatgtaagagactgttcctacatgactgagtgtgtaaacaaatcttaaactggagaataaacaagtttgatgtttttcgattcactgatgaacataatgatggtgcaataagtagaaaaacaaccagaagtgactcacaacatttgctatgtcccttcccgctgtcttttggacactttttccgagagatgcaagacgttctagttcttcctcgctcagacctgtttactatatattagcatctacattctataggacgtagaagaagtctagtgcagttgatccttggcgaaaaaaatttataactctgatctaagatcttgaaaccaagttggttttaggatatgtaaacggccaaagttgactaggagattagtgttaacaggttcgataagtccaaatccaagaatctaaaacattatgatccaccagaaataactgacctatgcaaggtactccattaaggatagcaattgttgcagggattgctccattttctctcacaattgactccacctcttttgctgtttgcagattttgagggtaaggcatccctaaaaatagccagttaaagagaaacaagtgaaatcagaccaagatccaagaatataggcttatttaaaaaaataaaacaatgttcaataaaaaagtctacagaatgcaattcaaacaaatccgaataggacaaggaagaacaaaccatgggagataatggttgactcaagagcgacaacagcacgtccattagacaaggcttcagatacttggggagaaatcttgaccagactcctgagctgcttcaaaactagttgttaagagaaagtaaatcaagattggaaaaagtcttaaaacattggaaagtacagaaaccttgttgtttgcttcaagaggtgaaagatgattctggagattcgagattctagattgagctaaagaagaagccattctccctgaaagatagagttttttgaagtcatcagaaaagccaataaactactcaaaaaaatccagcttccaaattctcgatgacgaatcaaaacacgaccctaatgatcagaaatgacaaaattttcgagtcaaatacataagaagcatgaaaatttctgaatttacggtaacctaaaactaaaaacactacacagatgaattgtcttctggagcatcataaattcatgaatttagaacactgaaacctctaagaggatccgaaaagaacgccctttctgtgttctagtctaatcttactgccaaaacagtggaaaagtaaccaacaaagaactcgtttggtagagaattacccaaatccagttccgctcactaagtttatatgaagtttggcaacagaatctgaaagagatcggaaaactgaagtactgtatacaaggacaccgagaggcgagagggatctttgagaaagaaaaaaaaagattgttatgcatataaaccgggtttgaggaagcggttttttaaaaccagtacggttcatttttagggatcggttcggatgatttcggtattgtaacaaacgttggaagtgcgagatctaattgagcctcctatagtgtttgcgagcacatatccgtacacgaaggaccgatccgatctccgtcgccggcgatcatcgccgccatttgctcttgttcttcctcatttacgcgttctctctttcatactcgtgagcttcttcgattttgcttttagaccatttataattcttattgttcccgactgattgtagaacttttttgacacccaattaaatcggaactagggatctaatggttgcgtcgacttgatctctgtgacgtagaagctcttatatatggggctatgttctcattagtatgaagaaagtgtccctgatctttgttttgcagatttttcatttcgagtgatttttggttttatcatacaaattacaagccatg

SEQ ID NO: 31402 - DNA, 3000 bp, Unknown
  misc_feature (1)..( 3000): 2750-1469P.txt file - cDNA_ID_3041752; gDNA_ID_1972113; Annot_ID_178817
ttccaaatttcttcatttgttcggattcgacgctttatccaagcatatctccgctctgtcttatccaactttgccaattctgccaacagctaacctcttagaaattcaatccaaaaaagacataaactattgccagttatacttagggcattaagtccaatgtaccagctccttcaaaaatttgttcatatgaggtgagctccctgctgcaaaagttatttaccaactcttccctcacagatggttccagagcatcaacaaccaagcaagaatcagataacttctgtagcaaatttgtttcctctgtctctttcccagtacctaaactgagataacaacatcatacaattttggtaaatgttgatttcaggaatcgaataaatagaagggagggaggggagtggtctgtagaggatgcaaaagtgaaaataaatatttgaaaaacatcttaaaacaaactttggtttcctacgtaaaccaagcaacaaataaccttagtcactatgcaggcactattatagcaagaaagatgtcaacaagcattcaactcaatttatgacaccaaaagtgcaaaattcatcacatgacacacttaaactctaccagaaataaaaatccgttccagctgtaatgttcttgagattgaagtaaaggaatcgagaaagagaagaagaatcattgaaggcattacctggaaaaatcagaaaatacatgggacttaaggatttgctttatattattaagcttctctctgagctccgtgattttaggaacatccctgtatgcttcaaagtggttacacaattggtttacagcctgaaatatatattatagaattagaatcctaagaacataatcagaaaatgagtagagtcgttttctaggtagcctagcgttaaatttgattttcaaaatgacaatgagctggtttgggttccaatagtgaacataaagctaaagcaagtgaactgcaaccaatgtaacagaagcaatcacaacatattgttgaattaagaaaaagttacctcgagctgtgcagctgcctccttgtattgtctttttgacgccatcacctgaagctgttcaacagcagagactgccatagcgaggtagcgaaattcattattgtgtttatgatgtacttgggccacaagcatcgtatcactatttatacatggcttcgttacacttgagctattattctgatttcaggtaaccatgattaaaataatgaagtaattaaacagagtaaactattgctaactgacctaacattgtgaggcggtgaagggcagtgattgtcgtggttatgttcttctttgcaaaatctaacttcttaatgtcacggcatatttcttgaaccattgcttcactttgctcagctttggattttatctcttgaatcttatgagagagttcctgtgataaatcaaaaagaagatcaaaatctcttgcgaatgaattaaaagggaactgataggagaaacgaaaaaaggatatgatatattgactgaaggaaaagagaacatatcaacctatgagaaactaacctccacagcacgcgtagcatcagcaagatcttctttagctttagttcccgaattactctggagtatgattgccagcccatgaatatgattcagaagcacagattacacgtacacaatatattctagcgttaatgtagactaaaaaagcccacctgttgacgaacagcagagagtatgctagcatcgacccgccgaatttcaccctgaatcttttgcataagtggctcaacgccagttagcgatgcctctgtaaaggaaaacacacatttgaaaatcatggtaaacgcagtcacatatgcagaaactatcagctaatcagcagctgaactacaggtcctaataacagcagcaacaaaaatcaactctaaaccataatcgaagtacaaagagtatgattgttcaacaagtgtctcattacctgttgggaacatctggttgatatactctaaagcactcgacttatccatggcttgtaatttgtatgataaaaccaaaaatcactcgaaatgaaaaatctgcaaaacaaagatcagggacactttcttcatactaatgagaacatagccccatatataagagcttctacgtcacagagatcaagtcgacgcaaccattagatccctagttccgatttaattgggtgtcaaaaaagttctacaatcagtcgggaacaataagaattataaatggtctaaaagcaaaatcgaagaagctcacgagtatgaaagagagaacgcgtaaatgaggaagaacaagagcaaatggcggcgatgatcgccggcgacggagatcggatcggtccttcgtgtacggatatgtgctcgcaaacactataggaggctcaattagatctcgcacttccaacgtttgttacaataccgaaatcatccgaaccgatccctaaaaatgaaccgtactggttttaaaaaaccgcttcctcaaacccggtttatatgcataacaatctttttttttctttctcaaagatccctctcgcctctcggtgtccttgtatacagtacttcagttttccgatctctttcagattctgttgccaaacttcatataaacttagtgagcggaactggatttgggtaattctctaccaaacgagttctttgttggttacttttccactgttttggcagtaagattagactagaacacagaaagggcgttcttttcggatcctcttagaggtttcagtgttctaaattcatgaatttatgatgctccagaagacaattcatctgtgtagtgtttttagttttaggttaccgtaaattcagaaattttcatgcttcttatgtatttgactcgaaaattttgtcatttctgatcattagggtcgtgttttgattcgtcatcgagaatttggaagctggatttttttgagtagtttattggcttttctgatgacttcaaaaaactctatctttcagggagaatg

SEQ ID NO: 31403 - DNA, 3003 bp, Unknown
  misc_feature (1)..( 3003): 2750-1469P.txt file - cDNA_ID_3041764; gDNA_ID_1972113; Annot_ID_178813
cttctcgaaaaagaattgagtgccaaacgcacaaaacactaccgaccctggttcaaatccgtttaaccagtgattccatcggtcttctagaaatttaccactcttattttgcggttcagggagcattggaccggttaagagaagtttcttttgacattctttttcgatgaaaccgcatagcttaccttcaagttccacgcaggtccttatggaaacgacgtcacagttcttaaggcctttggtgatcagaccgaaaagctcatgggaattcgcaaagagagaacagacgttagcttcatgtccacgtaacgccactttggataaaggataatccggcggaggaaaccctaattcagccctaggtgcaagaaccatagctacacaagctgccgatatgatctggtaattgacactctttattccaaactcttctgccatttctggaacccaatgaacaaaatcgaaaaagattagatctggtttcaaagcacggacctttgcttcgatctgatcgcgtaagagatccatggcaacgaatatgggtttcttagttgagtttgggagatccgaggctgtctcggcgccaaaagggagaccatcgacaggagggagagtaagaggctcaaagacaatgctgtctgggaacagattgagaggttggagctgcttatgagctttcttggggaggaagaaagtgaccctatgacctttctcagctagtttgttggctaaatgaagatatggaatcatatgaccaaaaccaaaccatggatacataaaagcatgaaattttgatcccatttcttcaagagagccaaattgttgaccctttttttttctttactcaagttatagaagaatggttgcttttctttgtgtagttgatattaaaagaatgtgtcttaaatattaagtgggattatttaagctgtgtttaggtgctaattgcttgattgcatgtgccaccatgtgttgaatgtataaagcttgcaagttgcaacaacaaatctttaaaatatagatcagtgttttactgttaacttgcattataaattttactgttaacttgcattataaattttactgaaataatcaaatctcaatgctcaaaatccaattttaacagttggaataggaaatccacgtgtaatgattctattagttaatgataaaagccctatgctttggagtggggcatagtcatggagctaccggtgaagttgaacggagataaaaatataatctttttgtctgtcaagatcttaaattgacaatttgagagagcctgagagtagttttgttgggtacccagttgaaggaagtgagaatcagaaaatgggggtttcgatgttggattcctcatggagtttccgattatcctcgaagatgtctccttcaccaacacaaaaactcgctagctctttgacagaaagagatccaatttctctgaatttgaggtttgatcattccattagggcatattcagctcgagctctaaagtgcaggtctgttaagtctgaggattttgttgagagaagtagcccatttgaggtaacatactaaaatctctgcttcgaatctgagttagaatttcattaaattggttctcatttctagtctttgcaatagaatttcatgaacaagttcatcacagcagaaagagtttgactttgcttagatagccaagtccttagagaattagaaacacaagaacaagcgtaaattctgatatctcctgttaaagtcttggccttttttcttgttcaattgaatgaagaagtaaacttcactttatctttaatcttctttggagatttcggtttttaagtactgatagtttccccttgaaagaccatttcgatagaggttattctcaacttattctgttgaattctcattgtttgaaaggttaagaaagagcttgagatttgcttcgacctcgtacataggctcgggagaggcattgtgtacttaggttccgccagaatcccaccaaaccattcacattatctgcaagcacaagagttgagcagagaagtaagtaagacccttaacactccacaagagcttagtttagatatagatttctcagagttgtgtattttatcaggcagcaactctgttggactgtactacatggtctggtgctggaccagggcttatggatgctgtgactgaaggtgctttggaagctgagaaaccggtcggtggcatcaaaatagaaaaagaagccggtgaatggaccgcatcgaagtttcatccatatctccctcctcagaattaccatacttgcaggtaaacatagccacacaccattggttattacttactgtgcttgcacaagaatgagtgatccctaaaatgcaaaatccatgttaggtttttctcggcgagaaagcatggattagtagatgctgtgattagaaacaatgtatctgagaagacggcgataattgcacttccaggtggcattggcacgctcgatgagatgtttgagattttggcattgattcagctcgaaaggattggatctgcattgccggttccattcattgtgatgaattatgatgctttctattcaaagctgcttgaattcattgagacttgtgaaaacttgggaactgtttctaaaggagaagtttctgcactgtggaaggtatgcaacaacaactttgaagctttgacatacttagctgaattctatgacttgcctgacggttctgcaaagctggaaactgaacttagaaaaaccactcccactcgtggatgatgagtttcgtaatttttaactgtaagagatcatatttttgaccatgagcaaccaatttgaagctactcatgtggcacatgtagcatatagattcgtgtgtttgatacatacaccaatcagatttgttgttatcactttcaatcttatgtttcttctcttagcttctcgtgttatccttctacttcactgaacttatggtaatgggaatgttaaagctagtgaagacaacaatg

SEQ ID NO: 31404 - DNA, 3003 bp, Unknown
  misc_feature (1)..( 3003): 2750-1469P.txt file - cDNA_ID_3041768; gDNA_ID_1972113; Annot_ID_178812
cagtcacttacatgttagaggtattgatctcttctcatcttcttattcgatttctcaagaatcgccacgcgtaactcttgatgaatatgtatacatagggagagattttgcatgaagactgtgaaggacacaaaggagtaataagagaaggaggattacaatggatgactgcaggaaaaggcattgttcattctgaaatgccttcttctaattccaatggcattactcacaacaagggcttgcagctttggatcaatctctcctcaagacaaaaactgtaagcttcttcgataagaaacatttgcggattaaccaattgacaatgagtggagtgatccatgttattttatatactagattaggtttcttcttacttgaaagtccgtgaattctcagagtggagccgagttatcaagagatagagagtaaagacatagcagaaacagagaaagatggtgtgagagttagagtcatagcaggagaatggaatggagttaagtcaaagatctgcacaagaacgccaacaatgtatttagacttcactctctcgccgggttctcgaatctctcaacccattccacttcactggaacgcgtttgtctatgttcttcaaggccatggtcactttggggattccaagttacaacattcagccgctgctgcgcaccacttgctggttctaggcctaggtggtgacatgttagaggcttggaacggttctgattccggtttgcctcttcggtttatccttgtggctggtgagcctataggtgaaccaatggttcagtttggtccttttgttatgaacacacaagaagagattgatgagaccattgacgactttgagaattttagaaatgggtttgaaaaagctagacattggaagtctcaagctgcttctgccttgggactgttctgaaatctttttgcctctagttataattttttgaatacttctttacctgttattgtaatgatctttccaaaattattagagaaaaattggagtgtgagatctctaatcatttcttagtaagactttatatcaaaatgtaagacgatactctttattcataaaattgaagtaaacattattttggaacattcaaagtattcagttcaagaaaatttggtgttgttgacttcaatctccaatgcttctacaaacttatcagcataaccacttaacaatccaggactaactaaagtctctttcaatttcttatgattcctcttcactaagttcccaatctcactatctatatccatcacagatttaacagtatctctcaagtcctctttcgagaaccatccggaatcttctctctgcactttcacagagacttcgagttcttcagtcaacaatcttgtgatgagaacttgatctgccaattgtggaataaacacaatctgacaatcactaaccaaagactcccacattgaaccaaagccacaatggttcacaaagcaacctactgatggatgagacaatatcaaaggttgttccaaccatccttcccaaacgattccatgctttttaacccgttcttcgaatccttttggtaacgcttcttgaaccgttggtgagccttttggcggcataaccgatattaaaaacggtagacccattagctccattcctaaacagaattcttgaaattgatccttctcgaaaaagaattgagtgccaaacgcacaaaacactaccgaccctggttcaaatccgtttaaccagtgattccatcggtcttctagaaatttaccactcttattttgcggttcagggagcattggaccggttaagagaagtttcttttgacattctttttcgatgaaaccgcatagcttaccttcaagttccacgcaggtccttatggaaacgacgtcacagttcttaaggcctttggtgatcagaccgaaaagctcatgggaattcgcaaagagagaacagacgttagcttcatgtccacgtaacgccactttggataaaggataatccggcggaggaaaccctaattcagccctaggtgcaagaaccatagctacacaagctgccgatatgatctggtaattgacactctttattccaaactcttctgccatttctggaacccaatgaacaaaatcgaaaaagattagatctggtttcaaagcacggacctttgcttcgatctgatcgcgtaagagatccatggcaacgaatatgggtttcttagttgagtttgggagatccgaggctgtctcggcgccaaaagggagaccatcgacaggagggagagtaagaggctcaaagacaatgctgtctgggaacagattgagaggttggagctgcttatgagctttcttggggaggaagaaagtgaccctatgacctttctcagctagtttgttggctaaatgaagatatggaatcatatgaccaaaaccaaaccatggatacataaaagcatgaaattttgatcccatttcttcaagagagccaaattgttgaccctttttttttctttactcaagttatagaagaatggttgcttttctttgtgtagttgatattaaaagaatgtgtcttaaatattaagtgggattatttaagctgtgtttaggtgctaattgcttgattgcatgtgccaccatgtgttgaatgtataaagcttgcaagttgcaacaacaaatctttaaaatatagatcagtgttttactgttaacttgcattataaattttactgttaacttgcattataaattttactgaaataatcaaatctcaatgctcaaaatccaattttaacagttggaataggaaatccacgtgtaatgattctattagttaatgataaaagccctatgctttggagtggggcatagtcatggagctaccggtgaagttgaacggagataaaaatataatctttttgtctgtcaagatcttaaattgacaatttgagagagcctgagagtagttttgttgggtacccagttgaaggaagtgagaatcagaaaatg

SEQ ID NO: 31405 - DNA, 3000 bp, Unknown; identical to SEQ ID NO: 9410
  misc_feature (1)..( 3000): 2750-1469P.txt file - cDNA_ID_3041795; gDNA_ID_1972118; Annot_ID_178858

SEQ ID NO: 31406 - DNA, 3000 bp, Unknown; identical to SEQ ID NO: 9409
  misc_feature (1)..( 3000): 2750-1469P.txt file - cDNA_ID_3041798; gDNA_ID_1972118; Annot_ID_178853

SEQ ID NO: 31407 - DNA, 3003 bp, Unknown
  misc_feature (1)..( 3003): 2750-1469P.txt file - cDNA_ID_3041806; gDNA_ID_1972118; Annot_ID_178851
tataatcttttaaatccctattaatttaattggattaatgttagcttatactattagatttagtttatctttttaaatctctattagtttaattacattaatgattttaagactaaactgtcactatgcttattttagaccactaacaaccagaagctgagttgttatagcagattccggtagagcgctacgcgcactagtagcgcgtgaacgtacgcttcacgaaaacccaaaaatgtccgtttcacgttttgcaacccacggagacccaaatccgaatgtctcttggagacaagtggcatctatagactatagttgtgagaaatttagattctgaaaccaaatttagaaaaattacaaaatacatgcacaatgtacagataatcatttggtaaaaatctaagcattaattgcatttattaggatattagctgtaatttacctgtttatatagaaaaatataatacattttctcagtcaacaattttttcctttcctttttttgggaaaattagtcaacaataatcataatatgtgtcatacatctgtgaacacgtgtacgaattaagagtttgattatcaatgtaaaatcttcttatttgtatttatattcacatgttaagtattctcatttactttttctaaataaaactactttaacagttatctatatatatatttagagaataatatttaatatgatattagcaatttttcagtaattaatgaaaagagtcagagttgttagcattccaattgaattgttatctatggaattggttgcatttcactttaagaaatttaattaattaattcatatttgaaaatattttatttaattaatattttattaaatatcatttctaaattataacgccaaaatctatttacccgtgtcgaacggtattaattaggattttttaccgtttttagtataagttatattaagaataattaaaacatattaaaaaagttattggaaaaatatattatacctcttgttgatacaattcctaatttttaatctaattaattatttattttaaaaaatgaattaaaaatacaaaacgttatttttttgcaagtgttaaaacgatacttattatgcaatagatgaaatacaatgattgtgattttcgtatatgaacaatagttaaagaagttatgactagaagaattttgaaatttaatacctactgatttttgtaattacaatgaggtatcgattatttcaaacgaattttttttttaatactatgtattatgagacagtgcaactataaattcggtggtgacaagaaaaataacccctgacatgcccacatttaaattattttcaaaaaattgtaatagttagttagattagttttaaacaaatcaacaagtatgacataaaatcatgtgatttaattaattttagtaatattttctagtgtgctctcatggttgtacgtaagctagtattcgaggttaaaaacaaaaaggtagaagaaaaataatgaagtctttggtagtttaaagacaaaaatcatgagttaaatggagagaaagagagaggttttgtcttgaagccatcagagagacacgagaaagactctgaggtggccccctgaccacacccgcatgtgcccacatttcaccgttttacaatgacacccaaaccgtaaacccaaacctcctttttaaaaatatttaaattgatactattttaaaaaaaaatgttttttatacctccaaaaaaaaaaaaaaaaaaaaactcaaccatgttataatttatttactagttgattttactatgctcctaaaattttactactaataataataaaaagtagaattatatatagaaaacaatttgttgtgaacaaaacaaggaaaaaataatattagatatttctataatttaaaatattaaagtggggtcaatgacaattaaatttctagagaaagatttagaatgcatttgttcaaggtgaatctcacattaaatcccattagttggttattaaataataacttctttttacaaaaaaatggatttctttcctttattagagaaaataaagaaagggactgtagctatatatatattgacctcacagaagactcaatcccaattattaaacaacaaagcaagagagagagagagagagagatagggttttttgaggtgtgtgtatttgtatatttatataaatattttagtgtggcttcttgttcttcatcctctaatattatcatcatcatctatctacttgggttctttctttgtctctgagttttagcttttttattgacctttttcttcttggtttcttctctgcatctcaaagactaaaagggtacaataaaaaaacaacttatactatgtcttctttctaaaacttacaaattaaatccaactctttggatttatatttgttctctttgttctcgtaaatgtcttctagtgaattttttttttcatgtcgtcaatctctatggcttcttcctgttcttctaattccccgctttcgttttcttctgaatcatatttgatttttatcttctctctcattttttaaaattattttttctttatggatctttgtagctttagcaaaaaccgaccagctgagaagatgtcttcatcgtacaacacaattgctttgtcctccactccgaccttcctcctctcaagtgccgctgccggacccggaccaaacaactttaaccgtcaagaggctgcgatgaccatggttcaacaacaacccacttcctccgttgctccaccacccaagaagcgaaggaaccaacccggaaacccaagcaagtacctcttacttaatttttttatgaataataagtgaagaattttccattttagccgaaaataatataagaaccctaatcatttccgataaggaaaaaattttgtttagattatataccttttattcgatcaatttaatcaaagaagattagtatttgatgtgcttgcatacaattctctcttgattaatg

SEQ ID NO: 31408 - DNA, 3003 bp, Unknown
  misc_feature (1)..( 3003): 2750-1469P.txt file - cDNA_ID_3041810; gDNA_ID_1972118; Annot_ID_178849
ttcctgaatcttctccgataacttcgtcttatatacatcgccacagaaatttcggttcctgttcgtgaattagcggtagggtttcatttgtatctccgcaacgaattttcctattgattggttcgtttggatctgagaggtattgatttcgatcgatctcaaaagggtagttgttcgtttgctcaatcgaacgagattgttattgttttctgctgtggaatagtatctggatctgtcagattaataggctagtttttacgattgagctatcggaaatgatttgatcttcatgtgtggttgatcatcgaagagtgtttcattgagactgttaatgaatattgctgtaagagaggaggaggagaatctgcttttaagcttctcgtcgtactcgtttctgggatttctcaggttctcaagtttggatttcaataagaaatctgcgtccaccgtaaaccctagatttagatgggataaggtgttctttcagataaaaggtgagaactttccgaatttaacttagttgaactgagatgggttcgtcacaaggctccacactctcggctgatgtgatgagccttgtggatacattgcctgtgcttgcaaaaacccttatcgctggaggagctgctggggcaattgctaagactgctgttgcacctttggaaaggatcaaaattctattgcaggtgattctccttggtcttgagcttattatgtttcaatggctctgactatatctaagttgtattcagattgcatctgttatgctgaaaattgggatattgatttggtgtttggtaggattttgaccatctattgatttgatactgtgctttcaataccagactagaacaaacgactttaagacccttggtgtgtcccagtcattaaagaaggtgttacaatttgatggtcctctcggattctataagtaagtatctagtggtttgactcttattttgcagcttagctctaccactttactaaattcttgtgatgtgcataactctcgcagaggaaatggggcgagtgttattcggattattccatatgccgcccttcattacatgacgtatgaagtttatcgtgactggattttggaaaaaaatcttcccttaggttctggtccaattgttgatcttgtggctggttcagctgcaggtggaacagcagttttgtgcacatatccccttgatttagctcgtactaagctagcttaccaggttggtgattttgaataccttgctctgatagaattttattgttgcttacttaactgacaaatgagcaatatctttttgtttctcctcttatgtgttgttatttgcattttaggtttctgacacaagacagagtctccgaggtggtgcgaatggattttaccgtcaacctacttattcaggcataaaagaggtgcttgcaatggcttataaagaagggggaccacgcgggctatatcgtggcataggtaaagctcataaaatttgcttgcattaatgttaaaagtgtatatcaaatcaatgtaggaagtctattcatcttagctataataaacggttggcatcaaagtaatatcaatcctataaagaatttcttagtctaatcttggttgatttagtttagttacaaattatcttaaactcttatctctgtgtgtgcacttttcctaatttggatttgaagatgattaacaaaggttggagctttcctgtgtctctgcagggccaacgctgatcgggatccttccttacgcggggcttaagttctacatatatgaggaattgaaaaggcatgttcctgaagagcatcaaaactctgttcgaatgcatctaccatgtggagctttagctggtttatttggccagaccatcacttacccattggacgttgttaggagacaaatgcaggtaaaaaaacaaacaaaccagaaacaagattcaaactatgcaccatttcagaactcagaacatattgggcgtttcgtgtgaccacaggtagagaatctgcaacctatgacgagtgaaggcaacaacaagcgttacaagaacacatttgatgggcttaacacgattgttcgaactcagggttggaaacagttgtttgctggtttaagcatcaactacattaaggtaaatcagatgaagaaacaatgaatccaatatctcagtctcggtttcacttttttcctctatgattcgtttaattgtctttatttgctagattgttccatcggttgcgattggattcacagtctatgagtcgatgaagtcatggatgcgaattccaccgcgcgagagatcaaagccagcatgagggtctttgttccttcactctcttatagaagacacagaagacagaagaaaacatgattgttagacagatttttttttccctacttcttttcattttcaaggccaatttgcccctaaaaatccttgatagtgataatattcttttgagaaattatgctaaaatttataaatctgtgatcaaatccaagcgaaagataaagttgatatctgttgttgtgcagcaaggatttggaaaatttccaattgacaattaagaaaaagtttcttagaataactcgaacttaaattgtagtattggagatttattaagtttgtaacaactttaatgatggacaatttcacatgcgtatgtgtaattgaaatgtcataaacaaccccacttcgtaacacgacctagggttataatcgtctttttgtgaacaaatccgaccgagagagagagagagatatatttttggcagtaagatcaaattttggcattggtaagttgttgttccttcttctcctcccgcaggattcgactcttcagttccttatttaatcatctcatcttctgggcaagtcctcttgttccttgctaaaatttctgggcttttttccctttgtttttcttcttagatcactctgataatttttcgttttttatttctcagaaattcgaggtttttatagggttgtggtcttagcaatg

SEQ ID NO: 31409 - DNA, 3003 bp, Unknown
  misc_feature (1)..( 3003): 2750-1469P.txt file - cDNA_ID_3041849; gDNA_ID_1972119; Annot_ID_178903
gcggcagcaccggagaacagcaatacaagatacgttatatacgtaaagaaaggggtttacaaagaaactattgacataggaaagaaaaagaagaacttaatgcttgttggtgatggcaaagacgcaacgatcataaccggtagtttgaatgtcattgatggatccaccaccttcagatcagccactgttggtaatataacatttttctttcatttgtgtcttttaagttattacattcttgtatccgaagaacttaaaatattgctttgaaaacatgtacagctgccaatggagacgggtttatggcacaagacatatggttccaaaacactgcagggccggcaaagcaccaggctgtggctctacgagtgagtgctgatcaaactgttataaatcgttgtcgcatagatgcgtatcaagacacgctctacactcacacgttgagacaattctaccgcgacagctacatcaccggtaccgtagatttcatcttcggaaactctgctgtggtattccagaactgcgacatcgtggcacgaaatcctggagctgggcaaaagaacatgttaacggctcaaggacgggaggatcagaaccagaacaccgccatttcgatccaaaaatgtaagataacggctagttcggatcttgctcctgtaaaaggatctgtgaaaacgttccttggtcgaccgtggaagttgtactcaagaacagtgatcatgcagtctttcattgacaaccacattgacccggctggttggttcccatgggatggtgagtttgcgctctccacattgtattatggagagtatgcaaataccggtcctggagcggatacgagtaagagagtgaattggaagggatttaaagttattaaagactcaaaagaggccgaacaattcactgtggcgaagcttattcaaggaggattatggttgaaacccactggagttactttccaagagtggctttgattttaatgtctacttgttcttgtactttgtgttgtgttacctctgttttagtttgatgtattttttctggtttgttttgtatgacttacccaataaataacatgctctgtttcgcaagtattaggttaataatgtttaatacaataaatttagtgatgtggcatataatattttgaataactttaatactaattaattgaatttttttaatatataatcatactgccactcatcagttataacaccatcattctacccaaaaaaaaaattataacaccatcaattttttttttttttatgggattattatatgtactagatgacccaaactttgagaatattttcatgaataatataaattttttaagttgattacattatttatcaaaaacagtagttaccaaaaataatagtttcatattaaattttacacgttggtcatataggggatttttgcgtactgcattctgcattgcatgtcaacacagtgtatcagcatgtgatataattttactataagtagagcattcaccagtcgtgaattttcggaatatatattgatgataacgtcggttgttaaatgacacaaaaataatgacgtcggtttgagaaccgtcgttacatcgtccgacgcaaattatattggcttcagttaatcaaatgacggtaagttttacgtcattataatttgcatcggtttaatgagtttagcgacggttttcaattttgacgcaaaagtcaaaagctcatgctttgtatcacttctacaaccgacgcatatccactgtatttattttctatttttttccgttttctattatttctgtatttctcaatacaataaaaattcaaactaaccaaaattcagaaaaaaacagtatattatatataaaatcaattgccgcccaaaaataataatctgttttacaatgaatataactgaacaattatacatatatctagcaaatctatctcttggcatttctaaagtaataatctccattgaagagctacaactttgtgtttgctaaaactttttcacctggaacaaaatgagtgtaatgggagatttaaaaatcaacatatgcatacaaaaatattccagaaagaagagagagataataaggacaacaaattttgagtcacatcatatttgttgtgatgggctccatcccattgataaataccttaatcaaccgattgtcagctgaattcctcatgctaatacctaactatacaatattataattgccatatactagaaaactagcagattacacaacaatatagaaaagacacaaacataagaaagaagcctatgcgacaattactacagatagagtgtatcttttcgggtaaacattgtaacgtagtgaaagttgagagtgaattgcctaacaaccgatagaatgaaccaaaaagaaaaaaaagaacatcttttctaacgcccaaaaaaaaaaacctagagttttttttatttattaggtacatattgtcttttctagtactaaaacaataatggctaagtctcatcctcacacgcaagagattaaggttgagaatatattgtattgttgttagcataaactaaaatggatgaaaccaatttctatcaaatacatattttttttagccatttagagtacattggaaaacaagtatttcaactaaattactctaagacaatttttcttcaatcttttatgagataaaaattttggaccacttttcttttctgttctttgtggataataaaaccaaacttcactgaattatagcttcaattcacattgtactgaatttttagattgatctcaaaataaagttttttttctaaatattatcttttatcgaatacaattaattaaagggtaaattgattaagttgctttgctttgtatataagaccaccatcgctccatcctctttcatcagttaagataatatatattcagtaattaagagagaagaaataaacacaaaaatgttggttaaagttttctcttttttcatccttatgataacaatg

SEQ ID NO: 31410 - DNA, 3000 bp, Unknown; identical to SEQ ID NO: 9424
  misc_feature (1)..( 3000): 2750-1469P.txt file - cDNA_ID_3041861; gDNA_ID_1972119; Annot_ID_178898

SEQ ID NO: 31411 - DNA, 3000 bp, Unknown
  misc_feature (1)..( 3000): 2750-1469P.txt file - cDNA_ID_3041865; gDNA_ID_1972119; Annot_ID_178897
ctctaatggcgtcgtcctctatcgcagcaacaccgacacaatcgtttgaagataatttcaacattatgtggtctgaaaatcacttcacgacttccgatgatggagagatctggaatctttccttagataacgacaccggtacgttcaaatccagtttgcttccggtttaggatcaatgccgttctagtctttcgaaattacactgatacttactctgttcctacttaaatctacatgacattttttaacttagtctcttgattattatatcgaaagtttaaatattctgattggataaaaaataaaacaggatgtggatttcagacaaagcacatgtatagattcggatggtttagtatgaagctaaagctcgtcggaggcgactccgccggcgtcgtcaccgcttactacgtgagccgtcgttcttatttaatgtttcaattttgtaaagaagataaccaatgattttgttttgtattaattattttagattaaatttggttgagcagatgtgttcggagaatggggcaggaccggagagagacgagatagatttcgaatttctagggaaccgaaccggacagccttacattattcagaccaatgtgtataagaacggaaccgggaatcgggagatgcgacattccctctggttcgacccgaccaaggattatcacacctactcaattctttggaataaccaccagcttgtgtaagtcctctcttgatcttggctaatggttagttggctacatatatagagataccacgaactgtaccgggaattttgggtagaaaccggaaccttaggtttatgatcggttcgaagttagaaccaacattccactcacaataacataattcagtttacagattaatttcacaataggttcaatcctgttttcttacgtttagctttgagaaaacttaaatggtgcagattcaaatttcgaccgacacaaaaattccaatctggtttaaagttcaaaccgaccaaagcaagcctatcttaaccaaactttaaagaactcaaactagaccaactcgaaccgaattggtcaatcaaagctaattttatcgattggtacaatgcataacccggtttaatccaatccaaaccaggttcttcgtggatagggtaccaattcgagtatacaagaacagtgataaggtaccaaacaacgacttcttcccgaaccagaagccgatgtacttgttctccagcatttggaacgctgacgattgggctacacgtggtggtctggagaagactgactggaaaaaagctccattcgtctcttcttacaaggacttcgccgtcgaaggctgccgttggaaggatccattccctgcatgcgtctctaccacaacagagaattggtgggatcagtacgacgcgtggcatttgtccaagacacagaagatggattatgcgtgggtgcagcgtaatctcgtcgtatacgattattgcaaagacagtgagaggttccctactcttccttgggagtgttccattagcccttgggcttaaaatcaattttgttttgagtgtattaaagtggaaatggtttatgtaataattttactctcttttttttggcatttcttattttgttatggactatatcctctgtttatttatttaattaattatttatttagtcggctatatttcataactgctttttaagatgtatattaacttgagaattcttcttacacttaaggtctcagaacagaacagtgggtcaaaaatataaacgaacatggatgagcataagagtaaagacatgtgacaaacaaaaggttcagctacagctactaatgaagcccaaataccttattgaaaagaaatagcatttgtgattgtgatattataagagagcatatccagaaacttttgtccgatttaccattcgataacatcaatgacaatcgtccatcgatcgttgtagtagtagcatctctagaagaacccacaacttttgatttctttgaagaaatcaacggaagtgggttacattacatcacaatcgtgaggataggcctaggattagcgatttaccgttttttaatgtacatttcttctataaacactatcttctaataaatagtccaagtttgctaaatatgccaagttggacatgtgttatgtccggattcattccgatattaaaagtcaaccttttacgtgccaagtgatgaacactatttatcgcatttttaatttgaaaaacaattcatttttgattgacaattttgaatttcttgcattttattacgattgcctcacttttgggtataaaaataataatatgacatactggtgggataaaataaatagtacgttttcttacacactataaattaaatatgttcgtaaacttactttgaaccacaatgtcaactaagcttgctaacatcatttttcctctagaacttgtctcccatatatgtttctagcccatttctcgtcttgatagtcaaaggacatttacacatagcacaagtatttctttccaaacttgtatgcaaatattcaaacttttctccctttctcttaattaatttccaaaaattgatatgtaaaagaaagacaaatataacttggtgccatagtctttattttttcagctaataaatacataatgctattaccactttttacaagtacctaaaacaaaaacaaatctagaggatatgggaaagaagctcctttgaataaatatttcaataaaaataatactactagatctacaaaaacataggaaaaataattgcatttgtcatctttagttttttatttcaccaaattgtcttaaattaattaattccgtaataaataccttgtattagaattgcagttgactaaaccctttattgattcatatataagtataaaccaaacaataaatgagcataaaatttctaacgttccaaacaaaaataaaccccaaaactttcaaaaggttacaaacaaccccctaagtaaagaaaatg

SEQ ID NO: 31412 - DNA, 3003 bp, Unknown
  misc_feature (1)..( 3003): 2750-1469P.txt file - cDNA_ID_3041880; gDNA_ID_1972119; Annot_ID_178883
caaggtcgttaagaagtgtattcctcttctttataatctaagaagactataggtatcaatttatagtaatacttgttatatagaaaattatgtgtttaaagcgtatgcaaacttatttgtataaagtttacaaatacctaatgaaaagaaaagttagcctcattatacaggggattacatggttagcttcatttcttctctacataacccgacttttatcaaccactaaccaaccatattaataatgatctcataaaaatctttaaatcaacttagaaagtgctcaccataggtttgtttttcttaacttaccaaggagccgacaaaattgtctcaaactcaaactccacatcttcaagctctacattgagatcttttgcacatgactccatctgacatatctttttccaggctgcatctttctgttctttttctgcttccttttgttcttttagagcagcttcttgcctctgcagctcgataatcttgtgtttcacctcaagaatcttttgttccatgtcatcaaactcttgtttagccttgctaaattcatttgtcatctccttgtcaaaaccttttagttcctccattatatatagttgtctatctttgagtgctaacagcttgtcgatccgtgataatggagttgtaacattgaagccatgtttctcgagctccgaaaatgaatctttaaggctatttagttggcttacaggaacgtcggcttcaagatctttaaatttctccagtaacccaaaataagtcaccatcatacctattgcatacccttcacggaaatcttgcttagtctcaaacaatgggctgaaatgaagactgtgtgatacacttttgaagacctccagtgattcataagtcttccagaccggtgacttctttgcaaaaggcaaaaccattattgtgtgttttgcatggttttcctcagcattagaagcagaattcttcaccacattgggggtccgatccgaggataacactggacagatgaacgcatacacaacacaatgagaaaataaaggcttatctaccagtaatagtacaatgagaccattgcaagcgggtcctacattccagaatgtgcaatgagagttaagacataccagtcttattgatgtatgaattgagctttagacctcctcttttcctctttcgagtataatatttgatcttaggctcctcaggcatctgtgcatagaagtgttaaaccaaaaggagagccatctcaaagataaataacaatcataaacaataccttctctcgagttgactcatttccaaagccattcttcattggcacaggggatacctttccttgggttttgttctttgttgcagttacccccagggttataggtaaaccagattcttttttctggaaaacaaagaccatagaacaatttcagggcgtagaaaacaaacaaggttataaaagaatccactagcagggttatgaccatataccacatcatcagccatctcatttcccggtggttcctttgtctgcacatttctgttgccgtctaaagaagtttctttctggcgttttggctgaaaatggaaataacataacaacacttcaattaatcctcaaagatgtcacactaattaaaccaaaccaacacaatgttgcctgcaactagtgatacaatttacctttgttcttttatgccaaactccatcttcccactccattggaggcctaatatcagagtgattaaattgcgatgcctcctttgttgccccgaaacttaccatgtaccttccctcaaagacaattcccctgaccacaccttgacgccattcaaaaccactaaacgcctctacatgatccagcaattcatactttccaacagataaaggaggctgcataggccttagtcttagggaatcaacaattaaatttttcgattcccggcagctataggacttattccagtacttgacaagaaacctcttgtccttctccaactccttaatgacaattaccggaatccaagcacaatcaaatctcaattccaccattgtcccgcaactaaaaacagacttgaccaattccttcaaagacaaaaaacaaacatacaacaacggataaagttaacaactttttcatgcaaaggcgaaacgatttcaaaaaaaactcatcataccttattatcaggtcggatccatttgaagccggtccaatcaagatgaaccctcaatttctttttctcaaactgaataatgtctggtgggcaatcgaagtaaaccaaaaacttctcatcctccattgtttttaccaccacaccagtccaccacccatctttgagataagcgtcgaccatcaagccttctacaaaaacgacgccgtcgttcacatcctccgacgggacaggacgaatgaacctctgatcgacgaattccgttaaaggagccaaacggtgttcattgagctgcgtcaagtaacgaactttaagcttattgtgtcctgatttcgttggattatcttccagaatcgctctgtaataagacccttttaactcttcttcttcagaaaaaacttctactttgtcgtcttttctaatgaatatcatctgctccatctcaaaaacccttgaatgaaaactaataacggctcatttttgctctgctaaccctaaatctaaaaaaagacttttctgctgaaacccgaaaaccatagatatgattatatgaaggagactttttgcaaccaaaacacagtgctactgtgtctgtgcttagtgtcgatattcacgatacacatcggggaaagtgtgttttctttttttctttcccaatttacttttctttttttttggcgcttgaaattatgagaaaatgatttaagaaattatcaggcccaaactatctaatgggcctaattaaaaacggtgtcgtttcataggatcctcatcacgaagcaggtaagtaaaaatatatcttatcttctccaaaactctctcttcgatttcagcaattgcaatg

SEQ ID NO: 31413 - DNA, 3003 bp, Unknown
  misc_feature (1)..( 3003): 2750-1469P.txt file - cDNA_ID_3041884; gDNA_ID_1972119; Annot_ID_178881
tatactttgatgataagaaaacagaaaaatgagctgggactttgtattgcatggttttgaaataactgattgttgtgtggttataggaagtggtgtttgatatggcgaatttcttttgtggttgctaatgcttacagctcactaaacaatttttaagttgaatttgaattgttgatcagatgtttgctactgagttgtgtgatcttttgaatatctgctataacttgtatactcattcttgatacacgagcttacatgtttcagagtttagaaagctttataatgtgtgaactacactgttgtgcatttagcttcttctaacaaactgttgtaactcaccgttaaaccaaaactagattccttttcctgtctaaatgtttaactccatgaattgtttaatgaaccctgtaaatttgatacagaaaacagtatacttgatagctgaggaacaagagaagtgacaagggtgattgaaaagttgaaggactcagatgggaagcagaagcggagaacaaggaaagcgaatggcggaactgagcaaaaatcttaaagaaggtgagaggattctggagcccacacgtagacctgatggtactctccggaaacccattcggattcgacctggatatactccagaagatgaagttgtcaaatatcagtccaaaggttctctggtatggaatccttattccctcaacactctattctgttcttggactcattgtttctcgtggaaatgaatcgtttaaatttgatttttctcagtagtcagtactggttgtggatagcctgctttcattatttgtaccacccttatgttctttgttcgagtgctcaacagaaattgttaccaaatttttgctcttctatcttggtttgaataagggcaaaaatgtagatagaacatatcttttttctaatttgtatttcatttgtaatagatgaagaaggagatggcctcacaagggcctccaggttatgaacctgatccagctcctaaaccaaagactaaagctgctaagaggaacgaacgtaaaaaagagaagcgattacaggtatgtgtttcaactcaattcatatgctactagcttggtcttcggttaatggaacatgctttctaattatcacctctgcaggctactgcagaaaaagctaacagctctgaggatggatcagctagtaatggatcccaatcggtgaatgtattggcttctgaaatggaggctttggacgtttcgtcaaataatgatgtatgtgggggagcacctaatccaggaaccacaggagaagacgtagagaaaagaatccgcgcacttaagaagaaagtaagatttccatctttctcagttgctttaattaaaataagacattcgagaacctttggctttgaagatataatctccaccgtctagattcctaattgtggctggtaagccgtaacagcgtatgttccaaatggttttcaatcaattttcttcagtttacagcaaaattgtgtttgaggtatagcagaaatctgcagtctagcggttgtgtaattgcttcattctgttaacatttgcagatccgactcacagaagctcaacagcagaagactgcttcccgagacctaaacccagagcagttagagaaattctctaagttggaagaatggaggcaagaactcaaggctctggaggataaggcggcttaacttgctgcagcatcaacatgaattgtctaacttttaggcaggctgcagtttctctcatgaaatttctggaaccaatccaaatttgtatcaatgaaaagaaggctgttgttacttgttaggttttgtcagatctgattaatgaacttggcgcaatgcctgaatcttcatgggaattgatttcacattgtgtttgcgtttggtcctaatctaaagaatatgattccaaactgatgatataattgtaaagccgttgtagcaaacatcacttgatcaatcattcacttccatctgcatacatgtagtaacatcacccgatgaaggtggagtgcatgctgaaacggtgtagagttcgatcctaaagcttttgtgagttcatgaagatgtctacgtatttgtagacccaacgacataggtacatatacatacacatgtagtcatatctatgattctgcttacatatattatgtaactcttttctgtcttatgctctaagagaacatctctaccattaaagtacatgtcaatacagaccttaaaatgttaaccatttgtatgcttcctgtttcagatttatttaataaacatgcttcatctggaaagaggaagcccatggtgttatgcttaattatggataccgtttctcattttgctaattggaagttgcatttactgactttaatcagtcattgtcaactttatattcacctgatatgatatgcaagtgtctctagctcgaatagttaatatatatctaggagtagtggttaaaatgtctcatagagtcaattattataaatctttctgcattatgcttatggagcttgcttttactgagtccttatcaacttaatcttcactggggtggtaactgtttcacggtccaatagttggtcttaaagtgactattgtttctaagtttcagttctctgtaaatttgtgtataaaataggtctttatattacataatttgcttgtcattttgtatataagtacttatttattattgtaggcaaattgtggtggcgtggaccatttcctgcagtgaaagaggcaatgattgaatggacaaggaagaaaggtttcacagtgttggtaaccttattagttcgtgtcatgttctaagtcacatgaatcagttttttcttacaacttttgaaagttcaacctttgagaaaaatccggaacaggttgtgactgatttcgatgtcagcagttaatgttgttagttgaggtaagccccacttggcttttaacaagaaacatcatttatattgtttcatcaaactatgatcagaaataatcagagaatg

SEQ ID NO: 31414 - DNA, 3000 bp, Unknown; identical to SEQ ID NO: 9427
  misc_feature (1)..( 3000): 2750-1469P.txt file - cDNA_ID_3041888; gDNA_ID_1972119; Annot_ID_178877

SEQ ID NO: 31415 - DNA, 3000 bp, Unknown; identical to SEQ ID NO: 9432
  misc_feature (1)..( 3000): 2750-1469P.txt file - cDNA_ID_3041892; gDNA_ID_1972119; Annot_ID_178876

SEQ ID NO: 31416 - DNA, 3003 bp, Unknown
  misc_feature (1)..( 3003): 2750-1469P.txt file - cDNA_ID_3041900; gDNA_ID_1972120; Annot_ID_178932
tgttccaattatatttgtccgttagtgcaaaaaggtcttacctttttcgccatcttacagtcttgtgaataattcaaattctaaaactttttgagattcttacagagacattttgtcactctttgcaacagaacagtgtgagaatgggtgaccaatatgtttcttagtggtgatgttctcttttgctttgttggtggaatcttaggactgtattgactggccatggctgctgataccacagcttcaagttactggttgaattggagggtcctcctctgtgcattaatcctcttagctccaatagtattagcagctgttctcatttggaaatatgaaggcaagagaagaagacaacgcgagagccagcgagaattaccagggacattgttccaagatgaagcttggaccacatgttttaaaagaatccaccctctttggttgcttgcctttagggtattctcgtttgttgcaatgttgactttactcatttccaatgttgtgcgcgatggagctggcatattctacttctatactcagtgagttttaatcattatacttccttctcacatttctgaatccttgaaatgaatgaaaaagatctaaactttttttctgaaacaggtggacatttactcttgtcacactctactttggggtacatctcttggaaattccgttgttgaggttactaccttagttttagatactaaatctgtgatactttttttcttcgtagtatgcttcggtgttatctgtttatggatgctgcatctataataaagaagctagtggaaacatggagagttatacaagtataggtgatacggaacaaggcacttatagaccaccaatcgctcttgatggggagggaaatacgtcaaaagcttccaatagaccttcagaagcacccgcccgaaaaacagcggggttttgggtttatatctttcagatccttttccaagtaagtgtcttattttcccctaagttatcttgttgagagtgaagactgtacaatgccatctcaaagcttcaaaaggacttacaaagttttctgttgggatagacttgtgcaggtgctgttgtgctaacagatattgtattttgggcgataatctacccgtttactaaaggttacaagctgagttttgtaagttctggctctaataccgtttgagttccattctttagaaagatttggatttctttgatatgatcacttttttttctggcagtctctatactaaaagtcgacaatgaatatatttattccttacatgtgttattttgactgcagctcgatgtttgtatgcattctctcaacgctgtttttctccttggtgacacaagcctcaattccttggtaagttttcaaaactgaagtctgcggatacacaatctcctgccttttttattagaatctaatggcaatcttctttcttccttatccagcgattcccactgttccggattgcttactttgtactttggagctgtattttcgtggcttaccaatggataatccatgccgtcaagaacttatggtacacacttgttctgttttcttatcttcatagaggcataagtttccatcattttgaccccagatattaactcattgtactgatcaagtactatgactttctgattgcgccaaatggcccactcaaaatcttcttaacaaacagagccgcagtgtctttacgagttttaagggatcttgttatacatgttttgcaggtggccataccaatttcttgatctttcgtcaccatacgcacccttatggtatgattataactcttcacacttactatgatatcaaagtttccaataaaaatcaaatttaacaataaaaaagagacaattgttgtgatcttttactaatgtttctgcaggtacttgggagtggctgtgatgcatataccatgctttgcggtcttcgctttggtcataaagctgaagaattacttgctgcagcagcgtcacaactcgtgatagttttggtctccccgaattcaagtttcatcttctatttatgagattctttgttcacgagagaataccacacatggaggaaacaatggttcatggtcatggtcaaagtcaaagtcaaagtcattcagaaagtttgagaaagtcaaaccctcttgttgagtaagagactatccagaagaaagaagagtaatctccaacactacaacacattaatttaggtcttgtttagtttgtttatgattaaacaagtctcctcaataatgaagtgtcataaataagttatacaatcccttgttgtaaagatgcaaccaaataagtaatgagaaattaataaatatttttcttttaaaaacaaaatttggttatatgtgacacaaatggaatggttgaagttgaaacgttcattttcaagttaggtggcatactctaaaattgaatgaacaattgaacatccaccagcttttttcagagatgcgtagctgcaaagtcttgctaatgtttgttaaataaatcctagtatgtagaaaaataatccaaattctaatgcaattatttgctaaatcctacaaaagtatatactataaagatttgagaaagaaataaacattaaattatgtgcatatgtaaaatgattgttggttataatactaaataataaagtttataacaatattttacaaatttggaagttgcaactataaatggtaaattcggtccttaagattagaagacaaagaagagtcgtgttggtgagctaactacccaacctgtgaagctacccccattctctctcaacggtaaagatccgccattttcaccgatctctgtttcttctcgtttggatctttggaaattttagagtttgttcgttctctctcgtatctcattttggaattgaatcgttagtggatttgatcgggaaatgagtgttttcgcgttcgattagtgtttatcagtctctggatctgtgattttgattttgttttctccagttttcgttttgaaatg

SEQ ID NO: 31417 - DNA, 3000 bp, Unknown; identical to SEQ ID NO: 9434
  misc_feature (1)..( 3000): 2750-1469P.txt file - cDNA_ID_3041908; gDNA_ID_1972120; Annot_ID_178926

SEQ ID NO: 31418 - DNA, 3000 bp, Unknown; identical to SEQ ID NO: 5564
  misc_feature (1)..( 3000): 2750-1469P.txt file - cDNA_ID_3041922; gDNA_ID_1972120; Annot_ID_178920

SEQ ID NO: 31419 - DNA, 3000 bp, Unknown; identical to SEQ ID NO: 5564
  misc_feature (1)..( 3000): 2750-1469P.txt file - cDNA_ID_3041922; gDNA_ID_1620803; Annot_ID_168741

SEQ ID NO: 31420 - DNA, 3003 bp, Unknown
  misc_feature (1)..( 3003): 2750-1469P.txt file - cDNA_ID_3041932; gDNA_ID_1972120; Annot_ID_178936
gtgaaaccaaatcttttgaatctttttaacaaaaaaaaaaagaaaaaaaaaatctttgaatattataaactatgaaaatgatatcaaagtcatgaatagtttatggatgcatgtcttcgaaacaaaattacaaaatacatgaagtcgattcttataggattaatgttgatttgtttgacccgttgatattcattagaaatttaacgattttattctaattaatattatatatatgacatattaagaggtatagcacatatgtatatttttatataaaaaaaagtaattttgtttttaagatgatatatagacatatgttatttttttaacgtataatacaccttggtacaattttagaactaaaaaatttaaaattttaagttatatatatatatatattgttactttggttttgttttcaaaattgtataattatatttcgattgttaattatatgatttcatccgtagtatatataattccatattaatatcaactcaaacgcgtcctaccgtataaccccgtcatgtgaaattaaacatcattttgttatttttctaaaatttaaatatttatggtattgaaattaaaatatatatatatatatatatatattgatccaaactttataattgtattttaattgttatatataggatttcacccgtaatatatattgtctcatattaatatatatatatatattttaataaagtataactttttaaaagttttaaattttttgatatttaacttttaagaaactttaaatatttataatattttgaaatttttaaagattcagttctttaaaatagagattcagagtaaaccggataacatttttatttttggatgcctgataaatcaaacttccagttcattgttattcaaaattattttggttctttttataataagactctaaagcattgcccaatttcttaagtaatgtgggatctttcacacttacttttttctttatacatagagtaatatatgtctgtttacaaaaatttgaattacatcatatgcagaaaaaatctaatattttataaactatatatattttatataaaatcaaataaattagatataagaacaacaaaaagtgaaagaaaaagcatatatttatatttaatgtagatagagaaattttagaaaattcgtaattaattgattgtagttcaataatgataagatttaattaaggatttagacacatatttgttttagatagattttgtagaggctaaatatgtaatatagaaaagagttaatttaagtatttaatgcaaactaacaaattataaatttttagtaatagaatatttggttgaaatataactggtaaggacctaaatgttattagtaaatagttaagggatttttgaccaaaaagtctatcaaaaatgtatatgtagatataaaaatcatagaaaactctttaatgtataataacactatgacaatgccgcccattaacaaactcacggaaaaaaaaaaaactacttttctctattttctctcagtattgcttgcttcaagcatatttgtacttagtgtaaatacacgcccattaacaaacgtgaaccataatcttatccggtgaaatacatacgccaccaaatataataatatatcatgtggtcaaatcctgcaaaaaaactcatcaaagatattttgtgtattgtaaaatgattctatagtagtactaattaataggtaatatatactgttaactaatgtggacaattgtaaaacgacgacatagtcattgaaaacgaaatggagtatatctaatctggctgagagaagagttgatatgaaaagagagagcccgtgaacggatatacaaaatgagttttaaatgagaatagggaacccgaggaaacgcgtgacctaagctacgtaaattataaaaataacttatttttatattcatagggtgtgtttttatttacacaaatatatatagtatttgtatcaacttctatgtattaaatataaagagataaaaataccctttagatgcaagtaataaatggagtaacgagatggaaagagtcgttgagattcacacttcagttggcggtcctatttttgactttctaattatcaccggtcaacatattttgtagagattccatcgccgatgctcaagttttttgcaccctgtgaaaacatatatagaggtttttggtcggtgtttgccggcaacgacaaatatgtgatttcttagtttcttcaacaataaactcgtgtttgcctcttatctagctagaatgacctttgtttagtagttttctgaattgcagtttccctaaaccattatcttagtgcacatacataaattatggtgcaatatcattttggtaacgttactatttgttagatatttatttaacagaaaatgtcataatccttaaacacaaattcttatttaaatatgtaaacgttttctaaaacttatggcttcttctgatttattggatctaatatattggagcagccttttgtttaccattggaatactcaagctaagaataatattgttagcttgaaattttctacattctaatgtattctagtttcaactttcaactaacacatcatctttccacatagtaggcgcgtataccttcccaattttgtccctttaaaccggaaactaaccgaatttccctatccacattctaactaaaccgagacaaaccgtttcatttcgagcaagtcttgaacaaattagtttcagagtgctgctattcgtttttggtattcggacaaattaaacttgaaccgatggttagctacttagccaattaaaccgaaactatccaacatcttcataacgtgtctcatttgacagataggggcatttacgtcatttcggagtctccgccacatgtcagatttgttttataaacgaaaaaaattcggtatatttaatttgaagatatccgccggaaaattcgtaaatttgacccttcgtcttcggaaatg

SEQ ID NO: 31421 - DNA, 3000 bp, Unknown; identical to SEQ ID NO: 15454
  misc_feature (1)..( 3000): 2750-1469P.txt file - cDNA_ID_3041951; gDNA_ID_2926134; Annot_ID_197106

SEQ ID NO: 31422 - DNA, 3003 bp, Unknown
  misc_feature (1)..( 3003): 2750-1469P.txt file - cDNA_ID_3041951; gDNA_ID_1972121; Annot_ID_178974
ggatttgtcaactctttggcttttgcaaaatcgggtaaatttctgattgccggtgttggacaggtatgtgatcatctcttatgttctcttccctcttctttttttctatctttgtcctcttgtctgtgtgattgctaatctcaaaactgatcgtgttttgtgaaatcgacatggcaggaaactcgatttggaagatggggatgcttaaaatctgcgcaaaatggtgtcgcaatacatcccttaagactggcataagtatttcattgggataaatgaagcgttgttatggatagttttgagttgctaaaaagccaaagatctaatcgcaagtcatatagggattacatttccttgtagctcttgaagtttttgctcccttttttgtttgttccttgtaccattttttcttaatacgagagataagaacttatcattttgaggctctgaagaatcaaagaggataacagttcccaattttttcattctctcagtaaagctttttgtttcgttttcccaaatgttgaagataagtatatgaaaaggcaaattattaaaccaagatccatagtgaacacagacttgatcgtaatttatccggcgaaaagaagattgcttttccaaacaaaaaagacaagagcctactacttgaatgaattctcttaagtcaagcttagaatccctagagacaatttcttgatgtctcttggtctcgttgctgctccattctgactaatagcttcaactggataagaaaaaccagcagagaattgataagaaagttccaaatatccaaaacatacatagaataccacaaaatgaagacttgaaacaagaaaaatgcaaacagcattgaaagaataactaaacaagaacatatcctgcaaaaaaaacgaaaatgatacataataatccaaagactcgagcctatatgcagagaagttccagaggaaggtcatgcttccaaaagtttccattttaacattgcaaacactaactcatgtacaagtgagtgattctcattcacttatttgctaatatgcatataactcgatctcaaactaaccaataagtatcatactacctgaaatctagctaaccatcagttttgagatattttctacaacaaagtaaacccaagaacacagctttgacatcagagatcaatactaccaaccatcaatcctaaaccctgaatcattccattgttcgaaaaacaaactgttaaatctcatatccaaatcagaaacaagagaaaacgataagcataagacaaaaatctctaacctttattgactcatctcaacttctctttatttcagacactttctacaacaaagtaaacccaagactcagtaaactactaaccatcattcttaaatcctgaatcattccattgttcgaaacacaagcattcaaagctcatctccaaagcaaaagcaagagataagacaaaatctctaaccttttaaacgaaatcatctcaacttctctttacttgaactcttcttagctgcatccataaccttctcaagatacccttcaataggcggtgtaagagtagccatacctcgattcgccggaaacggtgtcaaatcaggctctaacgccgccttcttcagattctccggcaatgcctcaatagcagatttcttcaaattcaaaagcgcagtttcagctgcacgacgctctctatgctctctcatcaacactttactatactccttcgcaagtctctctccatcttcttccgtaagcttatacttaggcaattcctcagcttcaaaaatccctaacgaaatgtaatccaaacctggcgtcccaattcgcatcggctcatcggtgactcccattgaagcagctcctcctttcttctggatctccatatctcgttgcttctctttactaatcaaacctagcttctcacgttgcgcctcacgctcgatctcttggggggtcaagtagcgaacaggacaaggagcgtttaagcattgctcgtagagtttctgcttctcatcggaaattctaccttttcctttaactgcttcctctccttcaacaggtgctccgccgccgccaccacctttcttgatggagagtttgttacgcttcaatggctgacctgtcttcagctttgcttttcctttaggagttccacttgcggagcatctttggataagatggtaactcagtgattcgatgatcgcttttggtttcgtaactcgaatcatgcttctgattcacctgagtttctgattgctttcgtctgaaaatgttgcttgagtacagagattagggttttcgactctcgactgtggaagaagaacactgaactaacgacgtcgttttacatcaagttaaataaatcacgatgtcacaaaactgtaaattcagcttaaaccgagggttttcttgtcttttagaaaactccaatttggtttcttggttcggttttccatttctttgtataccgaatgagaaccgacgttaattttgaattgatttggttcaattcgatttaatttttggttattgtttcggcttaccaccacataaccgaagcttctttctgaaaacaaattcgattttacttttccagaactgagaagaaatttgctgaattcagtctcatgcaacttgttaaatttctcactattaacaacgaatttggctttggaaactgtaacctccaagtaccaaatacaagtaaaatacaaagaacgtggtgaaaagtaaagaagatccaacacagacaaaaagcaatttgtccactaagatctctcgagagccaaaaaaaagttgagaaatttgcagtcagtatgggctgctctgttgttgtctcttctgggccttgaaaggatcttcttcttcccctcaccttcttactataaacccagaatcatcctctgtttcttttgttcctcaaatcatttttttcctctcgattgtgagatcaattattaatattcatctggagaattatcgtctcttttctccattgctatg

SEQ ID NO: 31423 - DNA, 3003 bp, Unknown
  misc_feature (1)..( 3003): 2750-1469P.txt file - cDNA_ID_3042002; gDNA_ID_1972122; Annot_ID_179048
agtagcagccaagttgtaagaaacaaaatctgcagtggtaataaatgttgccagacgaggataccggaagggcagccgcaagtaattggagtcaacatagagatccctgaaaacaaaaacacaacagaaggaggatgcaaagttgcatttttgacgagcaacaaatattcgagtttgaatgttacagagccagaagagtttcatagtgatggatacgcggtggttgagcttggatggtactttgatacttcggattctcgtgttttaagccccataggttgtatgaatgtgtcagatgcatcacaagatggcgggtatggttccgagacgatttgcgtttgctcgtacggctacttctctggattcagctataggagttgctattgtaactccatgggttacgcagggaatccattccttccaggtggatgtgtaggtaagagatgcgtgtttttctttctgtatccattaatgaattcaatcaagtcttctatcactgattatgaatcaaattcgtgtagacatagatgaatgtaaactagaaataggacgcaaaaggtgcaaagaccaaagttgtgtgaataagcccggttggtttacgtgtgagccaaagaaaccagggcagatcaagccagtgttccaaggtaaaagtcaatttgattttatcttgaatgttgtgttgaagatattattgttttgttctgtaatgtacatattgtttcttttggtggtgcaggtgttcttataggttcggcactgttgcttttcgcctttggaattttcgggttgtacaagttcatcaagaagcagaggaggagcagtcgaatgagagtgttcttcaggcgtaatggagggatgctgttaaaacaacagttagctagaaaagaaggcaatgtagagatgtcaaagatatttagctcgaacgagttggagaaagctactgataactttaacacgaatagggttcttgggcaaggaggtcaaggtactgtttacaaaggtatgctcgttgatggtagaatcgtcgcagtgaaaaggtcgaaagccatggatgaagacaaggtagaagagtttatcaatgaagttgttgttctagcgcagatcaaccatagaaacattgttaaactcttgggatgttgccttgagacggaagttccagtcctggtttatgagtttgttccgaacggtgacttatgcaagcgtcttcgagatgaatgtgatgattacatcatgacatgggaagtgcgccttcacattgcaatagagattgcaggagcactttcgtacctacactcggctgcatcttttcctatataccacagagatatcaagactaccaacatactactggatgagaaatatcaggttaaggtgtctgatttcggaacttcaagatcggtgaccatagatcaaactcacttgacaactcaagttgcaggtacttttgggtacgtggatccagagtactttcaatcaagtaagtttacggataaaagtgatgtgtacagttttggagttgtcctcgtggagctcattaccggaaaaaacccgtcctcccgtgtccagtctgaagaaaacaggggatttgcagctcattttgttgcagccgtgaaagagaacagatttcttgacatagttgatgaacggatcaaagatgaatgcaacctggaccaagtgatggcagtggcaaaactcgctaaaagatgtttaaaccgaaaagggaagaagaggccaaacatgagagaagtttcagttgagctggagaggattcgttcatcatcttataagtcagagattcataatgatgatgatgatgatgatgatgatgatgatgaggatgatcaagccatggaactcaacattgaagagacttgggatgttggtatgactgctccagcctctatgtttaataacggatcccctgcgtctgatgttgagcctctggttcctctacgaacatggtagtataccctcatctgatgaaaaaatgttatgtttcgattatgaatttctagcttttcaccatgtaacaataataagtaacgtttctagtctgtacatgtgattatatgtgtttcataagtctgtacccacagtcatctctatgtattcgacgttcaaaagaaagaatgttttagtcataaacagtatcaggtttaagctttcaccgataacactctccaaggatttcagtttcccttaggaggtaccttggacatgtgttctaattgacacattgcctttctctttggagattcaacgccagcaaacttggacggctttaaactccgatatcctctgcttgaaaaccttctttcctacgctaccacttcagtgggcaagatttgttcaatgtttaacagaataaaaagtcaaaaccaagaatgtcaacatcatctatccattatccatgtgatcggctgattgccactaccttggattacattttatttgactggtcatagattcgttgtttaggtcaacttctgttttgtatcctgaatcctgaacgaacatgccaacatggtgacgatggtcaaatgagtataatgtggtggtctactttcatatggtcatcagaaaaaaggttaaatttttataatccaacgtgaactcattaaacttaaattagaatccttcaggcattgacattgaccaaacttaatttgttttataattccttatgccaacatggtgacgaactgacgatggtcaaatgagtataatgtcattggtctactttcacatggtcatgagcaaaatattggatttgtatattcaacgttcaatcattaacttaaattataatccctcaggcattgacattgaccatagtcttagtagtgtttactaatttttaggtgctttgtaacttgcttcacgcttctttctaaacctctattgacttttaccttaacatcagatcgggcaggtccttaacatgtagaaaagctgattgagattgatcagatcaaggaccaaagtaaaaatacaagaattatg

SEQ ID NO: 31424 - DNA, 3003 bp, Unknown
  misc_feature (1)..( 3003): 2750-1469P.txt file - cDNA_ID_3042012; gDNA_ID_1972122; Annot_ID_179041
tcttgcacaacaaagccctgtttaacaagtatatacatagtttcagacatgtttagaacaatgaaagcacaagaatcttggtaatagccgtgtttttacctgttgggcaaagtagaccaagaggaagcaggggcagcttcagaatccgaaaactcccacactttcaacgaacttgaatgctctgaatcaacactagtccaagttttcattccgaaactactcttatcaacctcactgttcttctgcatacacgcttgcagtgatgactgcttcagagctgttcgaccaccagttgagaaagatttgaaatttgtaacttccgttggaaacccagagttacccttcatcgattgagacttcaaagctcgatctagtttccgagtttccacagaggtagagactttctccggcgacacattctccttatcctctcccttttgagtggataaagaccctgtaattgtgtccacatttcccttattttcctccaacaaatcattcacttttctcgaaccagccatgttttttttccctttctggatggattgctttcaagtatcaagtttagaactttctgggagctaagtttatatctttatagattttgaagacatgaatctagaaacaggtgtttgacaatggtactgagttgaaagtaacgtttttataaagtcccacagtgtttccatttgaatttgaatagccattggggattgtgcgagcacagaaccaaagacacagatggacttttcttttcttgtcttaaacacaaaggttttttagatgtctgcgtttggtttttgccctttttctactttctacggacccaacggtcaatacacgatagtgggattttgattaatattttgtcgttttcctttgtcgggaaactgaaaggttgatgattggattgaggtttagcgggaactgtgtttcaaacactcaaacacttaaagtatcaacaacctgccgttttttatatttatcaacgtcatgccgttttatcttcgtgagtcatccaaaaccgataagccagagcctcaaaccatcgagtggctgttaaaccatactgttcaaattagtccaaccaaaaccatgagaggccacaacatcgtcgaagcccattattatcaccatggctaaagccagtagtactctgtttgctgtttcctgctccgcttcagctcgtttctctttcctccgacgctctgaatctcttaaaccctcagtttcaagagcgagattcgccgttccaatggctatggccgccgcgtcagctgccaccgctaaaaaactagcgcctgctgtgattgtgggtggcggaagagtcggaagggcgttacaggaaatgggtaatggcgaggatttgttggtgaagagaggagaagcagttccggttgattttgaaggacccattttggtttgtacaagaaatgatgatctcgatgctgttcttgaagctactcctcagtctagatggaaaggtagaaactttcataggccctaagaatcattagtgagccaaattgttagatgttttagggcgtttgatcatcgcagagcacaattcaaatgatcagattatcaaattttgattgtttcttcagtttatgacttggtatagtaaaaacgttgtgtgtaattaatcagatttggtcttcttccaaaatggaatgatggagccgtggtttgagagcaaaggtttgggtgatacagaccaagtgttggcctattttgctgtgtcaaagctcggcgagcctcccgtggatggaaagactgacactaacccagaaggtcttactgctgcttatggaaaatgggcttcagagatagctgcaagattgcaatctggtggcctctcttgcaaggttacaagaagcaaatctttgttttatgataacgcagaagctgcatggatatactaaatgtgttcttttgtcggtgtttctgtggttaggtacttgacaaagaagcttttcagaagcaaatgttggagaaactcatttggatttgtgcatttatgcttgttggagctcgtcatccaggtgcaagtgttggcacggtggagaaagaatacagagatgaagtaccgaaattccattcctcgtttcgttttagcattcaaaatcgttgtttagtgctaattacttatacattcaggtgtcgagactcatccaagaacttgcagcagctgctgccgcggaaaaaggactaacctttgaagagaacatggtggaaagactatgtgcttattcacgagctgtttctcatttcccaactgctgttaaagaagtacatatatcacttttatcatccttgatctctctctttcaatgcatgtgcatgtgcatcagtatctgtttcacaactagttttctgattattgcagtttaaatggaggaatggttggttttattcactctcagagaaggcgattgcggaagggcaaccggatccgtgtcccctccataccgaatggctgaaagagcttaaagtgatatagagccagtctttctaaattgtgagtatctggattaagtatcattcttacatattttaagtagatgatctgaaactagtgtcaactgtgtacacgcctgagaagtgaaaaaaagatgtaattttttaataaagaaagagaatcagttcacgctttgtaaaatgtccagacttttatatgtgtaaacttgtgcattttcaagaatcaaaacttttctgcttctagactcccatcaattagggaagactagaatcttcaataataaacaaattatgacagatacctatgtagactctttggaatcatcaatagttgacaaagtaagaggcaggatcgtccacgcttgtttgaattttcagcctttgcaggcaaggtggtccaagtaggcaactgtggtttcttcggttagttactatataacacataattctatattagctttagctttagcttcacataacataactcagttttctacaaagaaaaaaaaacagagcataatg

SEQ ID NO: 31425 - DNA, 696 bp, Unknown; identical to SEQ ID NO: 316
  misc_feature (1)..( 696): 2750-1469P.txt file - cDNA_ID_3042012; gDNA_ID_1563726; Annot_ID_148193
  misc_feature (125)..(125): n is a, c, g, or t
  misc_feature (292)..(292): n is a, c, g, or t
  misc_feature (380)..(380): n is a, c, g, or t
  misc_feature (693)..(693): n is a, c, g, or t

SEQ ID NO: 31426 - DNA, 3003 bp, Unknown
  misc_feature (1)..( 3003): 2750-1469P.txt file - cDNA_ID_3042016; gDNA_ID_1972122; Annot_ID_179040
ctcttgaagtcgtcacctttagtggcagaggaggtaatcggaccatcgacgccacctgagattgctccgcctcgtcggagcttcccggaagatatccagacgtatttcgggtgtcaaaactccggcaagttaacggcggaggaagatgatgttatcttcggtgatttagattctttccttacgcctgatttctacagcgagttaaatgattgctaaagtgttgttcttctgataagttttgttttttagttgttcagaatctcggttgtgaaaatcaacattgacacatcgattattctttcttgtgacaatcttatataataaagtttgaatctttttaacagttgtccactttcagtttcctctgatggtgaatttgatttgagaggtactgaggtagtttgtgaaactcagatagaggaattgtttatgtagaaaagtaaggtatacagatgatgatcattggagggatgttcagagattgaactcgtccgtttattaatgatcaaacagtacaacaaagcttggaatcaatagaagccaagcaaatgcagaatgcttggtagcctgagaatggatacctgcaaacagataaagcaaaagacttttagatgataaagcctttaatcctaagcttataagtatgtttatgtttggctcattctggtttgagcaagtagtacctgaagtcgattacatatcttgctttgtcaactctccccatttgaagaattgtctgccttggagtctcctgcttataccaaattacacaatgtttaggattcttgagattggtttttgatcaaagctttaaagttgtggaaatgcaccgtgagtgttagctgaaagttcttcaccgagctctgtattctcagtcctgttcttcctctgtctctgaagtctaactcatgctgcttggagatctaaagaaaggggaagacacaatgaatttcatgctttacaaaatcaacaatgatgcccggtgagacttactttgttgtaatgtggtatccttgagcatagcttctgaattttttccttattctcaagccaatcaagcggtagtttactagcttgttgaacctataaggagatacatacatacgtgtattaacagttttatgttttcggaatgcaagattgatggagagaagtttaagattaggcatttacctgcttattgttgtttttctgcattggctgctgctttggtagcaaagttctcattcttctgtagctccctgtccaagttgttatggtgggtgtgaatctgcagaagccaacagatgcataagcaaacccaaaactaaggcagaggcaaattcatcaaaaaacacggcattcaaaatcctcaacgcttacattacaaccgaaagaagcggcttcaccattttacctacagaaccaactcgaactccctgcaatggaatcaaaagaccagaaacattcatactcgatttccaacctataagcagaaccaacaccgttacattgagcttgaatttctgaccttgtcccatatgtagtacttggaacccaagagattagccgtcatggaaccgacataactttcatccgaactgcacagcaatcccttaacattctgtgccaccctaaatatagatttcccattacgtcggctatggtaagcaactgctaacttccggtctttacgcccccgaccttcctgagatatcagaaacattgatatcactacatctcaattctcactcagcatcatggtaaatcgaatatctatatacttacatgtgtataaagtgaatatacagatccgtggctcaagccttcaggtgattgttctttcacaatcagacaagtgcatcttcccacatccaaaggtagtgtcttgcacaacaaagccctgtttaacaagtatatacatagtttcagacatgtttagaacaatgaaagcacaagaatcttggtaatagccgtgtttttacctgttgggcaaagtagaccaagaggaagcaggggcagcttcagaatccgaaaactcccacactttcaacgaacttgaatgctctgaatcaacactagtccaagttttcattccgaaactactcttatcaacctcactgttcttctgcatacacgcttgcagtgatgactgcttcagagctgttcgaccaccagttgagaaagatttgaaatttgtaacttccgttggaaacccagagttacccttcatcgattgagacttcaaagctcgatctagtttccgagtttccacagaggtagagactttctccggcgacacattctccttatcctctcccttttgagtggataaagaccctgtaattgtgtccacatttcccttattttcctccaacaaatcattcacttttctcgaaccagccatgttttttttccctttctggatggattgctttcaagtatcaagtttagaactttctgggagctaagtttatatctttatagattttgaagacatgaatctagaaacaggtgtttgacaatggtactgagttgaaagtaacgtttttataaagtcccacagtgtttccatttgaatttgaatagccattggggattgtgcgagcacagaaccaaagacacagatggacttttcttttcttgtcttaaacacaaaggttttttagatgtctgcgtttggtttttgccctttttctactttctacggacccaacggtcaatacacgatagtgggattttgattaatattttgtcgttttcctttgtcgggaaactgaaaggttgatgattggattgaggtttagcgggaactgtgtttcaaacactcaaacacttaaagtatcaacaacctgccgttttttatatttatcaacgtcatgccgttttatcttcgtgagtcatccaaaaccgataagccagagcctcaaaccatcgagtggctgttaaaccatactgttcaaattagtccaaccaaaaccatgagaggccacaacatcgtcgaagcccattattatcaccatg

SEQ ID NO: 31427 - DNA, 3003 bp, Unknown
  misc_feature (1)..( 3003): 2750-1469P.txt file - cDNA_ID_3042024; gDNA_ID_1972122; Annot_ID_179030
aaattaaaatgtagcatgtaatcgattcacacaaatacgtctggtctaagagttcatcgcaacattctactatgcatgaaccgataaccaaaatacatctatacaacaccaaaatacaaaactaagaacacgtcacggtaacaaaacctcgttgtgtcaattaatctctggaagcagaacaaacaacattggtactcaaatacgttaattagcttatttcagaatggctcttatttatcactctctctctcgttcttcttcttcgccttcgttgttgttgttgtctctgcatctacgcaacagtcttggtatctgaagcagcctatgagatgatcattcgtgagtccagctgcttgcatgaaggagtaaataactgttggactaacgctgcgaaagcctctgcgtacaagatctttgcttataaactcagctttcgatgtcttcacagggacttggcgctgatacctgaattggctctgtgtaggcttgttgttcacaaagttccacatgtacttcttcaatgatccacattcagctataatctggatgaagttaagaattaacaggcagacagattataatatttagacaagttctaagttttcagtaattatgatcagtaagtgtgagcttatgttctgttaccttgcgcacatggcgtgagttatcgaggattgatcgtatcttgacctctgatagtaaggaaatggcagcagtacctggcgctgttaactttttgtcattcaattcagctacagcgactggatcgaagtccataaaaacttccctgtttcaaataagaagcaaattaggcaatcagagatcagagctactggcttagcatcagaagtttatattgcgaattcaaaattcatattactaaagaacttggtttggttacctgagtatatgtcttctggagagaatgtcggtccatgagagttcggctagagcaccagagaggcataataactcaaaaagcttcctacacaagttaaccaagcggtaagagactcttataactacaaagtgtatctcagatagaaggaaaatagttgaggatgccacatacttgtcgtcatgtacaggaactccccattcttcgtcatggaaagcaacatagcacgggtctttacaacgtagaaaaacgcaacattattagtcaatttacagcagagaaagatatgaagcatgagagaacaacaaagaataatggaaagtgcctcttggcatggaaacatttatgctcattagtatagagaatccagaaaacgctgtttggcttacactaaaagcataaacgaagtggatctatcagctaatcaaaacatccttcatctaaatttcatggacactgagaagttaaaatatttataagagaacttcaggacaagctacttcataagttatgcaacatagcaaatgatctacacaatgctcactgaataaaatacatagcaattgaaacattttgttggccattgaattacttaatattcacatacagaagaacataattagatcaaacaaaaaacactagctccttgtctcaattcagtcccatttgattcaactagataagaactttatcatctcacacaatcaggctaaactcaatctcacattcacattttcactcatttcatttatttgaatgcatctaaagtcaaaagctctctcactatgcaatgtgtgataggtgaaagtttgatgcttaccagctttaggtgtgatccaagcacaccttttacgaccatcagcgaagcaatcaccagaaaccttctcttcttctttcccaacactcagcttccttgtagaagagacagacccacttcgcctcacaaccttcttacagctcgaagaagacgccacgctcaaaggcgatgactcacacgaagacgaagcatcagaggaatacgaagcagtcattgaagcactattctttctcaaaatcgaagagcaaagagacgagcattgcttcagagtcgtccttggtgaagccggagtagttggtttcttcgctttctcatcttttgagtcgatgatggtcttctccatcatcggcttctccagtttcatccccggtggtttcctctgcagcttgttcccggtaggaccaagaactgatcggaactctcgctcatcggaatttacggaccggaatctaggaggaaccgacattgacccgattctcacaaaaaactgctttttgatttcacagatctatcactggatcacacaacaacaacaaaattgctatttccaacagtctcgaaacttatttcaagagattatatatcggaaggcctagactttacagctacattagcaccaaaaatgaaacttttttgtcaccgctaaatatctcatttttaggaatcttctagtaaaactaaaccaagttgcttgctgtgttcacgagaaaagcaaggttagaaacaatgagcaacaaaataaaatctttgaacaatgaagaaaaaaaaagcttttgacttcagaaaaacccagaaaaaaaaaagaaagaaagaagctttttctgatcgacgacgaaacgaatcaaatcgagagagagagacgaggagaaaaggtcattcaccagtcacgacttaacacgtcatcgtttggttcttctgctttttctgttcttttgttcctcgacccgacaatgaaacgggtccttattgctcgacccgacaagttaaatggtttaattgcttactgtaatcagttggttaatgcttctgagttctgagattaggaatgtttctttgctcgtgcgtatcaaccaatgtaaagacaaaagttttaattaatcgaacagagaataatttctggaattgccataaccaaaataaataaattaaatgctaagttttcttctatggtcggaaaattgccacaaaagggacccacttatcctaagttcctacagagatctgttttctttcacaacatttaaaaatccaaacttttctttctttggctcaaaaaaaccttccaatg

SEQ ID NO: 31428 - DNA, 3003 bp, Unknown
  misc_feature (1)..( 3003): 2750-1469P.txt file - cDNA_ID_3042047; gDNA_ID_1972123; Annot_ID_179079
gcacgagggacatgacttactggaggaatcacaccgtaactctgtccttcccagtaaggaaggttaccatcatgatcgatgacgatatgacaagtttctccaggggctttcgggccaactactcgctccacagagacaatcttagcggtgtaagactccttgggtttgtacaagttcaaaggaggatccttagggtcttccaactctataggagagacagtaaccttggaactacttgtttgttgaaccgacatacatattgtcgtgctcgggtaccgtttcccatctcttatgcttgttgtcttctggttcaatgctaaagaagatgaccatgacttgctgttgaagcttatgctattgttctgctgcagaatggaaatagagtacaacacaaagcaagcgatggtttaagatcaaactcaagcaaacaaaacaatagacatcatgtagaagacaatcagaatccatgactctgagtatgaacacagctcaagctcgaatctttatacttatatgagagattagatgcatcaccttgaagacggatcttctaagagaacgttggttttcaattgaaactgagacagcaccagcctgtatagaagaaatttaaactccatcagattaaaactcctttctgataacaaatgaaactcaaatacaggatcactaagaaaagatcgttaatcgaattaaagacaagcctaaacccagattaaagatcaataaaacctcaaatcaataaagtttttaaaaattccctcgttttctccgaaaacagacaaatggaacattaagacccaaatcaaacccctaaacaaaacagaggattcgaaactctccagctataatcactataatcaagaagatataaaatccaatcgttgactaaaaaaataaggaaatgtgtggaggatctgacctgagaaacagcagagtgagacattgttatcgatctgagaaaggattattagtctcgtcggaacctgattagagcaatcaataatgagaggaagatgatgatgaactctagggtttttaaatacagtaagcaacacgatcctttgaatctcctcaaaggccaagcttccttcttctcctcttttggactcctccaactgacgctctcagacttcttaattaattaattagatttttcttgtaagctttaaaaattaattcattattagcaataaccgaaccgaattgacaaaatgttcccaaaccgaaccagttcaaatcattttcctgaaccgaacacaccaaacataatcaataaccaaccaaaagattattagtatctgttttcttacaataatacatgataacatctttattgttcttgatacaattgagaaaattatagagaaaacccaaaaaaaaaggaacgattctacttggtattattatgaatgtgatcacaattaacagaggaattttgcgttttcgggtaaccgagaaaataaatgagagcagaagcgaccatcaaagccacgccggagagtccacacaccaagctgcccacaaccagcacgtgattcatcacgcgatcatcatcctgatcttttgatagcgtcttcattggagacttcaccgcactcggcaatatcgagctagacggtgatgatatcgacgttagatcatttgaagaaggtggtccaaagaatgacgtcatttctgatgactcgcctggttcgtagtagtactcgagaccgtgatcggacggtcgtaattctcttgcattgataatcgttgattctaggacgatgatgaacatgatcagcattgaaatcaacggtggatactcactggttttgtgtgcggccattttcttgttgaagttttctcttaggcttaaagagagttacaacaactttacaagaccttcccgtgaaggaaggctttatacgagaatccaaacaagacgaaacgactccgttttaagctacttcgaatgttgccactacattcgactaaacatgtagtatttctttattccacgttggctaggaacagtgtctctcgactcttgtgctttgtctgaatttggtataaataattctcgtgagtttccttgtcggagattggccctaaattcacggggatctaacacaaattaagaaatataaaacctcccatttttatttttccagtttgaatttaccatatacttctcgggagtatttttgtcatcgatttataatatagctataataagatttgttttaaatagcgtgaaaaaggaaaaataacaagtaaactacagtagcagttatagatttatagttgagtggtatccaaggttctatttcttgaaagcaaagaagaatccttgaaagttgtttttttttcatcaattaaaaacataaatttccagaaacagaaaaacaatgatatttgcatcaagataaattaaacaaaattcatgactttttgactccaccaacgatgatgatccccgaagaagaagttgagtcgccgcttcagcatctaccatgtgagtcgtttacgtctcccccaaacgaattcgctgtgaactgcttcgcacgtatctcaaaaatgcattacccttcactttccctcgtttccaaaaccttgcgttctctcataaatcatttcaggcaaattctcaatgctagctgatcttcatctcaaaagtgttagtagaggaatttgagtactgtatcttttgttttcacttcgatcttggaaacaattttttatctccaatgtttcaagtttcaactcaaccttggtcagttactaatctgatagtaaagcccatttttaattgggcctggcctatatagtcaccaaacgcaaaaacgatgatactctctctttacagataacgtaagataaggagaggtcgtcgatgcgatgacatgtactgccacgtcatcaatggaaagaacacaaaatcgaatctctctgtctccctcttcttcttccagtaaacttggatgacactgtgaatttcataatttgcccttctccggaatg

SEQ ID NO: 31429 - DNA, 3000 bp, Unknown; identical to SEQ ID NO: 9480
  misc_feature (1)..( 3000): 2750-1469P.txt file - cDNA_ID_3042051; gDNA_ID_1972123; Annot_ID_179075

SEQ ID NO: 31430 - DNA, 3000 bp, Unknown; identical to SEQ ID NO: 9476
  misc_feature (1)..( 3000): 2750-1469P.txt file - cDNA_ID_3042055; gDNA_ID_1972123; Annot_ID_179073

SEQ ID NO: 31431 - DNA, 3000 bp, Unknown
  misc_feature (1)..( 3000): 2750-1469P.txt file - cDNA_ID_3042091; gDNA_ID_1972132; Annot_ID_179105
ttcttatgtgggtgtgattcgccacaggctccgcaaaaatactatccgaacattaagggatcttgtattaacttagagttggaaaaagaaagaaagtagaattaacagaaacatttggattgaaagattgttgttaattacttcgttgtcatcagaaggtggatcaagctccaataagccgacgctgtctctaacactttgagcaccagcagaccattgtttacatatacaatcaacattcctaagtacataaaatataagaaacagagagatcaagaaaaggggttgcttgtagaagaagaaattcaaatcttaagaaaagaaaaaaaaacatttaccatcttaagtgagaaagcagaagtgtggcttcagctttggagagggaagtaaaatctgaaacactttgaacgtcaatttccataagcgctcgaatatcttcctctgtcagaacagttgcataattccgctggacagatttttttccggtctgaccatcttctaaagctgcgttgacatacgactcatccgcctccgcatccacctccgatccgattacagaattattatccatacaaaaatacaatgtgagaagagaggacgttttctccttttatagaattcaattgaagaagaccaagtcgttgacaagggtgtacaattctcttacttttgtgacaagcaatctttaagtttctcagcttttaccttccatcttccgatgtcttttcaataagttcaaacacttgttctacttccccttaaacaagagtttaccaaagacaattgggaatcgtttttaaacaataaaatggttgacaggcgatctatctatggtaaaattaaatgtccaactgtttactttatttaaatgattgttttgttccttatcacatttgctaattaatactatatagactctatgcttaaagccttcaatctagtaaatacagtttaatgttattatagtcatgacactgatcatatcaattagttctactgtactagagatcacaagtgaaattatcaccgcttcacattgataaaagactaacctggatttcagtctaaaaatatcatctaagaaaaccatatagaattaaataaaatattgaaaaagtcatacttattttttaatcatgcatgcaattgggaatattatatggtctccgttagcttccttgtaagaaagagtctcacagagagaatatgaatagagatgcaagaaaaggaaaaatcaaggaaactacatctcatctcaagtaaaccaaaatgtaatttttatgacaatataataatagataagttaacgtcaactccagcatctcaactctcaagctgagtccgtgtaaaattgaaccgatcgtccactatgactcacggaatctacaactagagatcattaaaacaaatgggtaaaacacattagattatcggactcgtctcaccatgttgattcttcgaaataacaacacaagtactccattctttcacataaacataataatgttagtatttatttagttgtatactgtgttgtgtctttatgaattgttttatctttgtttggtgtatcaaaagtgacgtgtgtaagtaaacctttaaggggctaaatgaagaaaaaaaagcctaaagcgttagatcatgtggatcctaccagtgcgatctccgtgatggctcgcgcctcccagcctcacaccacgtacgagtgcaaattgtgcaaaatcaattatacgctttttataagaaaacataaaaggggtctctttttgttaattaataattatatatggtgacttgtaaactgaataatggtgatactactagtaagcaccgataagaaatacgaacatctttaataatgtggtcatttccaaataaaatgattcgaatatgccacccttgcatttgttgatctcatcatcactattgattttctgatcttctcgatctacgttgattttgtacatatgaataataccatgaataaatacctaaaagttgattatgtgtctgatttcaagcatacgaaatattagtgttgttagtttatccagaataaacaaataaatatatatgccttgcatggcaatctttggtaaaaaacccaacatatataacaaagaaaataagcaatattattcttctaagaacatttcatttataaatatgcatggaaaagggaaataatgtataaaaatgtggtcatatgtatttccaatgggtcatggacctcatggtgaccatatataatgtagatgaataattgtgaggtgaagaagaataatgatggtgactttgtaatcttctcctcccacttaaattattgagcgacaacgtggctttttgttggcccatattcattcgtatctcccatctctccactccttatccaccacgtgtccccagctgcaagaccaactgtgtatatctttgtcacatccaagtcgttacaatgacagtgtttcacattcataaaggttaattatcatctacagtttatgacagttctatgattatatctgttataacatcatatcatcatatacatgcagtcccctgtgactatagatgactataacataattttctctgaacaattgtactgttcatttaattgtttctgattttttccctaacatgttaacttctactattaaataaaactttaaaataaaatttgagtttaaaattaagttttgttaaaagattagtatttggtgcctttgatggatcacattaccaattttagtcatctacttaatttcaagatacatatttactttttgacaattataccctaattgtcggggctcactaattttaaaacgacattagtcacgcgagaagatgccaacccatcacatcatcatcatcatacatcgcggcttttataagtaaacaaatcgactcttatgtatttctcccgacacaacacaaagttcatataataagaaaaacagagagaaacacacagagagctagaggagagtgagtgtcatg

SEQ ID NO: 31432 - DNA, 3000 bp, Unknown; identical to SEQ ID NO: 9489
  misc_feature (1)..( 3000): 2750-1469P.txt file - cDNA_ID_3042093; gDNA_ID_1972132; Annot_ID_179103

SEQ ID NO: 31433 - DNA, 3003 bp, Unknown
  misc_feature (1)..( 3003): 2750-1469P.txt file - cDNA_ID_3042105; gDNA_ID_1972132; Annot_ID_179098
gctaacctaaagagctctttgactccggctaggcttgatcctcataaccctcgtcctgatgtcaaggtcgaatccgggttcttaggtttatacacatccggtgagagcgagagcaaattcgggctagaaagctgccgtgagcagcttctctccgagatctcgaggcttatgaacaagcacaaaggcgaggaaataagcataacacttgcgggacatagtatggggagttctctagctcagcttctagcttacgacatagcggaactcggtatgaaccagagaagggacgaaaaacctgttccggtgaccgtgttttcgtttgctggtcctagagttggtaacttggggttcaaaaaacggtgtgaggagctaggagttaaagtcttgaggatcacgaatgtaaacgatccgatcaccaaacttccaggtttcttatttaatgagaatttcagatctttaggtggtgtttacgagcttccttggagctgttcttgctacactcacgtgggagtcgaactcaccctcgatttcttcgatgttcaaaacatttcttgtgtccatgacctcgagacttacatcactctagtaaaccgtccgagatgctcgaaattggcggttaatgaagacaattttggcggcgagtttttgaacagaacaagtgaactgatgttcagtaagggacgacgtcaagcgttgcattttacaaacgcagcgaccaatgcggcatatctactttgttctatatccaaccatatgttgtattataatatattttaggtctagattgatccaagctaaaattttggattcttttttaagataggacaaaataattattgccctatcttttacgtagcataagaaatgtacatatatagatgtatatgcaaaacctaatacaaaaaagtatattttccacatccaagataaattattgcgtctcatctatcacaatgtgaacaaaaataattattttcttctcttagttactatgagttcacaatataatacttttctttaggttaaagctctcaactgttgatgaagtacaagaactcaaaattgtgaatgaaaaaaagggacatcatccaatatcaggcgtgtacatattagcattgttgtgtatctttttatattatagtccattagtcctaatcgatagatgtatttttttttgttttattagttataaaaacagacatctattattaatttgttatggttaattggttattgtatattattatagtagaagtgacgtgaggtaccaacgtattagattataaatataaataatggccaaagacaaagccatttgtcaaaacttcaacgtcattataacctgtaagattaaaaatgaacaataagaaatcatatttagcaaaaaaaaaaaaaaaaaacaataagaatcatttgtcaaatcttcaacatcgttacagtgtataatttatattttgattttttgttctaaatgatcaaagttcatatataaagttatttatatgctcaaatttaatcatcgaatatatatacaatttgtctatgttatttgtcaaagacaacgtcagcaatagttccatatactctctttttctttcggagtctttatattactcacggagatattaaattatatttattttttcactgagatatttttttttttttggtttaatgttaataaactcactgagatattaattaatacatgcaatctttatctatatttcccatttttatttgtaaatgtgtcccttctcgtgttatgcgagggtctttttttaactttttaatttctcatttggaagctttcatctataaatatatgcactagcttattctatatataacataaaaccgaaaaaaggttttgttcacgatgtggattctctgttcacgagaggttttgttgaaaaagaaagaaagaaaataattcaacttgaatttggaagtttggttacagatcacatcattcgacaataaaaataaagacatatataacaattagaacagtaactaatttgaatttcagcttcgatttcttacgaatcacatggggtcaataagggtggggctagaaaaacacgtacgtttggagaccaatgtgtgtatcattcctgcatgcgcatcagatgtgtttcactcttcagaaaaacgtttattttattttgcatgtcacagtcgtagctaattatccgtacgcatcttaattacgactccattttacacaccaatttatggatatataattcagacaagatgagttctcgtttaattttacttctttccatttgtggaagttcatatactattgtgaaaatttgaaaataactggtgaaagaggaaacgtccatatttgtgggctctatttataataataacaacaatattaattgtttaggtaaaaattaacagaactattttgaattacaatcggaaaaaggtttgcgtcaaaaaagtattgatgaaccatgcatttgatataagcatttatgtttgttcaatttactattaagcaattaagtcgaattttatcgaatcattttaatttttacctttaacatttctgtgatcttgaaatctttaaattaacaatgtgagttatatacactagagaaaaataattgcattccactgaaaacctcaacatcttgggaaatttaaacttaatcaaagacatcgcaaatgttgcttatctttttatcaagcccagcccacatattcgcggccccaaagcccaaaggttaagctgactcgttacaaaataaataagtattaataaaggtttttgattggcttatttcggtttaaatttaataccatatctttcggaagatcacgtgagacacatgtgacatccaacgaatagccaatcgctgaaaagtgaagactttttgttaccccataaacaaaagcatcatctctctctcatcttttatttttcttttagaaaccaaacttttcagatttctctctctccatttggcgatagaagaagtcatg

SEQ ID NO: 31434 - DNA, 3003 bp, Unknown
  misc_feature (1)..( 3003): 2750-1469P.txt file - cDNA_ID_3042107; gDNA_ID_1972132; Annot_ID_179095
ataaatattaattttgatgaaaaggaatttgtaaagaagcggttctcgtaatttttcttcggaagttgtcaaagaaccggcagatcctcgctgctcttgcattcgctcactacggtaacactctatcatctccatctctgttttgaattcgagattcgaactcaaagatttcgttttggaggattgcaatcttttcaatcaaaaaaaaaaagtaaaaagattgtaaaattgatcgttgattgggtgcggatgatctttggtcttcttgagcttaacttgggttgacatcagtttactgttttaagagatgaaaacccacaaggcatataacttttctagggtttagggtaattatattttaggatcaatcttctcgaaaaggaagaaaaattgaagcttgctatgtctctttaccttgagatatgagaatcacaggtcaaattatgttcttgatagattcagttgttgagttcatgtgtggtgttggaagaagtcaaaactctagttctagatataagcttgaaatttggacatgattttgtagatgtaagcttgaaaatggtttaggagagatgttactagatgcttccttatgccttctctgagactttaacattttgttgacacttttgttcttttttatctacatcttttgaatcatttgtttaaagcttttgcttaactcaaaagtaatttgtctcagcttttgcttaatggtgcctttttcctctggcaaacagatctcagactacagttaccaagatggtgtacgaaataactgagcaaaaaagtaattatttcttcacaattatcgctgtatagctttttcttgtgctgtttctgatgtacaactcttttggcaacggattttcgttagttctaagcattttgtcggtcctgtcgttcacttgtctttctcttgtcttataaacattactgaacagatcaaggtagatactgggtcagatttctttatatacgtgttatatctcttctttaggaattaaatcagtaatagaaatcacaaacttcatttttctttgtcttatggcttccatttcctgaatgtttgcagaagttgggttgggcctcattggttttggtttatcctttacgtttctcggagtcatcttgtactttgacagaggtttgctcgctctaggaaacgtgaggatatccttgttatttctaaacattaaatctacacaagggtccaacatttgagtctcatttggcttttgtgttcagttattctggttgataggtgttggccttttacttggttggcagtcgacttggagagtatttacaaatgttaataacttgagggtacgcattggactaattctaatctctgttaattgtttctcttgatgaacctttcatatggacatatcaatatgttcttgcaggggactatctgtttcgtccttggactctttctaatatttgtacgttggcccattatcggcattatcttggagatatacggtgtcattgtcctattcgggtgagtgcatttgtttctgttgctcatagtttcttatcgagtttttcacacattgtgcttttagatttgacatattaaagcagactgaaaaatgagtaaactagtggttctggcacagcacactaggatcttttgcctacagaatgatgatgtttgactaataacaatccatatctgatgaactcatttcctttcaccagtcacttattaattttattcagcttcttgcttaaagttttagcctgttacagtgtctaaccaacatcacatgtactaactttgcagcggattttggtcaacagtaaaggcatttctttcccagattccttttgtcggatggataatacagtatcctctcatggtaagtaatccacaacaacacttgccttttcctctaatgctcctttcttatgctttttgtacattcagagcttcctgtcagggccttgttcttgaacaacatcccgtgctcctgcctcaatttattcagtcccttgtggtagcttaagttagcctttctcggaaatggatagacccaatggacgtttcctgatatttagtttgcacatgatatagggatgaacataaaatgatttagagcgatggactgaattttgttttggaatgatctgtttatttttgcaggttcttgagcaacttgtaagaggtgctcgttgaaaaagatcaatctcaatctcatggctcttcagccgcttaacgacatcaaagcctttctttcttttttgggacatgacagagactttgctctgttttttgtttttttggtaaacctcacctttgctctgttttacatgtctaattttgctgtatatgccaaaatacattttcccttaaattgatttatcttctcgttaagcaagtattttcaactataactccaatcttgtgccaaatttaatcaaattcagatgataagtttttttttttaaacctccaatcttgtcccaactcaattttcattatgtaacgtgcggataataattaagtagttttgtaacgaatcaacgacatatttaacataaattaaattttaacagaataaaaagtgttcacgttattaaattttgtttttatttgcgtacggacataagttcctaaatgtgtcagccaaagatcaaattgttttcaggatcagacagagatcatcgagtgcggatttttctcggagagatgtctcttcgtgctttcttgctcggcgaggcattgacctaaacccgcttaataatctccgacgaagatccaggacacactcggcgttaagaggggaaagaaccaaaaatcaaacaatcatgtggatttcgaggttgaagagagttaggagaacgattatggttctgggcgttgccaatttcgtcgtgattgtttccggctgcgttcttactctcgtttctgacgcagattgcgacagccccggacaactatttcccctcttcgccgtttgtttcgctgccggcgtcaaactcgccgccatg

SEQ ID NO: 31435 - DNA, 3003 bp, Unknown
  misc_feature (1)..( 3003): 2750-1469P.txt file - cDNA_ID_3042123; gDNA_ID_1972133; Annot_ID_179130
agatttcctaatttctgatcatctaagccgtaagagctgcacaacattaacaagaaaacagatttatattagtatacagtattacccaactgaataagttacaggggttttcatattagccaacataaagagaaacagattgctgaattctataaacatgacttttaacttaaatggtagatatgacattccagtgcgtacatacctgcctatctgcttgttgatccagttcaacaaaagatcagcagtgcgccattcattgactacgcttatctcatttttctcttgtttaggtccccagctgccaccaacgaaccttttaggaggagcccaaaagagcattggataatgattgatagagaacttgtcacaaagctttacattcatctgtgctgccagaaaagtcacaataacaattagaaagaaaaaaaactatacacaacctcataagatacagttttcaagccccacgctctgactcacacgatccacatgaagtaagagaaaaaagagaaaggaaggtcaagatacacgttcatctatataaataaaaaagatggtgcaagtacctttatcgcacaatcaactctggtcatcaaaacgacaccaggatatactgcgtctgctccattgaatagccttgcaactttttcataatgtggctgcagcagagtcacccattggatataaacaacattgacaagagtaagcattgaataataagacattgaatggcgttgttaccttgtagtttctacatgcagggcaccttgagccaaacaaaaattatgggtcaatgtcagtatacaagcctttcgcatttatatataaagttaagttatttccggataaatctcagagaattggataacgtaaagtcaggttcgaatatgaagaacacttgcaaacaaattccgtgtaagatccagtgcttaaaagcctaaagtttgaatttttttcagattttttacgagagagagagagaatgagaaaactgaccagtgagcgaagaactctaaaacggcatatttggcgggggaatcttggaaaactgaatcaaagttggtagcgttcaattcgatagcgttgtctttctgatcggcgacgttactgccgatgtcccggagaatcgagcgcgatcccggtgaaaacgacgccgcagcttcaaggctcagcagacccaacaacaagaacaagtgtatcaaagacattaaatcgaataaagcatacaaattttgaagcttgatccggatgagagggaagatctaagagcaaaaagagcttccctccttccgttgagaaacaaaggtctctggtgtttattacgacgtcgtaacgcctttgaccggcgtcgatactttgttctcctccgacaactttcatactgggctttattataacgttataggcccattactaatctccatttgatgtttgtgtttgtttccttttgacccgcccaaaaagaaagaatttgaatgtagataagataacgctatctctagtcaatactcaatagtcaaataaaagttggccattttgtttggaaatcggaggaacagttaatgttatccaatagaaaaacttatggagtggttttatttgagatgtttttgtttttctttgtttatagataaatttcggattggatataaaacaccatccgttggtagtattaattttacaaaaaaaattaatcatatatttattttctttgtattctctcatctatgaagataacatgagaaagttataagaaaatatatatatgagataacatgagaaagtctaaaaatggattaattagaacagagagtcaacaagttcatgtctcctcctcactctaaccacaagtcaacaccatttgtcttagtcatgaggagacacacatacacacctcacattaagaaaatttaacacatagcttccttatactattgccacttctcttgcactattcggtatcaattgtttttaagtgcccttcttggtactggggaaaaaattgacaccaaaaagtatcgatcatgtgcacatcctcaacctctaataataatgtcacttaaataagaatgcagtaacacagtccacgtgcatgaattcatttttctgatatagtttgcattcgtctgacatatttggtttcctgatttagatgaatattaaaattcagaaccattttagtatagtgttctcatttctcaactcctgcctcgatctctatagacgttcatgtatgcttttttttgttttcgtttatcaactctcaaaaggatgagatattaacaaccattcttaatttttggcaagtataacaaactgagagagaatgtttaaaagtccaattttaagattccaatatgcttaaaaaattcttacgcagcatctactatccgccgttagttttagacccttttattatgcgggaatttcccaattgtaccttttttgtttttaaaatcaccaataagggggtgatttcaattttcaactaattatttgggtgtaatgttgaatacgaaaaaaagttgagcaataagtaataaaacatgaaatacaagggtcaaattatgcaaaagaaaacaaaaataagaggtgcttcaatctttttattaaagagtccccttttattgactgtcctctctctctctctcttctttctctttgtcatgaaccagtaatcttgtttctcttcatcttccattgacgtttccttctatcctcgttgccttcatttttcactcgcacgctaatcttcgcctactttgttagattttcggttttgggtttttgtcttttggtcgatttcccctgttcccagaatctccgattaagctgcttccttaatctcttgtctgaatataaactttttccggcgtgtaatttagataggtggttaaaattacgagtagtgagaggagtgttgttgctgttttgtttattcggtaaaacgaaatcggaagttctttgttgtcgtttgattccttttgagaaagagagatg

SEQ ID NO: 31436 - DNA, 3000 bp, Unknown; identical to SEQ ID NO: 9498
  misc_feature (1)..( 3000): 2750-1469P.txt file - cDNA_ID_3042125; gDNA_ID_1972133; Annot_ID_179128

SEQ ID NO: 31437 - DNA, 3003 bp, Unknown
  misc_feature (1)..( 3003): 2750-1469P.txt file - cDNA_ID_3042145; gDNA_ID_1972137; Annot_ID_179154
aaggtgtgggctggagaattcaattattataaggtttaatttcttaggtctttggaaattgcaagtcccaaggccaactaataatgacctcgatctttgcgttaaccggaccgtccatctactcttcctttattttattttaatcatttttccactagttaatacgtttacacttgttcatgacccgtattaaagaaaagaatttgtgttaggagaaaactaaacaattagcgtcaataatcatttacctagttaataaaatacaccgagttgttaatttttattaactaaaatcaagtaactttgacatcgatcggtaatttatttcatatttcaattagtgataacaattataatcctaatgatattcttaggaaaactaacaatgaagttattagcattaactgggacaattcttgatcttacgtgtgctttgatctttgacttcaccacaagctagcatattagcagtagtatataatgcacggaatgaaatcgtcatcacttcattggtatcatacgaaggagtgttggaatatgcaaaaaaaagaaaaaaagaattggtaggctcaaattattaggtctcttattgtatttgtatcagtcgaagatttgtttttcttacaacgtaaatcgtagtggtttgtatttgtaagaagatataacttgtatttctcaaatttaagtatagtgcttgtaaattcctcatatattattgaacatttttctaaatgcaaaaccaaaatataaaataaaacaattgaaccttttttacattgtacaatcaacaacatgtactatgtcatacgtatgatgtgatgtcaaattatattcttcaacatggagttgtgaaagttccatcagataataatttgaccaaattaagtgattcatgtaaccattttgaacagatttcaaggttgtttaaatgattggagattggtcacatatcttacacattacaatttattatggtagagtttttagagattgaataatgtgtggatcaaaccataggaacttgtcgcataaattcgttgcatacttgttttgtccggtatactagacatttcatcaatttgctttagcgcatcttcgataaaacttagtatatgtattacggttataatattagcagagcaataaacttctgagtaacacttgatcgtcaaggtggagtttgttggctttgtgaattgtgatgaagtagaaaaagatttgaaccatagaaagataaacttatatgtggagaattccactgcgttatataatgtctataatagaaccatagaaggattaaactttttgaaaagcctaaaagtaagaaataattgtaatctttttcttgctaacaaaataattgtagtttaagacctctatcgaccacgaagatctcgtagattatttgactaaccaagatgtacgaataatttttatttgaataaagtttcccaactctcaagttgcccttaagctgacagaatgtaacaacttgaatatctaattaaaccactattccaagatacagtaaaagatctatctatgagttcaataatattattttctaatcttaatattattgtaattgctatgaatattttaataagtcttagcagtactgtttacaactagacttgagctgcaaaaaaatattcttgaacgaaagcaaccggtcaaaagacacaaaaataacttttttaaaaaaatataaaaaatctccaacaaaccgtgcatgaaaacaaaagtatttatttaagaattacctatgattcggtacaaaatccaaaacattgaacatgaaaccaataattgttatgattattctcaagcattatactaccatatagtaacacagggcaatggaaaagagtaaccctcttttttagtatatgaagaaaaaaaacatttgaatatatgggaacttgaacttattcaacattgaaactagctgataaaatcataaaagtatgcacatgagacatgatgactgactaaaaataagtgttgaccaacaaaaaaagagagtaaaaaagactgaaaaaagttcataaaaatagtctttatacagtatacagtttttcacaaataaatgccaaatagaattgaatgaatgattactaatgagatttaccagacaaacctaattcattaattatgaaaacaagaaaaagaaatcatgaaaatctgtttttcgaggattttaataacaaaaggataaaataaaataaaaaagagagaataagataaccccaaaatgaaagttgtcactgtcagctcggattgtttagaattggaataattacgtgtttaattaaaccatacacagatttaactaatcaaatcacttttaaccaatttttaaacctttagctcacaaaaaaaaaatgtctctgcaaattataatccttgaatactttggctatggcggtgtttatgtttaatgatcaaaaagctctgttttttatgcaagcgtgggtataaaatccagttccttttccgattttttgttcttccttcttcttcacttcctttttttcttctccatttctcaaaaaggccactcctttgcttatctttctctctctctgcagctgaagaacagagaaaaagggttttttattgtctgacccaaaggacccagtttcaattcagcttttgttgttagaaattgaggtaaaagattcaaaatttgttcagaaaagtggcacagattctgaaaaattaatatctttcttctcactcttttagctcgattctaagcttaaatctggtttagggtttttggagtttgtactgataaagcatgatcctttttgtcttccgttgactgattctgttccttttctcaatatattgatttgggcttctcttgttcttcatcgaatcattggtcttcaaggtgaatgtgtttgtgtagtggcaagtcttgttggtttgtagtggttttgatcttggagattttctgattagtgagtggtgttcatcaagtattagaagaagatg

SEQ ID NO: 31438 - DNA, 3000 bp, Unknown; identical to SEQ ID NO: 15028
  misc_feature (1)..( 3000): 2750-1469P.txt file - cDNA_ID_3042149; gDNA_ID_2684254; Annot_ID_193059

SEQ ID NO: 31439 - DNA, 3003 bp, Unknown
  misc_feature (1)..( 3003): 2750-1469P.txt file - cDNA_ID_3042149; gDNA_ID_1972137; Annot_ID_179151
ctttggataaaattgagtcagtttatgggaatgtgataaatgatttgactattgttttagaaattttacaatagtcgttgattgagccgaatctaaatatcgttagtagataaagacttgtcagattatatatgaacactttcttttggaaatatttggtttatagacccgtaacaagttcagacagggatcaagaacatttcgaaagagacaaagatgatgcatacatcgatatggacctgtttatttattagaacatgaaaatatatagtttttatttttttgtaaccaaaaagttttggaccataggtccgaaattcaaaacagagcaaagtcccctgaacacccccaatgacaaaattcgaacctgagatctaaagaacactctctttaggttatatttttggtaaaatatatttgattatattgttatagattcatttgagatgtttgtataccttggtcctcttctttaaataaacaacaaaaaaccaacaagcttacgagacgattagaaggtccagatctgatcggcctctacgctaagaaacctattaagcccgatctcaccaatcatcttcctcgacttggagttttcctctcgaagtttcatgttctcttctataaccttctcgtaacattccctggcttggcttagctcatcgactagagatttgttcttattgatgagttgaacaagcatggaccacagttcttccatgtgacgctgtttccgcatacgcgatctccgagctgactcgcggttcgataccttccttctccgcttcctctcattatcttctgcagtccggctagagtcgtctgacgtggcaggcaagtttgaaagtggtactcgatcaacaaagatttggaataaagactgtggattagggttttgacttggaaggttatagacagaaccagccatgaaaaaaacagttatgcgttctttaagaaaatttttgttgacaagtatgatggtatagatcaatgaaatgcactctaattttggtttttatagatgaataaatcgaaagtagtgttaccttacactaataactaatccaagtggctgaagcatacgtaaattttaataaaatagaaggagaagaaaaagagaagttctaatcgtgagattgatgagtcatgaagcacttgaaaggtgaaagtaagtagatggcatgaaggggaccattgcggagaaaatcaaagactatattataaattattcaaagaaagcgtgagaggtagcgactcgtcgacgcaccatgtttcttttcgagcaaccatatctaatttttttaagagcgtactttattttttttatatacgtaattattcgataatccaatggtttatgaaatttgtgggtaatgatgtagcataaagtgactttagtccttgtacataatttatagtgttaaagagttgacaatgaagaaattttaccaaaaactactatagttcctgaagcctaattgcgagagttgtggtcggatagctaaaatgtgcttttagaaattttgcattaggtaacatgtttttaccaagtcaaataaagtctagtgaatgaaaataatatcttatagctgggatgaaatatattggcaattttttttttggataaatactctaaatatattggtatttaccttcaccatttagagtgaatgtcacttggggttggggtatcagattggttaaatttgctttattaggcggtaatttttagtagcagttataaataatattttatctaaagtaaggattagaatattgatgttttctgctagtaaagaagtttcctagatccacttaaagccaatcatcttagtggcgtgatggtatcaaacatatatagatgaatgtttgaaaaactcgagagtgcgagacgcatcaaattgcaaacgagtctgttcatattataatgacatgttgaattatcttaataagacaattttagccatctagatgttaatcggctaactattttgctatagaataaggattcatccaataacatcaaaatatagccctgttattcataatttatgtaagaagagaaaatacttttctatgacaattaagcgaattaatccattagctgctccaaggggtaactaatgaaagtcaattaaagcttcaagtgacgtatcacatactcacaatgaaacacttattttgctgatgttatggaccattatggttttattgattagaaagcaaatattataatgtgaaactctagtggtagagatttcttgcttgtcttttactagtttccagctactcttgttttgtccgttttggctattccacgatctacaactttcgggttcatatcaatgtccaagaggatattactagcaattcctcctatgatgtgaaatcgtctagtgccaaaaatatatcagttttaaaagcattggtttaacttaccaagcataaagtaatgaagacattacttttttttggcacaaactcatagaaaagtattatctatgattcttcaaaataaaacccaagtagttttatgagaatttatattttgaagctttgtcatacaacaacttgttgtgataaacaaccaactagattttaatccgcggtacaccgcatgacaatttattttaaaaattagtttatataaaaatttgtaaattatatttatttataaaatttatattttatagtttatatttattattaagtgaaaatataccataaatttatgagataaatattaataaattaaagatttaacccatatgttaatatttattttgaaattatataaatacaaaaataaccgaacggttattgctttagaccgatttcgtaaacaattccacaaacgaaaaacaaattcgtaataaaggcgttgtgggttttggttaacacccggtttgtaacggtctttgcgccttatccaaaaaaacctcctaaaaccttctcaccagccattgattcacaatctcaaaattcatcacagcgaagaagatg

SEQ ID NO: 31440 - DNA, 3000 bp, Unknown
  misc_feature (1)..( 3000): 2750-1469P.txt file - cDNA_ID_3042163; gDNA_ID_1972137; Annot_ID_179141
actataatgttcatatcgtccgattgtttcttgaatgaacaattattttgtattgatttttttatataatcgtagacacgtataatactatctttgaggtatgaaccgataaatttgttgctaccaataaaaactgaaaacacactgtatttcataaatttaagataccatccgaatatgttctcttactacttactagactactagtccaactcaaattaatttgattaagaagaattaattatatacttgaatccatatctatttaaacactacaatatgtatttctatatcacctctcatcatcccaacacatttaatttatcaattaatatgaaacttcaataaccatccaaatcacatgataagtttgaatgctgaatcagtaataataaataaaaataaaaacatcagcgaacaagaaaattaagcatattttgctaaaccctctcatgttaactatgggaattaatttctttaacaaaaaaagaaagaaaattaagcatattgatagaaaatatcctgagaaaatcgttaaaatgtggatataaatgttgagaaaaaaagacaaataattatttgaaagtataagaaaaggtccatgcaacgtaggaaaaaacatcggggtaaggtgtcgcaacagacgatgtcgtttggtcaacaatttggagatgaaatttaaagtaggagaaaacttgtgatacgttttaagaacgaaaaagtcagctccatcattgtcatttgtcactgttaagtatggacccaaacctcatctcatcctaattttagtaatattccgattccatctcactcgttggttttagattcttatcttccatcgttgagatcgtacagttttggtaagaagacaaagacttcatgtattattgacattttttcgtatttccatcttcggctaatcagacttgactaactaaattatataattctggtggaataatgaaactcgtggcctagttttggaccaccagaactaacttaattaaatgattataccaccagaaccaacttaatttaactaatagattcaattttgtggctcctacatactatataattggatacaaaagtgaaaagaagaaaacttaaatattaactagcgtgcgactaattaaatattatacacatcaaacttttgtaaattgcagcagccactcgttagcgagtttccatgacctcactaagtaatgtttacacataagtatattattgtttccgtttacaatatatataaatgatctcacttataatattgtcaacaatgaatttatgtaaaaatattagacgataagctaattttttttttcatgttgctgaatcaaataatctaatttgcatttgttagatttactcaaaactaaataaacttgaaagtttatcaaatcaatactttatgtaaaagtgactatctgaaaaaaaaaaaaaaaaaaaaaaaagtgactatctggaaatgaagcgactttgtccaacttgatgttctgttcataaagccgagcaaaacaacaaataaataaaactaactgaaaataaaattatcattgattagtttagctaattcgtgacttaatgtagtgattagtactatgataatatcatgtgaggcaaatgagaatatatttgactgtatcttttgatcacgtatccacgtcgatacagacaagctgtatatgttgcgcgtacattatggtcaatgttcttacgattcttttcacatttcttttccagtgctaatacaaatatttttatcagtatacacgttatggattcattgtataacttgtcatcggtgggaataatatttctcatctgttatttatccgttatgtcattcgtcgatgtacgacccgcttcaaaataaaagaatttcgtaattagtaaagcaaatacaaattgtcaattcaccaaatagtgatcaaatatatgtttgtcaaaaaaaattcttatatcttaagaagatcagatagctgcattaaatctttgaatatccgcttgattattcgaaacgagtatcataacatcaacaaaactagtagaaagtatacaagtaatgaaagtaattatatatatggactatatataacatttgtctaacatttgatagtatttgttttttctatgtcaaacagtgatttgttatatcgattcataacgaaccatcaagttttggccttaaatgttggcaagaaatatttataaatgcgtcggtcaattgcgtgacaaactttactacagtcattattgtagaatgatagtatatagtattactttgatagggagtagcatgttagttaagagtttaaaagcaccaatttcatataatatacaattatgaaagggaaaatataattaactatctcgcaaacaggattatgaagtcaattagcttacgtacatcgaggtcaacgaagtaaacaaatttgccaaatcgttgtcatataatagttgtacggaaatggtcaaaacacttcatcaagaaagttgatttctattatttcaatggcttaatggtataccatataatatcatatatttaaaaatgtgagattttgtgatacacatcaattgacgtaaatacattttaggaagactgaaagaaaaacaaatttaaatttaaacttaagattagccgagtcttacttagcttcaaatcgataattgatggggacttttctaaaccagagtttatgatcgggtggcgaagaattagatttatggatcttatcactaaaacaacatgagaagcccatttaataagcacttcatcattaatgggcctaaaaataagcccgtttattaaaccttacatatccgaatctgattttaatcgacgtgtcctttgtggtgtaaatctactaattaatttgaatgaacagaaaaaaaaaaaaaaaaaaactagtggtgcgaaatcaacgactgtttaaggaattttgattttttgtcttccaacaaaattcttccggtgaaaaaaattccgccatg

SEQ ID NO: 31441 - DNA, 3003 bp, Unknown
  misc_feature (1)..( 3003): 2750-1469P.txt file - cDNA_ID_3042178; gDNA_ID_1972138; Annot_ID_179198
cttgcgaaaaaatcgattcgcgaagactgcaaaaacttataccatcctgcattccagcaatggaagtcatgattcaggtgtaatcattacaccagatggttactggcatagttactttgtcttaattagtcatcttaacactcctgtcattattcttcttttgctatctcagctagaaggttctggtaactggcccatggatgatttagcagttgagaaaacaaaatctgccttcctcctgaaaattgcagagaggtgggtgaagctattgtttgtaacacttcaaactattaagtcacagtgtttttatctgagtactgacaaatgaaaatactgacagccttcagaacgtcaagggaataccatgcacagctactgaggataatgtcgatgttttcattggtggttacgcatttcgcttgagaatattgcatgaaagaggcctgagtttggtgaagagagaaagtgagttttcttcttgtacacactatcctctatttcttaataaaaagcttatgtgatgctgacttcctcgatttctactgagttgcagttggagtggacccggtgaagcatgtttcctctaccgataaaatgctttttattcgtagtcaacatgcaagtatgattaatggtttgcaaggtcgatttcctgtatacgcaccagttgccaggtaaaagtcaataaaatttatgtgttttacttttgtttgctttgaagtttcataacccagaccttgtctgctacttgaaggcttgcaaaaagatgggtttctgcgcatctcttttctggttgcctggcagaagaggccattgaacttttggttgcttatctcttcctcacacctctcccactcggtgttccttcctcccggattaatggattcttaaggtacatttccgcgcttccatacttatgaattttatggaaaacaaccaggcaatgctgttggcaacaatcaaaacatcacatctttccgctggaccgtgtaacaggttcttgcgattactagcagactatgaatggatgttctacccgttgattgttgacataaacaatgactttggtagaaatgacgagaaagagatcaatgtgagtcccaactttaataatgggtctagtgttgggttagatttgttagaacggccgtatgtcattgtaaaacatttctggtatttttaggataacttcatgtcaagtagaaaaggctacgaagaggacaaacaaaacataagttcagctatgttcttggctgctccttacgacaaggcatcagaggcatggacatcaacttcaccaaatttattggttagtaattagaatacgcttttgaaaagcatatcttccgctactctgttctttttcttcttaactctctttatttcctttgttaaaggaacaaaaaaggttggtggcttatgctcgaagcagtgcaaacgtgttgagcaagatggtattgcaagaacataatgattctgttcaatgggaggtgagtgtgatgtattgaaaacaaaatgtattgaaccggtattatgagaacattacatcgactaattttatgagtatatatgttgcagtgccttttcaggacacccttgaacaactatgacgcagttattcttctccatagagacaaattaccttatccacgtcgtcttctgtttccatctgaacttaaccaaggttccaaacatagctctctctgtctctatttattatgtctatatcgttagttccaccatttaacttctttcccatttattgaacagggaagcatgtagcacggggaaaagcgagtagattgttcaacccatttatgtcgcctggagatttgaagagaagccatgaagagcttaagaataagctaatggtggacttcgagccgaccaagtgcttgttgagtgggttgcaggcaagtgttgtctcaaaaacataaacaatcatatttattcaatttcttattaaaagaaaggaacctatcacgcgattcttatctttatgcggttgtttgcaggaagagtttgggacgttgaagccatggtatgatcatataggaggcgacgcaattggtttaacatggaacaaacacaattcaaaggtaaacaaaaatcttcttagtgtcttacttaaaagaaacactaaaggaaaaatcgtaataacaaatgtaatgtttgattgcagaaacgagaacgagatgaagaagaagaagaagaagaagaaagtaatccaatggagatgttaaaggcggtaggcgaaatgggtaaagggttagtgagggatatctatttgctcaagcctccacgctttgtctaaatatcaacttgtcttagtttctttaaaatgtgtttgtcaattttgtttactcatcatcatactcaaactgtctaaagcgactaaacacattaccagttttgcttcattcattgagtttaatgtgtaccaaagcttaatgactattcgttgtcctactattttgttttttaaaacaaacaaagctcaagacctttcggggaaggttatgtgacaagcaaagacatatatacaaaacggagtagtatttgtggagattggagaagaacaatgaaaatgaatttacttgtgctttgtaaccgttgtgtaataacggctattacaagaaaagtttatagataagataagttacatgatctcaaatgtttcgatgggttttgtttgatttgcaaatagcttcctgagcatatcacgacagtattcatgtctacattttctttgtggcctaattattaaatttaagttaccgtcgaaacttgaacttgaaactttatttttgccaacacggcaatgagttctcttggaacatctcacatcatcatcatcatcatcatcatcatcatcatcgatatctgtaataaaataaaacaaaataatgaaaaagattctctcacattatcttatttctccacttgattcccagaagacaaaaaaaaaaaaaatcagaaaaaaagaagaagagagaaaccatg

SEQ ID NO: 31442 - DNA, 3003 bp, Unknown
  misc_feature (1)..( 3003): 2750-1469P.txt file - cDNA_ID_3042186; gDNA_ID_1972138; Annot_ID_179188
tatatctggtatcgatgaagtctatatcagagagggagcttttagaagaatgtctaatcttcggttcctcacagtatacaaaagtaaagatgatgggaatgatataatggatataccaaagaggatggagtttccacgtcgacttaggatactaaaatgggaagcatacccaaacaagtgttttcctcccaaattccatccggaatatcttgtggaacttgttatgaagaatagcaagctcgagtacctctggcaaggaacccaggttggtgttgtactttttaatatatgaattttgtatcctactttctcatcaagttatatgatgccctttctctctgttaatctgtgtctttcttgcatattcagccgctaaagaatctcaaggagatgaatttaaaagggtcctccaatttgaaggcactcccaaatctttcaaatgctacaaagatggagatattgaaactgagtgattgcaagagtttggtggagattccatcctctttttcgcatcttcaaagattagagaagttgcggctgagggggtgcataagtctggaagtcattccagctgacatgaacttggaatttctttacgacttagatatgagaggatgctcaagattgagaaatattccagttatgtcaacgagactctactttctaaatatatcggaaacagctgttgaagatgtgtctgcatcaattacgtcttggcatcatgttacgcatctctcgataaacagcagcgcaaagttaaggggtttaacacatctcccaaggcctgtcgaatttctagacctaagctactctggtatcgaaaggattccaaattgcatcaaagatcgttatttgcttaaaagcctaactatatctggatgcagaagactcacatcattgccagagctccctgcttcgctcaagttcctagtcgcagacgattgtgaatcactggagaccgtattttgccctttcaagacatcaaaatgttggcccttcaacattttcgaattcaccaactgtttcaaattggaccaagaagcaagaagagcaattatccaacggccattttttcacgggacaacgctcttacctggaagagaagtgccagcagagttcgatcaccgaggaagaggaaataccttgaccattcctctcgaaaggaaaaggtcttaccgtggcgttgggttttgcgtcgtgatttcccctaaccaccaaatcacagaaaaatttcattccggactacttatcaaatctcgaacaaaacatttactgataattcactatcactttgaaagattagaccaccaatctccagcgttgagcagagagttgtttttcgaattacgcagcgtaaacgataacttcagattattgaatgtggtgccagattgattgaagaagagagcattgaagataactatgagtctggatcagaccaagcctccgaagaagatagcatcgaagagaactatggatctggatcagaccaccaagcttccgaagaagatagcatcgaagggagctatgaatctggatcagaacaagcgtccgaagaagacagcatccaagaagagaactatgaagagagcatccaagaaagctatgaagctggatcagaccaagtgtctgaagaagagagctatgaatctggatcagaacaagcctctgaagacgaaaatgagtttgaacacagcgaagaagcctctgaagactacaaatggagtaatactaatctgtgactcccaaagtcgaaggagagagcaagtgccatacccagacaaacgcacgagcaatctccttcgcaatcatggtgaattcttcctctgaaacattgaattattttcttgctattaactcgaacagaaatgaataatgatatgatgattttctcgtgcttgcagattatctcagagaagaatcgccgcgagatctccaaataccacctcttcaaaggtacaactctttttattttgtttgcgaatcgtcttaactttgatctgtatacgtgtaatcagatacagtacgtagatattctgaatctcttgtacttagcccatcgttttaactttagctgtttctgaattcgatgccttacttactttgaacatagttagcaagaacaatgtgattcactaggattacttagaaatgttacttttatttcgagaaagttttgtatgctaaaagaggacttgaatttgccacaacatcccttgatcgagtgttccgaatcctgcaggtgattaagcttatgtagagctttttgtcaaaggagtatgtcaaagagacttttacttgggtacattactactggttccttaacaatgaaggcattaacttcctcaagactcacctcaatctcccacctgagattgttcctgcggtcctgccaccttaaaaagcagccttctttttttttccacgactgagaccttaattaaaagcagccgaataagcgaccaattttctgtaaaaagcacttactagattttactttgttaggctttcccttttgtgtatttttgtatgtctctttaaaaagataaggcattcacggtaaaacaaaacaaaaaaatcaacgaaaaataattacggaaacacaaatatttaatgaaaataaaaaaccagtttaaacacttttatgggtcgatttttatttttaaaaataaaatcctttaaaaaaaaaactaaaaaaggagaaaaaaatcgctttgattttaaaaacaagtgatcgaattcaggagagggatcagatgataaaagaaggagagtgctcaatagtcgtaacaggctgagcgaaacactcttctcgcattaagcgagtttaataaccactcctcatttcccctttaacttgcctgaaggatcatatttattcattgccccacctttaatcttttttatagccaactaatcatatccctcccgtctcttctaaccgatgtgggacaaatatctcttcttcagtttttcaaaaccctaattagcctaccgaaaatg

SEQ ID NO: 31443 - DNA, 3003 bp, Unknown
  misc_feature (1)..( 3003): 2750-1469P.txt file - cDNA_ID_3042212; gDNA_ID_1972139; Annot_ID_179226
aaaggatgggaatggggattcggtgtttctaccattgctatcttcgtctctattctcatctttctctctggatcaagattttataggaacaagattccatgtggaagtcctctcaccacaatcttgaaggtttgttttgacctctttagctcttattggagattgacgtgtgccctaagttatgtatatgatttctttattcaggttcttcttgcggcttcggttaagtgctgctcgagtggaagttcaagcaatgcggttgcgagtatgtccgtgagtccctcaaatcattgcgtatcaaaggggaaaaaagaagttgaatcacaaggagaattggaaaagccacgtcaagaagaagctttgcctcctcgggcacaactaactaacagtttgaaagtattaaatggagctgcggatgaaaaacctgtccatagattgttagaatgcacagtccaacaagtggaagatgtgaagattgtcttgaaaatgcttccgatatttgcttgcactatcatgcttaactgttgcttagctcagctctctacattctccgtccaacaagctgcttccatgaacacaaagataggaagcctaaagatacctccagcttccttaccgatcttccccgtcgttttcataatgatcctcgcacctatctacgaccatctcattatcccattcgctagaaaagctaccaagaccgaaacaggagtcactcatctacaaagaatcggagtaggtttagttctttcgatattagcaatggcggttgcagctctagttgagattaaacgaaagggagtggctaaagactccggcttgcttgactcgaaagaaaccttacccgtgactttcctatggatcgcacttcagtatcttttcctagggtcagccgatctattcacactagctggactactagagtatttcttcacggaagcaccttcctcaatgagatctctcgcaacatcgctctcgtgggcttctttggctatggggtattacctaagctcagtgatcgtgtccatagtaaacagcatcacaggaagctcagggaacacaccttggctcagaggaaaaagcataaaccgttacaaactagactacttctattggctaatgtgtgttcttagtgcagctaacttcttgcactacctcttttgggcaatgcgttacaagtatagatcaactggttcaagaagctaaaattggatgggcaacttttgagttttttttttgtttttaattagagcagaaaatgtttttacttgagcggctgttatataagagatgataaatgggggtaagtagtaatgttgtgatcaggtatatattggggtttgaagtttttatcgttggacaagtaatgtacagcgaatgatattaacttgctttaagtctttcttttgttcttgtggtgtacgaaattgagtcaaggttttgatctttgatatattcacaaaagttgatactggaaattctgtgaatacttatttgaattctcagcaagatactaaagaactggaatttgagagaaatgatggataaggaggcccaaggattttttgtcatttgtgtgagaaaacgatggtcacgaggcccaaatatttttgacatggcttggaagataataaggaaacaaagcccatttattgaggttttggtcagtcatgtagtgtggtaagtaaagttataatcaaaacatttcttttgtttttttctttgaagacaaattgattccttacgtctaaacatactacaattgattaatttggattccttaaatctctctagacaaacatcagatatcatgatagtagaggttaagatacttaaaatactatatatttacaaaaaacacttaaaatactatatagaaacgataataaaaaaaaaactctttttttttctgaaacaaaattttctttactaagaaaattttgtttcagaaaaagagtaattatttttttttaaaatcttttttttgttttgttttttgtcgacaaaaaacgatgaaaaagtaatcactcagtttttttttctgaaacaatttttcaaagctagaataaatttctcacaagggatttaaggtgattgtttttgaaaaaaaaatccaaaattatgataaaatattaatgctgaaataaatataaactagaattatttttgtccaaatttttcgtaaataaattttgtaaacagcgattatgactctggcaatttcttaaaaaagaattggataagtactgataaatttgtattctctcaactaaaatctctttttaatagaaataaaagctaaatcccaggaatcccattttagtaccagtcgtggtataaatattaacacttactgattgccgagagacgaaagaggaaaatcccaacaataaagagcaaacgatcttacagctcataatatttcgttaattatcaaattgctaataggtaatttcgcggaatcttcctttgtaatttcctccaactttctctgctttgcttataattgcgtctttgcttcctcctttacctttacgcggcacatagattattctctccaagtgtgttaatttctcttcttcgtaatctaattttgttttgttactgttgatttgtgtctttctgtttcgtggactctttttgactcccatcaattttaggattcttcttcgtgtgtggattttgatttcttcttcttctctggtgggttttggaactgttaggcttttgggtattttgttgaattccttagggttttgtagtaagattttgataattattgaatcgtttagaacaagagtcaactttttaaagtcattttatagaatctgagtctactagtcgttgaataaatattcttaaagaaatgatttttataatcttcttctcgtcgactttatttattatttagaatcttgtatttgtttttataacccataatctagaatttgatgatttttcaggtataaagttttgtaatttacttttcaggagaaaaaaatg

SEQ ID NO: 31444 - DNA, 3000 bp, Unknown
  misc_feature (1)..( 3000): 2750-1469P.txt file - cDNA_ID_3042219; gDNA_ID_1972139; Annot_ID_179221
ctcaaaagtcttctacaaaaacctttgcagtcacatgtttcttgccagctcttttgataaatatcagcatgaaaagaccaacgaaaaaaaagtaataataattcgaagcaaaatgtcatactgatattaatatgatgtgatcagtgtatttaatgtaatttgaaattaatcataagagtacaaagtgggaatgcaaatacgatggtccaccgatccttgtcatggtcttgtacacacttgaaacagaatacaagtcaacgaaggtgtctcttattgatttctcttacttcttaggcttatagctcttgccttctgaaagttacagaatattccctttcatagaatcttcaactttctattttcatgttattggtttaaaggtctaatagaatctttaatgttgtaatgtgtcttagacttaaatgaattcattacttgaagacatgtattccacgctgaaaacacaattcttttgaatatagttttatgatataatcatgaaaacctatatttagatttgcttaggactctaaatatatcacaatggatacgatcttgaaatcccacttatttcatctaactccccaaaaaaagaaaaaaaagatgaatttgttatgcacaactggattataaaaaatcgacttttatatcaaaaacctgaattcaatctaacagtatatactacaaaaaaatgatcaaatgtttatatatgtaggtgcaaatattttcctataacatacttgagatagtaacttaagaaatgattaataattatgtttctttcagcagggtcaaaaatgtattcccacatttaacatgctttagtaagtaattatggtatactttataagaggatattatataaatatctcttagtataaccatatgaagtcggtagatatgatcctctcaaatacaaaatagaaaaagtgagctttctaagagttggagttatctatcaaactccatatacatttttcgttattcgatcatgaccattaaaatgcatatgtttgatagtgacccgcaccacacagctcagcatattgagacagattagtaaaagcagtccaaaccttaggcacccagtccacggttcatatcatctgaccattgagaatggtgaagagagataagatgatcgaacggtgtacaataatatgaccataaaatcgaacggtgatacggtataggatcccacgtaaaggtccaaacaaaaaaaaattaataaagaagaaaagacaaagagggtttgcgtagaaatttgatggctcgcgcatgcgacagtgttaggcacttgcatttgcctaaaaggcgataaaagcctacctcatcttatcgtatttctctttctgtttctgtcttcactcaccgatttttatgtttgtgttcaatttgaattttacaagtttggttggacttaatctttcctttaacataaacattcaatgataattttattattaatgttcatttcttgtgaagattttcattgtttctatatataatatatattttacattgagaaaaaaaaatgatgcgaattgttttgaagttgaagtggttgattaatatttttttctacaataaatcaatgaaaatttagaattgaaaaatatctagacatggaatttctcaactcaacatctagataaacatatgtaccacacattcgagcaatcgtataaaattatatacgaataaatagaattagtttctttctcggaaattctgttaatatttttaggaggattaagtgggttcgaaatttaatcacttcctgcacaaattcatctcaatgtattaattggtgatatgtcatttttttattttattttttggtatgagcttccaaagttttaaggccagctctatatgtgtactattgtttctaactttattatattaaattttggtgatatgtgtttctttgtttgattgcaacccaaaatagtttaaggttcatcttagagtgcgatgactttttgtgcaaaaatattagatcatgttggtatgtacgttttgagttttatttatttgtttaccaattgaacgactctcaacaagcaattgtatgccaagatgacatattggacgtttcaagtgtgtgaattgtataaagcagtaaataaaatctactcttattaactagtttgaaagagagttttaacttcgaagaatctatcgccatgagtcaaaatcgtataaatgtgacaaatgtttatctctatcaataatagtaaaaattttaaaaggttctatataaattttaagattttgtcaggatcattaaagtgtagaactaagtcaactgattgattaatagaaaaaatcgatacaatctcacttcctttaagaaaataaaaataaaatatgctttagagaaaataaaatctcgcttatttatgagatatcatatcatttttaggtaaaaaagattagatgtccttttgagacacatcataccatatatatgaccgacaacacacataaaaccgcgtgaacaaaaaatatcatccatcaaccccttacgatgcaaatgtactgtaaaagatggttcattaatttaacatcgtattttaacgttacaattgtatggaacatggaaggttcacaatacgtggaacaaaacaataatgttacgtacggtgtaagaaaaacaaaaaaaacatagcactaaaatagttttcttttaattttcctcttcaaacttctcacgtggaggctactagtggcgaacgtcattcaaatttacccacacccaccatatattatctactcactcccttatatatacacacttccacaaataattcactacacccaaaaaagcttctaacaaagagaaagtgtctgtatgttgtgcccactctctacatttatcaatcacttcatgtgtgttaccttgattgcaaaaaagtgagaatatattctcacaacattaaatccaccccgaaatcgaagtgagtatatcacgagtgtagtaatatcttagagatg

SEQ ID NO: 31445 - DNA, 3000 bp, Unknown; identical to SEQ ID NO: 9512
  misc_feature (1)..( 3000): 2750-1469P.txt file - cDNA_ID_3042222; gDNA_ID_1972139; Annot_ID_179220

SEQ ID NO: 31446 - DNA, 3003 bp, Unknown
  misc_feature (1)..( 3003): 2750-1469P.txt file - cDNA_ID_3042228; gDNA_ID_1972139; Annot_ID_179209
ttttttttaaatctaatattaaattatattcaaagaaaaataaacttttatacatgtaaatgcaaaagacttttcttaaaaattaaaagagatattatcgatggtgttatcttgtcaaagcaaaccacgtttggatcccgcctttgtatttctcacaactccctctccttgttgtccttaactggtttctaatgtttttgtctatcaaattgtactttttcgattgcttatgttcatataaacacacttctctccacgtcgcaaggtttgagcctgaacgtctgcgatatgttgttcatcttgtcgaacatagagccgctttggaagctcgcagtcactgctttgaaacccctctccgcgttgtttaagtaactagagttgtatgactcagctgcttttgaattgtggagccgatattgaggctcagaatgaagttggacatacttctctaagaattgctcttcaaaaatgaaaatctcgatctttcaagtaaatttgtttatcttttaaactttgttgtgagtctttgtaaatgaaaaataacatgtttatgtcctcttgattgcagcttcttcttgaaagaggtgtcaatctgaatgcttttaatttttatttgcataaagcttttaagaaaccatctttataaatatagcccaaaggtatgttattatcaaaatggtgttggtgaacatgttgatgttgttacctcctcggatgtgtctctcgacatggatttaatcaaattttttttttaaattgtttttttaataaacttatggtacataaattaacagttgtatagtcttatcaaaatcacaaaaaaaaaaacgatgtagtaaaaatattaatagtaaaatctatcaagaattaataaaatattttgaaaacatacaaaattccaagagaaattatagcgggttgcaaaaatggatcaccacaaacaataatagcaaacgagaacaaaactcaaaacaatttaggtctctgaaacagtatatatactcatggccatctttccatcaaatcatccagaaaaaaaaaacgaaaaaaaacaaaaaaaaataataaaacaaaaaaaactttttatttttaaataaaaataaaataaaaaatgggatacacaaatgtgtccattttattaggcctgttgatggtctttgttacaccgatggtgttcgcagatgatgtgacaccaatcccagagggcaaaccccaagtggcgcagtggttcaatgccaacgttggtccattggctcaacgtaaaggcttagatcctgctcttgtagctgctgaggctgctccacgtatcatcaacgtactattcacacttattgtcttaaactcatcctttgtaccaatagattttgatacaatttttttgaaaaacatgtaaaaattattgcaggtgaatccaaagggtggtgaattcaaaacactaacggacgcaataaagagcgttcctgcagggaacacaaagcgggtgatcataaagatggctcctggtgaatacaaagagaaggtcactatcgacaggaacaaacccttcattacattgatgggacaacccaatgccatgcctgttatcacctatgacggtaccgccgccaagtatggaaccgttgatagcgcctctctcattatcttatccgactatttcatggccgttaacatcgtcgttaaggtaagtgatcctactatatatcatacatctatgtgactagtcgactatttcatggccgagtgatttatttttttgcatatgtagaacactgcgccggcaccagatggtaaaactaagggagcacaagctttatccatgagaatctccggaaattttgctgctttctacaactgcaaattctacggtttccaagacacaatctgtgacgatacaggaaaccatttcttcaaggattgttacgttgaaggaacattcgatttcatcttcggaagtggaacctctatgtacttggtacgtaacatctcatacttatttcttaatacataaagtgcgagatctctaatgcatgtttgagttcaaaagggaacacaattgcacgtggttggagacggtattagagtgatagcagcgcatgcaggaaagagcgcagaagagaagagtggatactctttcgtgcactgcaaggtgactggaaccggtggaggaatttatttgggaagagcatggatgagccaccctaaggttgtttatgcctacaccgagatgaccagcgttgtcaaccccaccggatggcaagaaaacaagactcccgcacatgacaagtaagtcccacttttcacattacataaaaaatcgtatgaatatcacccaatcggtccatgtcctttatgctgattatatcaaaaatgacagaaccgtgttctacggagagtacaagtgttcaggaccaggatcacacaaagccaagagagtaccattcacacaagacattgacgacaaagaagctaaccgtttcctatccctcggctacatccaaggatccaagtggcttctcccaccacccgctttgtaaactcttcaatatcaagtctaaaatcatattttgcacatatatcacttttaacaaaaaaattatttttacatatatcacttttagcaaactttttctttacctagtcgtcactacttacgaccctatgtatgcttttatgcaaagaaccgagaggtcgataatctgagaaacatataagcaatcgagacttagccgaaataaattgattttctctctcaaataaaagtataaatggtaccctatatttatgtagcttttctaaaatagccgaggttttatttaattatcaaaaaagtcttttaagtctaaaagtaaaactcggtcacgaccaaagtaaaaactacgaaacagtaccttttgtttatgtatacttacaaaagtatcccaaatgtatttaattatcaaaaaggtccgttttaattacaatcactgaataatcatctggtgttactctctctgctcacaaatg

SEQ ID NO: 31447 - DNA, 3003 bp, Unknown
  misc_feature (1)..( 3003): 2750-1469P.txt file - cDNA_ID_3042231; gDNA_ID_1972139; Annot_ID_179208
ttgaaccgcgggtctaatatggtagcgatggctagaaccaggtagtttttatcccagaaatcgtcaaatttctttctcatgtttacaactagagagctaatgaaatcatccgggttcttgctccactcaattaaccggaggtgtatgtcgcatacctctgggaagtacatattggcgggtaaacaactgctctttgtgaatgcatttatcacttcaacaaagactttcaagaactcaacaattgttcctaatctctcccattccaaatcagatggacataacacggaatcaggatcatgttcattcatgagcgaaaacgcgctcttttgctctaaagcattctccagcatggtgcatgttgagtcccatctcattgggtcatcgatgcataggttcctttcacttacagctcccgtttcaactatccactggttgaatctatcttgaatagattctgagcttttaacatatctaatactctctcgaataatgtttattgtgtcacaacaagcttccagggaatcttgaaccatctcgttaatgacattaactccacagctcacatcaaacaattggccgtaacagtaaaggaacttattctgcgataaccggtctctgattttactagctacgttctcactaaacggaggagcatgactcgacgccatagaaaacaacttccggtcaatatcccactccatcaaacacgtcattataacttcagcaagcatctcaccactatgagatggatcaaccataaagaagttcaaaactctctttttcaattcccatccttcatcaatataatgcgctgccaaacacaagaattcatcagaatcacccgaaccactccacacatcaacactaatactaatcttcccaggtaacttatccaacgcttcgaaaatcttatgcttctctttcgcataaatctccatacaatcagattcaactctttcaaaagcaacaagctcaaacaaaggctgtaaatttccaataaacattctgaatccaacatcttcaaccatactcaacggataaccatgtaagataatcatcctggctaaatcgaatcgacaccgcctctgatccaaacccatactcacaacattaacatcttcatgttcttctttctcatgttcatatctaacattcactacactaagcacttcttcatcctttatccgctcattagctaactctttcttcttccccttaacgaaatactgagcaacaccgttgttgttaccattagttctcctcctacatctaatcaaatggttcctcaaatgcgaagtcccgctcgcgcttgagccgctaagtcgcttcttacaatgcctgcagattgcaatgtatgtctcaccttttctaactctatcgaaatcattccacactactgatttcaatctaccagattttacaatcactgcatctgacaaatccatctcattgtttatcatcagtttcttctgtctcctacacatgtaaacaaatagcagaattttcaccagataattcgaattcaaacaacgaaaccaagttacacaaaacctaaaatctcatagtttccatttgcataaagcttttaagaaaccatcgaattgtcaagaaaaaaggttagaatctgagctctaaagcacatgtacctcttcattcaagtcgcagcggtaagcttctcactggtggtttaacggcggcgaagtctctcagtgtcggtggtcgcggcggtagggttttaagaagaggaagaaaaaaaagctgaaagcttttctgttagcgagagatatttttttgaaacggcgaacaaaaagtaaatttacgaaatgagaccttggattcatgtaactttagaaatatagcccaaagttagtttatcatcaaaattgtccttttttttaaatctaatattaaattatattcaaagaaaaataaacttttatacatgtaaatgcaaaagacttttcttaaaaattaaaagagatattatcgatggtgttatcttgtcaaagcaaaccacgtttggatcccgcctttgtatttctcacaactccctctccttgttgtccttaactggtttctaatgtttttgtctatcaaattgtactttttcgattgcttatgttcatataaacacacttctctccacgtcgcaaggtttgagcctgaacgtctgcgatatgttgttcatcttgtcgaacatagagccgctttggaagctcgcagtcactgctttgaaacccctctccgcgttgtttaagtaactagagttgtatgactcagctgcttttgaattgtggagccgatattgaggctcagaatgaagttggacatacttctctaagaattgctcttcaaaaatgaaaatctcgatctttcaagtaaatttgtttatcttttaaactttgttgtgagtctttgtaaatgaaaaataacatgtttatgtcctcttgattgcagcttcttcttgaaagaggtgtcaatctgaatgcttttaatttttatttgcataaagcttttaagaaaccatctttataaatatagcccaaaggtatgttattatcaaaatggtgttggtgaacatgttgatgttgttacctcctcggatgtgtctctcgacatggatttaatcaaattttttttttaaattgtttttttaataaacttatggtacataaattaacagttgtatagtcttatcaaaatcacaaaaaaaaaaacgatgtagtaaaaatattaatagtaaaatctatcaagaattaataaaatattttgaaaacatacaaaattccaagagaaattatagcgggttgcaaaaatggatcaccacaaacaataatagcaaacgagaacaaaactcaaaacaatttaggtctctgaaacagtatatatactcatggccatctttccatcaaatcatccagaaaaaaaaaacgaaaaaaaacaaaaaaaaataataaaacaaaaaaaactttttatttttaaataaaaataaaataaaaaatg

SEQ ID NO: 31448 - DNA, 3003 bp, Unknown
  misc_feature (1)..( 3003): 2750-1469P.txt file - cDNA_ID_3042246; gDNA_ID_1972140; Annot_ID_179273
gattttgatgaatgacatagagaaacgtatagatgataaaccttttcatgaccgatgggttcatcttgaagactccatctcagacgctatggatgttgataaagccaagaaagtgaagttcgctactaggctccggtataaggcggttctcgatggaggctaccacgtttttgatgagtccatgtataacagcagtgatctcagaccttcgtcgagaaagctctggaaaccagcaattggtgtcttggagctcgggatacttaacgcaaatgtgttccattcgatgaaaactcgggaagggaaaggtacttcggacacgtacgttgttgccaaatacggtcacaaatgggttcggtcacgaactgtgatcaacagcatgaatccaaagtacaatgagcaatacacatgggaggtttttgatcctgcaacggttttaaccatctgcgtctttgacaacgctcatttcgcagcaggagatggcggaaacaagagagatcagccgattgggaaagtccgcattagactctcgactcttcagacgggccgtgtgtacacgcatgcttaccctttacttgttctacaacctactggtcttaagaaaagaggagagcttcacttagcggtgagattcacctgcacatcggtctccagtatgctgatgaaatacacaaaacctctcctgcctaaaatgcattacatactacccttatccacaaaccaacaggaagctcttaagatgcaggctatcaacataattattgttcgtttaggccggtccgagccaccgctgagacgggaagtggttgactatttgacagattggaaaagtcagctgttcagcatgaggagaagcaaagccaacttcaataggttcacgacagtgttctccggtgcgctgtctgtttggaaatggatggaacaagtgtgcacatggaagactcccgtgacgacggctctggtgcacgtgctctacactatgcttgtgacgttcccggagatgattttgccgactgtgtttctgtatatggctgtgattgggatgtggaattacaggtttaagcctagatttcctcctcatatggacgccaaactatcttatgcagacaatgtaaattctgatgagcttgacgaagagtttgataccttcccgaccgtaagggctccggacattgtgaaaatgaggtaacaaaaatcaagaatgatcaaagaaaatcgaaaacgaagaaagacttggtcattggttgatagttttcctccctcatatttttcaggtacgaccggctgagatctgtggccgggaaggtacagtcggtggctggagacatagccgcacaaggagagcgagtgcaagcgttgctgagctggcgtgatccacgcgccaccgcaatattcgtgacgttctgtttcattattgccatggctctctacattaccccttttaaacttgtcgctctgttatccggttactacttcatgcgacatccaaagctccgacaccgcattccctccgctcccgtcaactttttccggcgacttccagccatgaccgactctatgctgtgaatcttcttctggatagagtaatcaacaaacatgccatgtatataactctcttctttgaatctgtatctatctatcgatatgcatctatatgtgttgacaatcatgcgttcgtgaactcgttctccgaattaacaatggtgatcgcaaacaaactctgatgatcaaatcaaataaattgcttccacactcgcaatgttgaaacagagaatctaaaagctcaaaacagagtcggttagatcctaacaaactctttaaaccttctccaattcgcaaccaaagctaaaccatcgcttccacaaaactaattggtcgataaccagcctaaacccggtttgatttaagctgaaccagatccgtgtgatcaatatataaaaagcccatgggccttgaacaaaacaacgtcacatcggtgattaacactgtttttagtgcttaattagttccctccctgattacaaaagtccgttagtgattacggcatgaagagacaacgggaaagaggaagaagcatatctctctctctgtcttgttctatgaacgagaccacttgctttaacaggcggtgctaattattttccagaaaataaaaaaccccaaaaatctgtacgacaaacaatttattaatcaactctttttttttctttctataaggttaatggccagattctttcttctctcacacccattaaaatatttcatcaacttgtcggtaaaattaattcttggcttattctatctttctttctctgtcttcttctttcaatttttcaataacaataatacagatgtgtatacattagatacacgtatactagtactaaacttcactgtgtgatctgatctagagtttttatactatcagaataaataatagtcgacaatttgggatttgtttatggtttacttcacatgaatcacatacgttcatgtcgattcctttgagatactgtctcgatttcgtttttttctcttgtttaatttaaaattattgtaaagcacgtggatttgcttgtcttggttttgttttctccttcgacctctttgatgaaatcgaggaacctacaatttcttcgtcgatccaaatggtagcttagtggtggtgataataggtttctcctcttgattggctccagctttaggtttttttttttatctttgtttctgcttcgattcccaaaatttaccctttcgattttgagtctaactagtcgagttgactcagtagagtcgaaaggtacgaccttttttctctacttcactgattttgaaactattgaagatttgatttggtaagatcattcattggctgtataattttattgcagcttctgggtttacgaagagacatctcctaattgaaacaaaacctttcctttccattgggctgagaaaaaagcaagagtctttgaatattttttggagcgtggttttatttagatg

SEQ ID NO: 31449 - DNA, 3000 bp, Unknown; identical to SEQ ID NO: 9530
  misc_feature (1)..( 3000): 2750-1469P.txt file - cDNA_ID_3042254; gDNA_ID_1972140; Annot_ID_179255

SEQ ID NO: 31450 - DNA, 3000 bp, Unknown
  misc_feature (1)..( 3000): 2750-1469P.txt file - cDNA_ID_3042258; gDNA_ID_1972140; Annot_ID_179254
gggcttaggagaccttggagtacagggaattgggattcctattggaaagctcgacatgtatgtcgctgctgcaggaatcaatccacagagagtatgttgatctccacatgatcttgtgtgtgtttttttgtttgctgtacctaactaaggtttcacctccttattcaaaattatacgcttgttcctctgcaggttttgccaattatgttggatgtaggcacaaataatgaaaagctcctacagaatgatctctgtaagctgtgaacttaattggtccatgtggtgtacatgtgtttccctaatatctcattcgtctgtctttccctttgtacagatttaggagtcagacaacctaggttggaaggagaggagtaccttgagattattgatgaatttatggaagctgcatttacacgttggccaaaggccgtcgtacaggtatatatctcttactatcttctttagatttacctttcggttggaaggatgactaaatgattcattccatcattttagttcgaagatttccaagcgaaatgggctttcggaacattggaaagatatcggaagaaattttgcatgttcaatgatgatgtccaggtatgctcacaattttgcaatccagctgccttcctttttagctacttcttgtatgtatctttttcaaaaataataataataaggtttgtgtatgagttatcagggaactgctggtgttgcactggctggactattgggaactgtaagagctcaaggtcggccgatatccgactttgtgaaccaaaagattgttgtggtgggagctggaaggtacttggatattcacttgaaatccttttcttctgtatttatatatttacattaactttcttctcatcttctcattgtatatttcttttattactttcagtgctgggcttggtgtaactaagatggcagtacaggcagttgccagaatggcaggtatcagcgagagtgaagcaacaaaaaacttttacctgatagataaagatgtaagtttttgttttttcactacttgacttcagctgaatcggtttgtcttgcttgataataacaattaagcttgcgtagttccacggggcagttgactttgaaactgtcatattattgtaatgtttagtgcttgcttttggatgttggtttaatcaatccagtaagagcttacctagaaaaagtcagaaaacgtttttaaagttatccaaaagcctttctgttcttgcattggtcaacatattgttttctcatctgtttgcctcataagatcgtgctccttcgaatatttaatgaaaacgacttgatttgtacttcagggtcttgtcaccacggagaggacaaaacttgacccaggagctgtactttttgccaaaaatccagctgagatacgcgagggagcaagtatcgttgaagtggtaagcctaagccttattattgcgttcttacttgccttggccaatattaaactttgacttaatgtgctttctctactacatcctaaagcaacacaggataaccatatttttttactgtccccaaaagttagacataatcatatgataatatttctgtctaaatataatatgtcttcaggtgaagaaagtgaggccacatgttcttcttggtttatctggagttggtggtatctttaatgaagaagtatgtgactttcttagacaacaaatagtttcaagaagtatgaattttaactgttttacttatatcgttaactggtttcaatcatcaaaggttctcaaggcgatgcgagaatctgactcatgcaagcctgccatttttgccatgtcgaatcccactttgaatggtttgtgtgtttttagcttagcaaagtaatgttgttccatctttgaaaaatctgccctgaacatcttttcgtgtgacagccgagtgcactgctgctgatgctttcaaacacgccggaggaaacattgtctttgcaagtggaagtccatttgagaacgttgaacttggtatgttatggtgggattcattgatggtctttgtatctaatttgctataatctaagaataatcacattttcttgtcccactcgcagagaatggtaaagtaggacatgtgaatcaggctaacaacatgtatttattcccggggttcgttttctttcttgaaaactgttgaactgtattgcatttcaatccatagatatagttcactgtgttgcatttcaatccatagatatagttatcagaattaatttggtcattatcgtttccaggatcgggctagggactcttctctctggtgcacgtatcgtaactgatggaatgctacaagcagcttctgaatggtaataatgattgcgttttgttctcttcaaattttaaaaatgagcttatgacaatgctgacgattaacatattcaaacatacacagccttgcgtcctacatgaccgatgaagaagtccaaaaaggcatcctttacccttcaatcaacaagtaattcctctaaatccctctcattcttatccgttgattatattttagtatattaaaactgttatctgaagcaattggtttctgaaaaaattgcagcatccgacacataacagctgaagtcggggcagctgttctacgagctgcggtgactgatgacattgcagaaggacatggtgatgttggtcccaaagatctcagccacatgtctaaggtatgaatcaagtaactgagagatatatttgtatcagaacatgtataaggtaatttagaaaatggaatctaattgcttcatttaatgccaccaacaggaggatacagtgaattacattacacgcaacatgtggttccctgtttacagccctctcgttcacgagaaatagacaacaactctatataactcttctcaggtttcatagaaagccaaaagacaaaaaatcttcgcttcatcttttatttgtgatcaacattctttttttcttcaaaatgtgatatgttttaagaaaaacaatg

SEQ ID NO: 31451 - DNA, 3000 bp, Unknown; identical to SEQ ID NO: 9529
  misc_feature (1)..( 3000): 2750-1469P.txt file - cDNA_ID_3042262; gDNA_ID_1972140; Annot_ID_179253

SEQ ID NO: 31452 - DNA, 3003 bp, Unknown
  misc_feature (1)..( 3003): 2750-1469P.txt file - cDNA_ID_3042280; gDNA_ID_1972143; Annot_ID_179311
gacagcatgtggcacgcccgacaattctttttaagagtgcacccataacatatatgttcttatgctatcaaacaacccacaaggaacctgaagatgataactacttgatagagatgatatgacttcaatcaatctcgatcgggttcggttaagggcactaatagataacctgctatatgggagtgtgaagaccattaattggtttttcacatatatatgactgaagaaatcagccgtaaccaaatattagtgtttttgcatcagttggggccttgggggtcaattatggagtggaataatacatgaaaacttgaatggtcgcatgcagagcagaggtagcctttaaattaaagcacacatcaaaatgtagtgcaatgttgcgaacttttattcaactaaacaatttaacactcgatctttgtgcgccaatacctctgcacaacaaacaatttaatctcatcaatatgatccgattttgaagaaccaccttcttcttcagtgacttctctggctaccttccattaactgtcgctgtcataacgacgtggaagttaacttaattgacttttaaaagattaatgatgctgtatattggtcttaaaatggcacaaaaggttccgtctaggctttgtgtttcactttaagtctataacttaaaaaaaaaaaactactaatttagcaccaaataatatcataaccattttattataaatgactataattaacgtagaattggaattggtcagttggtctcgagataataatttagctccaacgaatcggacatatctatgcttttatgtttttttttgggtataagaatttgttattaattcttataccaaaattatagatatgatattgttttattttaaaacaaaataaataatatatatatgaatggtttgatctgatattggttacggttaggatacaaattttaatcctgataccatagaggttttattagttcaattttctttccgtttgtttatgctcaacttcagattcgttgtcttgcaatattaagatatggttcaattattgagatatcatttcagttacgttcgcatccgatttgtttaaggtaattgtaatgttttaatgatcacttttatttgaattctgaaaattgaagttttaaagatattttttaaataatcgatttcaacaaaatagaaagaattgtaatacatattttttttatcataatatgaattttatatttaatagaaagtttcgattatgcatttaatttcatacaattgacttttcgactgttcattttttttaattttattttacaacgacttttagacacttcttagcacgaaagaactaaacgcaacatgtgctttgtaattaaacgtcgaatgaatatgaattatatttgacctaggattacgaatgatgtcgatctggagtaataatttagaaccgaacgacgacttcgaaatattacaattgacttatagaatagatctcgacgtagattggtcttaaaataataattaagcaccaaagaactggagatggctttatgtgctctgtgttttaaagcggattaataaggacttttaattcgattggggaaaatagaagaaagcagaagtgataaatggaggaccctttgttgactcagagtgagcacatcgtcgatgacgttacaatccatggcgattcttcttcaaatgaagagcacatcgtcgacgttacaaccaatggcaatccttcatcagctgatgagaaaagaccgcatgagggtgtccaatggagtgatatatttacatttaccactgtttgtattttggtcgagtttgttgtggctttagtccagattgttgccgccattgttgttctgactctggcaaaagatgaacaacctccacaaaaaatgtttcctacactgatcctcagttataccggttgctgtattgccacactccctattctaggtttgcgtttctggcattcttaccgaagtgttagcacagagacaaggtataaactataatttgtatgttaattatttgttttaaaggcattagaaaccgaaaccgatatagtggttttattgatttgcagaatctacgaggtggtggacattttgaaaaagatgcttgaatatttcttcgtgggttgggttgtggtgcttttatggcatcttatcaacaactcatcatctatagataatactacgcaacagttctggtgcgcatcagaagaaaattataactatatattcgtgtcccgaaaacagactaaattaacgaagtctctctaataataccaccctgcattttccttttgcaggttatgtatgactttccttgctatcagctgcattctacatgttcttcgtaatctcccctgtgcgggagtttgttttctgtatcctatgatactatatctttcccaatcgatagacttcgttggtgacattactgatgagataaatttgactacgtctataatcctattatgctttggaatctttgcctgcattatctgtggttgttgttccagatgcttatgcagataaaaagaagaatgatcatgtcgctttcttctttcttttgtttaaaatgttgtaatactctatttatttatcaaataaagccaagtgtcacgattgaatcctatatatcttcctgaaattgttggtataaaagaacaatttagcgccagcgaattggaaaggtctatgttttgtgtttcaaattcaataaacaaaagcgactttatataattggttttggtgtagttggtcttaaaataataatttcaccaaataatttgaaacagtcaatgctttgtgtttcattgtagaatatactataatttagcaccaagtagttcaatagttatttcattgtaggaataccataattgacttaggaatggtcttggcgtctaatttgaaaggtctatatatgctttgtgttgcaacgcagattttgattgaatccaagagaagtagaagaaaatcataagtgattaatg

SEQ ID NO: 31453 - DNA, 3000 bp, Unknown; identical to SEQ ID NO: 9547
  misc_feature (1)..( 3000): 2750-1469P.txt file - cDNA_ID_3042299; gDNA_ID_1972144; Annot_ID_179347

SEQ ID NO: 31454 - DNA, 108 bp, Unknown; identical to SEQ ID NO: 351
  misc_feature (1)..( 108): 2750-1469P.txt file - cDNA_ID_3042299; gDNA_ID_1564216; Annot_ID_149056

SEQ ID NO: 31455 - DNA, 3000 bp, Unknown; identical to SEQ ID NO: 9545
  misc_feature (1)..( 3000): 2750-1469P.txt file - cDNA_ID_3042311; gDNA_ID_1972144; Annot_ID_179334

SEQ ID NO: 31456 - DNA, 3003 bp, Unknown
  misc_feature (1)..( 3003): 2750-1469P.txt file - cDNA_ID_3042319; gDNA_ID_1972144; Annot_ID_179324
ttttttttgccgttagtgtacgctaaatcatagacctcttcgtggttataaagaaagaaacttaatttgtctcgaatttgagtttggatgcgacgttttacgtactagttttataaaagtaaatgttatagaccttgaatttcaaagtggaatgtattttacacacacaattgatacaccaacaattgtggaagcaaggatatagagtatcgatctttaatggagaagaatatatccttaaagtaatcattactttttaattacggcggaaagagaatagttaaatttacggcgaaaagaatgttcattaatcaattgatgacgttcgtttataatttcaaataagatcgaaaataacaggtgaacaaagaaaaaatagacattaaaaatagtaagatcgaaaatacaacccttaaaaatctcacgaaatcaatgagagaaacaattttgagatacggtcaacgtttggtctcctttaggaaagtacacgcataagatcgaacgtgtcgattcttattgctcgttcccaaaatcgacatgctctcggaccgctacattccaaatagtctgacgtaagcaatgacaaaactcacctacattacagtctgccacgtgtccctctccatctacttcaaatgaatcctccactatacagatttaaccatttttctatttttgtttgagattcctttccaccaacacaaagcccctgtctatccgccatgtgtccacgacctttcttatatatatagtcatctttcttctttgctcgagagaagtttcaactttcaaacatatctttacagttctttcttgctaaacaacaataaaggggaaaataggttaattatgatgaaatctggggctgatttgcaatttccaccaggatttagatttcatcctacggatgaggagctagtcctcatgtatctctgtcgtaaatgcgcgtcgcagccgatccctgctccgattatcaccgaactcgatttgtaccgatatgatccttgggaccttcccggtacgtttctttcttttcccctttaaatcacactatacactaacagtaacaggattctataaaatcggtctaagaattaataaaccggtttacaatttacagacatggctttgtacggtgaaaaggagtggtattttttctcaccaagagatcgaaagtatccaaacggttcaagacccaaccgtgcagctggtactggatattggaaagctaccggagctgataaaccaataggtcgtcctaaaccggttggtattaagaaggctctagtgttttactcgggaaaacctccaaatggagagaaaaccaattggattatgcacgaataccggctcgctgacgttgaccggtcggttcgtaagaaaaacagtctaagagtgagtgaatttatcagttcaaaccgaactttgaatatgattttgaatcggtttagttaaccggacgtgtttttgatattcttgaacagttggacgattgggtattgtgtcgtatatataacaagaaaggtgtcatcgagaagcgacgaagcgatatcgaggacgggttaaagcctgtgactgacacgtgtccaccggaatctgtggcgagattgatctccggctcggagcaagcggtgtcaccggaattcacgtgtagcaacggtcggttgagtaatgcccttgattttccgtttaattacgtagatgccatcgccgataacgagattgtgtcacggctattgggcgggaatcagatgtggtcgacgacgcttgatccacttgtggttaggcagggaactttctgagttgtcacgtgcgattagagttagtggaaagtggaaactatcactgtctgttttcgcacgtgtcgggtagccgtcttgaaacccgctagctgatccagaagtgacctcattgggcttttcaacaacaattgggccttagcctttcttctcccttagtaagacaagctactgtattgtgttgttattttcaggaagcaatataaattcattttaatcacttatatattctttacatttttttttcactcaaaactacaatctagcttcttctttttttttttttttttttgttatggttgtactacaatctagctttgttatatatatatataagttaaaaatagtaactaaattacaaactaaaataaaataaagaaattggaagatatcactagtgtttggggtattagggagggaggggagctcgagatccgattttactgactgcatggtatcgaaaaagtgtcggtaatggtagggtctgacagataacagtcttatcgttgcaacttgcattcaaacaaatctcattgttcgctttaatttctaattaatttgtttttgtcttttgtatatttatttgattttgacacgagtttgtctttcctaataagaccgaggcatgattagtttaaccggtttgaattgtttaggttaaatcggagtccaagtcaaatacatcgctatctaacgaaaacgacgactgaaatttcgtaaagttccttactataaaactgatctaactatcttctacaagaacaatataataaatttgatgcattatgaattcacaagttttaaatctttatgattttgtagctcatgaaattgaatgatgtttcttttattatcacatgtcattaaataaaaatagttatgagtagatgacataaatactatttcaaataaatttatcctccatctaattgttatgagatgattatttcctataacatggtatctactatatggccgtctaaattaagtatcaacgtttaaactgcgcaatgctcaagttttcataagatgtgatttgttagaggttaattaagaaacttgcgagtgtatatgtggtctctaatctatattttaatctataaaaagggaagtgaaaatcaagattaaaagcttggatgtcatagtataaaagaatagtaaagtaaggggaccagacatatttgttgcgaactggaaaaaaatg

SEQ ID NO: 31457 - DNA, 3003 bp, Unknown
  misc_feature (1)..( 3003): 2750-1469P.txt file - cDNA_ID_3042323; gDNA_ID_1972144; Annot_ID_179323
atggattctattggagccaagtatgctcgctttcttcattacttaagacgttatatctcatttttcgtctgtaatgccatttaatttacttagtcagtgactgtaatcgtgaaacttgctaggtcagctagaaaatgatcgtggattgatattttggttttagttggaatctaattttggtcttttgtcatccaatgcagtgtatgcatgtcatatgagtgaacttattttacatgtgttgagctgatttaaatatgattcttaatatagttgagattttaccgaacatgatagttgcaatggtgagcatgccttgacgcttgttctctctaaatgcagggagttagctaaagattttgttgtctcgggaactgcttcagaatctctatatggtgcctgtgaagccatgttcaaaccagatatggtatgtgccttctgaaaacttgtttttgtaccgattcactggatactcaaatgtgtgtttatcacctgaaaatttggtaggatcattcatatgtaagtattctattgtagaatcttgatctggtaggaatatttgtgtgcatagtgctggtgatatatgacgtaactccaataattttctctgtatattttaatttggcttaggattaagatgtttcaatattgcgattacttccctgccatagtactgcttcgataaagtttgaatttcaaggtcatcattctaagaagtgcattgtaaacagactcgtgatgaaatgaaaagcatataactagacttaacaaatttgagtttcaggaagctgaggaactattcgagacaatttcacaagcacttctctcttcagttgaccgcgattgtcttagtgggtggggaggacatgtctacgttgtgtaagttttgttctcctcatcttcttcttcttcttcttcttctttttttctgtcacatctggcttcttacagaatatacctcatgtgcacttatcttctaaggatatgtattatataagatagtaacattctttcatggtcatgttgtccagaacaccaaaggaggtgaaggagagaatcctgaagggaaggatggattgatctgatatcacatatctgcttttgtccaagttcggtatactccttaacccggttatgtagaagctctcgtcccatagtaactatgttccttctctgaaactggatattgtggttcgttctctcggatgttttatttgctattgatagagttcaatgaaaatgaagaaatagcagttgttatcttgttccagtactcgatcattctatgtaccttgttgtttctgttttaatttcgtaccaagtgttccagatttctggtttgtcgcagtctttagttttcaaggttggtactgatcagtgacacgttttgttgtttgtcttcttagtgttcatgttcgattcactatgggtgactttagaaagacgttaacatgtcaacgaaatattttggtcaactatcaataaacatggtttggctaacgaaatcatacaataactatgaaatcaatgtaatttggaaggtgatcactagtaactgcaaatagaaacgaatcaaactattatgatgatgatcctgatgctgccatctgacattgtgaatgattttgcatgtcctgttctgtttgtggcgttagatcgagccagagaggcaaaatccatacgcataagcgttttgatgatttcatataaaacgtggcatgtgcaatagatgtggtcgttacacgaatataaacccaatcctgccgacctaactaatctcggtgggtattcatatactacctgtgtgggcaaagcatataaaggttctacttgggcaatcattatcgatgctcgtaaattcatgcgtctaatcattttgattatgaaccatccacatcatgtcacgtgtctaaactcttcggtcacttttgagctttttatcaaattcaacccgccacaataaaaagcggcagaactaacattccggctccacgtggcatagatcgaagcgtttatctattaggtggcacaggcggctcgagatgacgttcttgtggactccattagagaaaatgacagaattaagtgggcattagcataagttgataactatgaggtgctttttaaaaagaaaactaacagctgcgattctgtttttttttgccgttagtgtacgctaaatcatagacctcttcgtggttataaagaaagaaacttaatttgtctcgaatttgagtttggatgcgacgttttacgtactagttttataaaagtaaatgttatagaccttgaatttcaaagtggaatgtattttacacacacaattgatacaccaacaattgtggaagcaaggatatagagtatcgatctttaatggagaagaatatatccttaaagtaatcattactttttaattacggcggaaagagaatagttaaatttacggcgaaaagaatgttcattaatcaattgatgacgttcgtttataatttcaaataagatcgaaaataacaggtgaacaaagaaaaaatagacattaaaaatagtaagatcgaaaatacaacccttaaaaatctcacgaaatcaatgagagaaacaattttgagatacggtcaacgtttggtctcctttaggaaagtacacgcataagatcgaacgtgtcgattcttattgctcgttcccaaaatcgacatgctctcggaccgctacattccaaatagtctgacgtaagcaatgacaaaactcacctacattacagtctgccacgtgtccctctccatctacttcaaatgaatcctccactatacagatttaaccatttttctatttttgtttgagattcctttccaccaacacaaagcccctgtctatccgccatgtgtccacgacctttcttatatatatagtcatctttcttctttgctcgagagaagtttcaactttcaaacatatctttacagttctttcttgctaaacaacaataaaggggaaaataggttaattatg

SEQ ID NO: 31458 - DNA, 3003 bp, Unknown
  misc_feature (1)..( 3003): 2750-1469P.txt file - cDNA_ID_3042343; gDNA_ID_1972144; Annot_ID_179329
aaccttagagaaactgtatgcgtgggaaaagaaactgtacaaggaagtcaaggtattaatatttttaatatttgatgcagctttgtgtttctgaatcactaatgggaatctatatcacatatagattcttgcgtgatgttaaattgtgatttgcgtgtgatggcaggacgaagaaaagcttcgtgctatctatgaagagaagtgcaggagactaaaaaaaatggatagtcatggagcagaatctatcaagatcgatgctactcgggcagccattaggaagcttctgaccaaaatcgatgtttgtataagatcagttgattcgatttccagcagaatccataaacttagagatgaagagttgcagccacagttgatacagttaattcacgggtaaatcatctctctatattttgacatctttttacagattaagctgaaaaaactgatattttgtgttttgaaggttgataagaatgtggaggtcaatgctgaggtgccaccagaaacagtttcaggcgatcagggagagcaaggttcgatctctaaaggcgaacacaaccttacaaaatgactctggctctacagcaattcttgatcttgagatagagcttagagaatggtgcatcagcttcaacaactgggtcaacacccagaaatcatacgtccagttcctaagcggatggctcacgaaatgccttcactatgaacccgaggcaaccgatgacggaatcgctcctttctctcctagccagatcggtgcaccgcccatctttatcatttgcaaagattggcaagaagcaatgtgtagaatatctggagagaatgtgaccaatgcaatgcaaggttttgcttcaagcctacacgagctatgggagaagcaagaagaagagcaaagggtaaaagcgcaatctgagcagcgagatgcagagtcagagagaagtgtggtttcgaaaggtcggtcagagagcgggatatcagctttggatgatttgaaagtggatttagattcaatgaggaagaggctagtcgaggagagaggtaagggtaaagaaaccattaagcttgtgaacaacgcgtcttcgagcagcttaaaagctggtttagttcccattttcggggcactgagaaaattcacatcagaagttgtgaaagctcatgaaattgttaggcttcaacatcctcagacctcttcttgagtagagagtgtggacttaccacatttttgcaccgttttgaagttttgttacttgcaaattagacataggtctatatagaaggaaattgttgtatagatgagttcatattcaattattggttggttagtttcccttgtaaaccgtttttaaatggtgaagaagaagatatctagtttgccttgtaagccgttacttgctgaattaaaaagaatgtaatatgactgttcctggttgagattaaaaggaaaataggataaagctatgtggaatagattagagagtatggttaggcatgatctatgtctataagactataatagagtatctataatggctagaacttaaactaagaacgattatgatgaattgtcaactattggatcagttttggaagaagaaaagaaaaattacatatacagtaaaacctttataaattaataatgtttggactgcaaaattttattaatttatagaggtattaatttatcgataaattaataaatattaatttatagagagattttcttaatttagtaactttttaaaaaactttatgagattttttcattatagaaaatatatttctagaaccagttacaagtataacataataataatgactagaaaacaataccaaaaattttgatacactaaaatatgaaaactatagtcaaacaaagaacaaatatgaatttaagcaaaaaattattataaatatattttacagaatttttttacatataatatatatatatatttgatatatttatacaattattaatttataatataaatgggaccatatatttacatagaattttcaaaaaaattattatcttattaatttatcgatttgtgtaactttttacactggtcccaacttgggaccggaagaatttattaatttacagaggttattaatttatagagtattaatttatgaggttctactgtaaactactgtgacatttttcataacttaacttggaaaaaaatatgaaatttagatatgaaaaatcacaaattcacaacaaggtaaatagtttcaaactatgcacaatgttgcaggcgatagtttcaaactcttgacaagttgacatgcataaactacaaaactatcaaagatttctcatgttttggattcgtatttagtagttttatgcattttgttcattatcacacaacttaataaatcatcagtgtaggtacaattacaaagacaatagtctagaacttaaaaatcatttttacaagtgcagaaatgggctatgttgccatatggcttcacaatgtcaaaacgggagagatactatggttaggcatgatctatggtttagggttatcaatactggctaattatgtatcaaagtcaaaccaccatggctttcatttttttttggtcagttattttttttaaaatgcacattacattattatgttgactcagcaggatataataatgagaaaatctaatgctatttaaaatagagaaaaattaagaaataactttctcctaattgtgattttcttttcaatggttgattatggaagtaaatattgaaatatcaataaccgctgtgggtcaaagagtcaatgacaattattacttgcccaaaagttaatgaaaaaccaatgacgaggtttatccaatgaaaactctccacgtgtatgtatgaccagtaatcatccagcgatttcgtaatttccagtgtaagaaatgcgctcataaatatcatcttctctattgagaagaagaagaagaattcacaagaagaatattcacagagaagagagagcgataataatg

SEQ ID NO: 31459 - DNA, 3003 bp, Unknown
  misc_feature (1)..( 3003): 2750-1469P.txt file - cDNA_ID_3042374; gDNA_ID_1972148; Annot_ID_179386
tggcttcttcttcctcaaattttattttcctagttttctcgctttttcttcggcaacaaacaacagcttttatttaatgttttttactaacaagtctacacgacctaagtacagatgagattattacttttttttatcaccgtttatattataatgacaaaacagctacatatcaataaagaattgacatctgaaaaattgcatattatctgaaattatataatagaaatattattttataaactctgttgatatgttagaagtttttgcgatattaatatacgtatagagctttttattgtttaaagtttttatccagaaagaaagtttaaattctgctagttggttcaaaaatgcacattcacaaaaatatagcatgcgatattagaatactgaatacactatcaatctatgattgatcagattatcagaatatgcttctgagcttctctgtttgctagagaatatgctttttaggctttaagtgaaaaacaacttgttctttaagccggcgtggacgtaaaattccaagagaatatccaaaatatgttctacaattgaagtatttaacaacatgagtttacatatatatagactctacactagggcttaactactgactagttacaattatagccttagcctatacttctcttttgcaagtctttggctttgttttggtgagtttcgactgtttactgctttgcaggtttatgaagcctctgggaggcagcagtgttcatctcaggttctgaacacacaccagagtgagcaagtgacggttcgcttgtaattgagtaggaaatcagtcgatattcttttgagtcactcgggttagaagtaggtttttgtgaaggataactcttggtattttggtatattcttcctgtaatatgttattatctatttcaagtttttctagtttatgatgcttttgtatgttaacattgtgtattttgtgttttgggaccaggaaatgatctgtttcgaaacagagcatttaacagacaaaagaaacacaactgtgaacagtttaaatacttgacttgttgatataatcctgattaggtgacttggcatattggttcaacttctacctccaactatatataatagccagcttcgaaaatccagtgagttttggaaagcaaaaacagctcataatttcgccctcgagaaaaggcaccagctttggatttcgaaggttaagagcttgtctagaaaatcactgccccgggttatttgtgattttaggtgttatttgtgattgaaagacagcatcatccagcaatgggaaccccatttgggagaagcaagtagaggatacacaacatattcagccactaaagagaaaaatctaacatggtggcatttttgaaagcaaacatcataagtttattcagaagcataaatgaaacaaagggcaactaaagagaaacagaaagaaaatattaactggcatggagaaaccatcgagcatccataagagacatgtcgtcaggaacaggaaagcgtttgagggtcttggttacaagattgaagacacagatgtcaaggtcacgaggtgacaattggcagggacggtagtgacgggtgaaatagatggagtctggttcgataccaagggtatcattagcaggcatagtgaaacccaagtcaagaagcagggcctcaccaccaagagaatcaacctcaagaacagtgtggcaggcgtaatctgggagttctacattaggatcatacttgtagacgcggaagcagtccctctgccatggattactctcaaccaacaaaacctctccagaggttgtaacagcaatgctagaatcccacgagtgataacgagaaagcattgagaatggtttattaccctcggtgatgtccttgaagaaaccttgcggtccagacagatctaggactttaacaaaacgacgacttgtcgagatataaagagagtaacgccccagtaccatataagataagccatccaaaaagtgggcgtctcggaaaaacagaggaatgtcagtgtaatgagtgtcccctttcttgcaaaagcttatataagagtggccagggaggtcgaagaaccacaccacaacgtaatctgttccactctcgtctacccacaaaaggcccctcacagtatcacaagtcagatcagtggcaacacgggcactatattccgggccattatattccctttcaaatactctatctcccacacgcctgaccttactagtatctgacgcaatcgactctagagacggaagaggggatcgttttctcgctaaagacatctatgataactaaattggatccagaatctaacaacaataaccagtaacccgagtttgccaggattcgagaccctggaaagtctcgcagttccctatggatcttctttccttcttttgggttgtacagcacacaaccaccgtctttcggtaaaagcatcagccatggagatccgcctttctggggtaacgtttccgacgagctacagggtcgtttgactgaagaagaagatacattcattatcaggcgcaagggttctcgcgtttgtggcctgagattgagggaggcgtgtcaccttctgtctgtagaagatactaaaactgggaagaaagattgtttcttttgatattgatccgttctcttcttaacgattacatgaggcatagctccttatttatactaaagttaagcccttgtaaaaccctagttaacattacacatgtcatcatctagttaccataaatctattctttgttcattgtacctcttttgcttgtgacaatcttcctcttttgcttgtgtaataggctaagggtattaaatttaatgtttatttttgtataagagaataattaaagcgttttttaatcaaaaaaattaaacacctaaagccgcatcaccagcgttgaccaacgttccggtcaatcgaattcggtattagggtttaaacccaaccgtcccccatttctccaccgcgcttagctaatg

SEQ ID NO: 31460 - DNA, 3003 bp, Unknown
  misc_feature (1)..( 3003): 2750-1469P.txt file - cDNA_ID_3042374; gDNA_ID_1971795; Annot_ID_175642
agatatctttggactaaacaaattttaaacgatttcttagtttatcaatatgttaaaacataatattgttgaaaatgaaaaatgagatagtagtgaatatgttttaaaatacaagaaagtaagataaatttgtaagaaaatatgctgatgtaaaaaaaattgtgccctaggttaaaataggttctagatctgcccctggttaggtagttatatagacaataatggtgtataaataaatcatgtcatgtcttttaggtgttcttgaatctatgtgtatgtcatttcctcataagcacccttagattccagatatatcttttggcctgattagtaataactcatttgtggagaaataaaaaaagtattagcaagtccatcttttgtccattttatttttgaagaaagatattttgagcattgcaaagaagttccacttttgtcttgccacaacaaaattcttctcattctttgtttcaaaagccatattcatatgagacatttgaaccgattctaaataaggctgtattatcgagttttatgaaaacatgaaaaaaaaaaaagaggactgagaaactttaggaccggtgtcattatgtgacagacaagagagaaaactcgtttaataaaaaaaaagtctcgacaaatcctatttataaaccttcaaaccccaaattaagtcatgtatattaacacaatcattctatttatattaaaagaccgcgggtatcatcttttcctgtaaaatgatttcgactttagttcccacaccgcaaaacaatatggttcatagttccaactacgcaatcttcttaccttccaagattcaattttctgaaaacaagatcattgctctaatcaaaccctgaaatagagtttaaactataaagcaattaatgtttctaaactagtagtagtgaactaatgagctatgaaatttgtggatatggttgtaatcaatcccctgaaatagagagtagaaagcatcaaagtgttctaaactagtagtgaactatgcatttctttttagcaaaagacaggggttcatagttccaactacaaaatcttatcttccaagtaaacaagatcatggctctaatcaaagccctgaaattaagtagtagtgagctaatgcaattacttcctggcaaaaccagatttgagtcaaatgatcttctcattctctctcaatgagaagcaaactagttatcttgtcattctctctgaataaacgttttgtttatctgaagttgatgtaaatgactttggaagcttggttttaaaagaaacaaaaatgaaaataaataacatcagagctctccaccactccctacgtttcgatgtaaacaataatatgttatacttaataatacagagaaacctaacactgagaaattagtcaacatgataatatttttattcagaagcataaatgaaaccgaaaaagcaagaatttaattggcatggagaaaccatcgagcatccataagagacatgtcgtcaagagcaggaaagcgtttgagggtctttgttacaagattgaacacacagatgtcaaggtcacgaggtctgcattggcagggacggtagtgacgggtgaaatagatggagtctggttcgataccaagggtttcgttagcaggtatagtgaaacccaagtcaagaagcagggcctcaccaccaagagaatcaacctcaagaacagtgtggcaggcgtaatctgggagttctacattaggatcatacttgtagacgcggaagcagtccctctgccatggattactctcaaccaacaaaacctctccagaggttgtaacagcaatgctagaatcccacgagtgataacgagaaagcattgagaatggtttattaccctcggtgatgtccttgaagaaaccttgcggtccagacagatctaggactttaacaaaacgacgacttgtcgagatataaagagagtaacgccccagtaccatataagataagccatccaaaaagtgggcgtctcggaaaaacagaggaatgtcagtgtaatgagtgtcccctttcttgcaaaagcttatataagagtggccagggaggtcgaagaaccacaccacaacgtaatctgttccactctcgtctacccacaaaaggcccctcacagtatcacaagtcagatcagtggcaacacgggcactatattccgggccattatattccctttcaaatactctatctcccacacgcctgaccttactagtatctgacgcaatcgactctagagacggaagaggggatcgttttctcgctaaagacatctatgataactaaattggatccagaatctaacaacaataaccagtaacccgagtttgccaggattcgagaccctggaaagtctcgcagttccctatggatcttctttccttcttttgggttgtacagcacacaaccaccgtctttcggtaaaagcatcagccatggagatccgcctttctggggtaacgtttccgacgagctacagggtcgtttgactgaagaagaagatacattcattatcaggcgcaagggttctcgcgtttgtggcctgagattgagggaggcgtgtcaccttctgtctgtagaagatactaaaactgggaagaaagattgtttcttttgatattgatccgttctcttcttaacgattacatgaggcatagctccttatttatactaaagttaagcccttgtaaaaccctagttaacattacacatgtcatcatctagttaccataaatctattctttgttcattgtacctcttttgcttgtgacaatcttcctcttttgcttgtgtaataggctaagggtattaaatttaatgtttatttttgtataagagaataattaaagcgttttttaatcaaaaaaattaaacacctaaagccgcatcaccagcgttgaccaacgttccggtcaatcgaattcggtattagggtttaaacccaaccgtcccccatttctccaccgcgcttagctaatg

SEQ ID NO: 31461 - DNA, 3003 bp, Unknown
  misc_feature (1)..( 3003): 2750-1469P.txt file - cDNA_ID_3042381; gDNA_ID_1972148; Annot_ID_179378
actactgttgttgaacgacaaaacacagaagaaagttttgtgtctgatgatgatgatgaggaggattctgatataaatgtacttgagaggtatcaagatttattggctgtcttaaacgaagaggagggtttggagaaaaaatgcaaggttgtagaaaaaatcaggctattgctgaaggatgatgaagaggccaggatcttcatgggagccaacgggtttgttgaagccttgttgcgattcttaggatcagctgtagatgataacaatgctgcagctcaggatagtggagctatggctctgttcaatttagccgtcaacaacaacaggttagtacctcttgttgatgttggtaatacaataatagattgtgactttctcattactttttgtgttctcaaggaacaaagagttgatgttaacttctggggtgattcggctgctggagaaaatgatttcttctgctgagtcccatggttcagcaaccgcgctttatctgaacctttcctgtctcgatgaagcaaagtccgtgataggttcaagccaagcagtacctttccttgtccaacttcttcagaaggaaatcgaaacccaatgcaagctcgatgctcttcacgccctctacaacctttccacatattcccccaatatccctgctctcctttcatctaacatcatcaagagcctccaaggccttctcgcatcaacaggtgaaaatttgtggatagagaagtcactagccgtattgctaaatctagcttcaagccaggagggcaaagatgaagcggtatcatcacagggcatgatcagcagtctagcaacagtgctagacatgggtgacacaacagagcaggagcaagctgtttcatgccttttgattctatgcaatggaagagagtcttgtatccaaatggtgctacaagaaggtgtgataccatcattagtgtcaatctctgtaaacggaacacctcgaggcagagagaagtctcagaagcttctaatgctgtttagggaagaaagacagcaacgggaccagccatcttcaaacagagatgagccaccccaaaaggaacctgcccgaaaatctctctcagcaccgctgtctgtccatggatcaactcctgcttcagcttcagttcaagactatgaaccaagagtcctgtcgaaatcaatgtcgagaagaaagtcgatggcaagaccattcagcttcttctggaagaaaagctactcggttcgcgagtgagaaagaagaaaatatcacatgtacatacaagtacaaccttttatatgtaaagctttgtttttctttcttacaagttacaaaagtcatttcatagagaagaagatatgttgtacaggtctcattgtgattagtacactcgatttttgttgttcttttggttagccaaaaaaagatgtatatcaatcaaggtaaatacaagtaaaacaaaaccccagttttaacatcgtattcacttattgtcattcttctggtttattatgtttctatgataagtatccaaagttttaaaacaaatcttaaacttaggttacttagaatatgacatttacaaagtaatgaatacaagaagtacttgaaagagaccaaaacatgtaagctattgtgtcacccctcgggttcaaatctcgaaagaaatcaggtcgaataggattcagaacgcgagaaggtgagcgaatccgcgcttctactacttcgtttgatgggattctgaatccatccggtctcaaagagttccaagatcggatctctgcggctactgctgcttcgaccagtgcttccaccgccatcttctccactacttcctctctgtaatgcctccttgtacgacactttcttctccgtccccaaattcctcttctcttcctcctcttctgaaactgaccctgatctgctaaagctcctatcaactgtgatctctttctcattcgtccctttgttcttatctctccaacgtcccaacacgttcaccaacaaaccaagcctagaaataacatgaaccaacaaccaatctagccacgccactcggctcatcaaactcggaagtttcttgagcactccatcaagtttctctggcagagtctctacaatgatcaacaaatcaaagatcttaacaaacacattgcttgaagaagggaagtaagtctcgattgcgtcttgtaacgcgagtatatgatcgtcagctacagagagaaccgcgagaaaatgacgatgaaacggacttgtcatcgaaacaaagaagataacgaattcaaagagtttcctcaatagccaagaggatagattcttcttcttcttcatcagagtctggcttcttgtgtaaagaacacgagtcatggagagtattacaccaccacaagtctcaagaggacgacgtcgcggcctccttctcgccggttgctcctgtcaaaatccaaaatcacaaaaaataaccaaacatgtccagattatttgaggttatcaaagggtaagaacaaagagaattgcataccatttatgaggaatgtagcagattccaaatgttttattttctcgtctgtaaattttcccggaaaatgatcgagaaacttttgagaaaattagttcggtttcaggattttatacgttagtcaagggtaagcgagcggttagtcttgatttcagctgagcattttttagaacgagcggttacgctattctttttttaagtccactcgagaagattcgaaactgggttgccaaaagtgggttttttgaaaatatttttaaaaccaaacgttgggaatcttttttaaaataaaataaaaaaggaaaccgaatctatgacgcatgcatgaggtaagccattagatagattgtactgtgcgagtctgcgaatcaccgatggtcaacgtctcttctccttcaacttcaaatttagtctcttaccagtacgacttctcggtaacggaatcgttgctctgtttgccggagacgtgggtaagattggattgggaggtggagaaatg

SEQ ID NO: 31462 - DNA, 3000 bp, Unknown
  misc_feature (1)..( 3000): 2750-1469P.txt file - cDNA_ID_3042385; gDNA_ID_1972148; Annot_ID_179375
tacacgtttaagaccatcaatgagagcaatttttgctttctcaaactttaaaagaaccgcatcccccgttatggcctgttcacattggaaaatgtagaacattaaagaagcaaaacacacgaaacgagaaagcataaaacttgtccaaagagagaaaaaactgaccaagtaaagtttactacactcagaacagtgctgaagaatattttttgccttctcaagtgcaatatgtaaagagcataaggcttgaatccctgatttgctacgcggtcttgctccttccaatgacgggaagattgaaagtaccttgcatagaactccagatagttccttgcacatatctccatgtaactgtagcaaaagcacaagacaatcaaatcatcaaacaccaagaacataaaaacacgaaaccctctaacaacattgaaatcaaatgataataaaaaatatgtcctttaagataacccaattactatttctaatagaaaatttgtttgcaataatcagagatgcaaatttaatcagattccaacaattacaatccgaattcgaacatttcaatttaaaaaccgaaccttggcatcgctagccgcgaatagattctcttcaagctcggtcacatccatgatcaaacctcaccaaaacaactctaaaactacaaaaatctcccagaaacaaaggaatcaatacatgaattcagagaaattattaaaacaaacaatgaatcatgctacaatcacagaaattacctttgctatgagaaaaagatcttaacccagaaaagagaaagaaaaaaaaaacagaattttttattcaaacagcaaatcctggaaaaattgcaataacggaactgaaacacatccacaaaaaccgggaaattctacgattaatagaaaaaattgcgaattacattaaaaataaaagagagcactaaaaataaagctgcggagaacacgtgtggaaccagtaacaaccaaaaatggacaaacaaagacaaaacaaagaacagaacagaagagataagatagaggtcaaacatttacataccggggatattgagagaccggccaaggaggaaggttcataaaagataaaccaatagagaagaatcagacaagtgatgatgaattagggttttgttcttggtaaggcgatccatgattttggggttaaatgtgagagagagagagagagaataaaaagatattcgagtggaggaggaagtacttaagaatctgtgtgttctgttttaaaaattattaagttaagaacggcattactgtgatgttaattagtattctaatttaaaactaatgaacggttctttctataaatatttatttaatgtactagttttaggaagttttccagagacaatattgtaactggggttgacgtgagttttcatataatttgtaactttttgacttttgtttaaaagattaatttggttagttaggagtatttaagcttttttggaagagtttagagtttatggttaacctttttttttaagagattagtgcgttatagttgcaaatagtgcgtttttttccatcagaaaagttagtggaaacatgaacaaattgtcagttaaattatgttatcccacttgaatatttttgcattttgcttttaatttctaacggtccaccaaatcaccaaatggagtattttaattattcttgaattaaaaactcactcaaagatttgcttcttcccatccacccaggcggattgaagtttttagcgtctttttaattatcattttgtatttataatttattagatttttaaatttataatttgaaaattattatcatttatttattttatatcagacttaaatataaaaatattgtttttgagttgttatatttgttacctaaattcttgccaaaaaaaaagaaaaagagagaaaatcttctagcttcgaaaacatctaatactgtaatagtaaaatcattaaaacttttaaattggtttatcaaaactatgtcgtatattcttctccttctccacggaacccacacatagtagagaaacaatatgagcagtttatcacactcttgagttaccaattttctctcatttctcattattccttcactttctttcgaggtacttcatacatagtcgtctttctcaagttgttgtggattgtagagaagacctaataagctagagaatggattcgaggaagtctttatcttccatcgatagcttcaacgattgttacgtttgcttgtaacccaagattcgaaggtcaacaattccacggatgatataccttacttgagtctttatttctaaccagttatatgttacaagctaagtctgattcttgtattcttttctaccattgaaaccaataaaatggtctccttaccaagtaaaacagggttattattatgtactctaacaacattttccgttcaatcaatacaagaagcttttggatttcttatttcttttttttttttgggtttttttctttcaacaaaatgattataaattatttatttttctttaccaataagatttggggttttatgaaccatgatgaaatacttttttgtctttttatgaagaaatgatataactctgtttctcctctcttggtagcaattggctttttatttctcaggtaagtagtctcccccttttaaatccttattgggtgttgtattctcccaacaggcgtgagatgttcgttaaaaacaaaaacaattgctcaagagcatggcgtctggttctgttatgtatgtgtcttgttttaggtaataagagtcaacttcaattttgtggtcactttcttgctaattagttgtgataacagctgttgcttagaaacttcaacggccaagacttcaattttgtctcccagcgtagtagacttggaacttctgatatgactttgatcacaaacaagatatatctttaaaaaaccactttagaaagaaatctatttgccaaatcatccatctttctgaaactatg

SEQ ID NO: 31463 - DNA, 3003 bp, Unknown
  misc_feature (1)..( 3003): 2750-1469P.txt file - cDNA_ID_3042389; gDNA_ID_1972148; Annot_ID_179370
ttcaggtcgccgcttttagattcagaatttcataaataagtaggctatagattaaataagagattaacaagccttctttttcattatggtgggtggtttaagtcaaacttcacgaaatgtttgctttgtcttacttttcattaataattggatgactttatcctttttctaagttttaacactaaagaatgtgtatatttggattgaagttccagatttcttaaagtcattcggaatcaaagatgtactttggaaaactttgttttttttttttaataccaacgaagcctgtaatgatttaccattttggtcttttagagagtttcggaaaaactagaaggatacttttttttcctgagatgttcatgatgcttaacatttaaataaaatcaaaatcttttgaaagtgttactttctatgatttgattaatgtcaccaatttttttttgtaaattaagaatcaataacaccctcttagtattattatcatggctttggatttcattccagttttagtttttttgggtatgtttagcttccttttttccaaactaaatttctaaaaaatatgttttttcggatttttttttgattatttgtttaaccgtcggttatgtttttcagtatagcttacgataacaatatcccacatcggaaattaggaaaagatcatgatagtatataagatatatgtcatcatttactcattgccaagtggttttgtttgaatgagataatatatctcattcattcattgtcaattagttttaagttaaaaaacttatattttaatatagtatcaaaatgcttgatccatacattttccagctcggttcgtattcgatatgatccgaatttggtctattgatccttgcttaatatatcgagagcagtggctaaaaaatcatcatctctacaaagcgtattatcatcgtcatcttgccacactgttagcaatatatattcatcctctcattttcacatccatttgataaagataatttgaattatttatatgccccctacatagcgaggattacaaagaaggaataaaactgaaagtgaaaaatgggatgcgactttaatagagtttcatggtcaccactacccataccagttggtccacgtcagacgtatacaaaggcatacgatacgattgcttgtgctttcagattgagacaccaaagatcaccgattcaccatcatctgatctgatgatatgcttttttcccatcttctgagtctttctttttttcttctaaatttcacaatatacatatattaatttcaataccattaccatcaataattttatagctacaactaaataacctacaatatacagaaaatataaaaaccatttctaattttaaaatgggttttgtgtaaaaaagactttaattattgcaactttatttacatcttaaaaaaatatagattaatcatacaaaatcaacaataatatataatataattttttttgctaccgtcaaatttataaaatttgaacaaataatatgtcaaattgaagtcctcacgattaagaatacaaatttagttttagaattttaaaattttaatgtatgtaattgtgaaattgtaggattaatctaccaaaaataattatatatataaaaaatatgatcaaaaatggtaaactttaacaaaaaaaataaaaaatgacaaatctggacaaaaattagtttatgcagtatataatattatttttgtagcaaaaacatgtctttgttttcttggttgtctcgatcaaaaacatgtcttgagagcatatatgaatactaatatagtattaaactataggatgatggggtcattgacgtggtgactagttgacattattatcaccgtaagatctgattgtgctatataatccctaatctgacgctccatttatttattcctccattaccattattagatctctctgtctctttctttctgtcaaaaatattatcttctttgcaccaacttcaacgcattacgaagcagaagacagaacccaaaaaccgacaaagttcccctattctctcggtataacctcatctttatcttctttctccgccattttctcttttctttgtataaatgtctttacccattttggattagattttccccctccaagtaaatgaatcatctgcttcttcaggtctccattgattctcctactctgttttcctcctatatttgtatttgatgttttgtttttttctttggaaccaaacaagtcataaagtttcgatctttgagatcttgcccaattcttggaactagtgtttggttttcttgataatatttctgtgagagaattcttcaattttcagattttcttgataatgttttgctcttttaggaaataatttatagccattcagatttattctcttgtttctttgtggtatatggtgcttgtaattttgcaaaatttggagcaccctatctttttgtttgatgttgatcttattggttcttgacttctttcaaagagttgacttatctgtaaaaaaatattttgcagaaaattcattacttctaaagatggatgttgtaggtggctgatgactcttcttccctagcatgacctttattggtaacatcttctttactcaaaaaagaaacattccttttggaagaatcttgttgttgttgttgttgactaatcttttttatcatgttcttggcagatacagagatgtgtatgagaagaaacaacatcaatttaacaacagtcatagattctaacgaagccattggtatggaacatgaattagattctgctagacatcaatattcttcagtgctcactgcaattccattcttctccgctacattgtttattcctctctctttgaaaatcactatacgtgacgggtttcacgaaagtctttaataacatttccatacacaaaacacaaatagtttagagatttgttcttagggagatttagctatctctctgttcaaaagattggtctaaagatg

SEQ ID NO: 31464 - DNA, 3000 bp, Unknown; identical to SEQ ID NO: 7860
  misc_feature (1)..( 3000): 2750-1469P.txt file - cDNA_ID_3042389; gDNA_ID_1621169; Annot_ID_173918

SEQ ID NO: 31465 - DNA, 3003 bp, Unknown
  misc_feature (1)..( 3003): 2750-1469P.txt file - cDNA_ID_3042424; gDNA_ID_1972154; Annot_ID_179421
ggagttgtgggcacttttctaagccacttcttggtggtgcggatgctagtcaagagattgcagccaaaagagaagagaaagaaaaattcgcacttgagcatattgcaaaatgccagcactcttgtaaatagttttgtctgttatctctggtttgttctatacctatactagtcgcctgaattgacttcctacattttaccttgaccagctattagcaagctcaacaataatcctattgccaactgggatacaaggtttgaaacgggaacaaagacagccctccttcacccattctctcctattgtagttgctgcagacgagaatgaacggatcaggtatgcgagtttcatcagagcatcgttaaaattgaatgttagaacaacttcttgcattcaggttaaccctctgttaggaaaagtacagggtagttcccaatctattggattaggtctcggtttagtttagtcatttagaaaaagcttccctttgaaacttatcttaaactttgatgttctctcttgggacctctttttatcgagaagccttaactgcactaagtatttcactttatttctcttagagtgtggaactatgaggaagcaactcttctcaatggctttgacaatcatgattttcctgacaaaggaatttcaaagctctgcctcatcaatgaacttgacgactctctgctacttgttgcatcatgtaatgttcacaactcttgccaccaagtctttcagatgtttgcaagttgattgaatatgggtgttgagtaatggtatctatgtcttacacatgcttttgggatttgggtaggcgatgggtcggtccggatatggaaaaactatgcaactaagggtaaacaaaagcttgttactgggttttcttcaatccagggtcacaagcccggtgcccgtgacttgaacgctgtcgtggactggcaacaacagtccggttacctggtttgtgatttcttcaatcatgctatgcacgatatttcttcttagttttccaagttacgaagcctgatttattgttatttacgggttactggtatttaacagtatgcttctggggagacgtcaacagtcacactttgggacctggagaaagaacagcttgtcagatctgttccctctgaatcagaatgtggagttacagcacttgtaagtctgcatgaacaaccttctgtttaaaacatagaaatgctctaggatgtcatcatttgctacaatctgatgaatcgaagagatagtatgcataagctatcgtcttatagttctttttgttgttttggaagttcatggttatcatgcttttccttgatcaaaacatttttgaattacaaaacatgtgaattttgcttactttatgttatctttgtagtctgcttctcaagtgcacggaggccaactcgctgctggttttgctgatggatctttgagactctatgatgttcggtcacctgaaccgtaagttggtttaaactttaatgttcattctttaacagaactcctcaaaataatctaaaatgagagcaccaaaaaatatttttgaatacatcacttaatatcatttcttctattgaaggcttgtctgcgcgactcggcctcatcagaaagttgaaagggtggttggcctcagttttcaacctggacttgaccccgcaaaggttgcaaaccaaaattgatctatgaactgtcagctttcatacctttttttatagcatatattggttcgggtttgaagaatttcgtcttggtttggtttttaattctcaagagtttctcaactctttgtcgttttcctggggccaatatctattctgttcttatcttcaggtggtgagtgcatcacaggcgggtgacatacagtttcttgaccttagaacaacaagggacacatacctgacgattgatgcacacaggggttcactcacggccttagctgttcacagacacgctccaataatcgcgagtggatctgcaaaacagctcattaaagtattcagtcttcaaggggaacaactagggataatccgctactacccatccttcatggctcaaaagattggatcagtgagttgcctcacatttcatccgtaccaggttctgctagcagctggagctgctgactcatttgtctccatatacacccacgacaactcgcaagcaagatgagtcacaaccgtaagtgaatatgttgcatttagcattgctcttgtgataaaaagaaaagcataaatcagtgcaggtcgggtcggttttgggtcggggtaaagtgggtgtggtttatagtattcgttagcctccgtccaagataaaacaagatctaagttaacactaaagaaggaggcttcaccaaataagttatatctctacctatgcaacaacgcacgtaaatggtgtctgtaaatagtttccctgttttgcttttcattttctcatctcttgggtgtgtgatttcctttttattaatcttttaagtcattctgtttcctaatttgtttcatgtgtaaaaaaaatggtaaaagtaatggtggaagaaaatttgcattttcgtgacgatgctttgaaatgttgtctgttgtttgttcaagttgggatccgttggaaataggcttgcaatttttcatgctacgcatctctatgattggtcaaataccagtttatgtcagaatccaagtaattatcgaaaaatctgatcactcactaggatttctttggttatcaataaagagatgactaacaatcattaacaatcataatgaatgacgatctttatcattttggttaataacaaaatctacgaacaaaaatccgttaggacattttttactgacacgtgcaaagcaaagctctcccgcgtgcaacaaatgaaagctttttgtttcgatgactgttttactgacttgtgagttctgactgacgatgaaaaaaataaaaagttcctcaaggaggtgtaaagattattgtacggagaattaagcttcctttggagatg

SEQ ID NO: 31466 - DNA, 3000 bp, Unknown
  misc_feature (1)..( 3000): 2750-1469P.txt file - cDNA_ID_3042432; gDNA_ID_1972154; Annot_ID_179413
cctgaatgctcaattgtcatcgatagatgaacataagcaatctacaaagagaaaagtgagggacgacttgagagctgagtaagatccacaaacctcactactgcagttgcttgttatgaatgctcgttacatttgttttctcattgttccctctttttatctacaggaaaaagctatcaatgtatgcttctgtcacgaacgttataccggacattgatgatccatcaaagatctcaggctgtatcctgttctttcatcatcactctattctatcaacgttttcttaatcatatatattgttcactttttatccttaggtgttttgaatccttgattttgaaaatcatattagatatggtagatcgtgaaaagaggctaattgagaagtttcaattcgagacaaataagatgacggcatacgagacatgtaacagtatctggagcatcataaacaaacaataaacatacttggcaccacttcatttgtatgatatatgtgtgagcagtcttggttttagcttagcaaccaaaaacctctttatctaccatcagttccgttgatgtaaacactttctactttacttaactttggatttttgttatatgattttgaattttcttctcctgtaacatcatcatcaatctaagatttttccccctgcaagtttccgtgttcatgttgcagctgctcctgccgttttcctgatcgttttttgctgtgcagattgatgcacaagttcagatttaggttgtacaaattctaaaggaacagaagtgcagttttttagtttctatgctttcattatattcttaaacgcctttcataaggatttaatgattttgaatccaaatcttggtggcctagcaaactttgggattattacctagcttctcttctgaactgtggaacctgcttagtgtctccactgaaccattgaacttgttagggtttgccatttttctgtcttatattggggtagattttacaggccagagaactcgatccaatttagcgagagtgtacacagtacacactatgaagttataattttgttgtccctgtctcttgaaaacagtcacagtctcacagagatacaaatcctcatagccagagtctttggattattgatgaatattgtcaccgcctgcctcacgaagatggtcagttccccttttcaaatttcatgcaagtttggtaactgtttttccggaagtatttagagaaatgatcaacagatggtatttatgaagtctttacaggaatttcatgtcggatcttcactggtacatgaggcttagtagtttgtagtttatgaaccttctataatagatcagtcacaaagaaagagaatctttacgaaaagatcatgaacttttcatagcttctgtgcttaggaattgtcaatcttgtagaaacaaagtaacatgtcattacattttaggtaagaatcgaagtacatgtcatcagatagtatctgtgacttgtctctataatattggctttaatagtgatctcgtacgtgtatctcagtttcagatatgatcttcacatcttcgaatctctgaggaagcaaagaccacatacgattctagcaccttaatggactcttaacaaaacgggtaccttctgcaacttctggtttcactaatggcttattggctttagatagatttgggttcttagttcttctttagggaccacattggaaaattagatatctattgattaagagggaaggaacagtgagaaacaaaaatcattgtggaaactgtgaaacaagattatgaaacctgatactccatgaacttctctgtgtgctctctttcgtcgttgcttgattctttgacatatctgcaattataaaggcaattaggattagtgagaagatatataactttctgtttcttagaatgattatgaaattttaacgataaatacttggctaaacccttaagagttatgtcttctctgtcgaaatacgcatacatggcatggtacacgtacgagacattgtctcaaccactgcacaaccaacctgttacaaaatagaaggtgaattaggtaggtggcaatatttggaggtaacattaacaaaataccaatggtgtgacttagtgccatcgaattagtgaaacatgagtattttttagttacaaaatacaaaaatcttactaacttcaactatctttttctttgctaactatgataacttgtatgtagaagtgttgttttttattttgtcttgatagctaataagttggatgatgcttacttgatttgctcgttaacagctgcctcacaagcttgtgcgtatctttggtgagcgacggagacaagagcggtgattggtagggctagataagctctctttacctcctcgaacggctcgaatatgactccgctcatcgagccagctgtttctgctgccaccaccagtgatctccttgccagtttcctctgttgtgggaatctcagtgaaccagcaggagaagtggtgccatgatgggtttagtggtaaatgaagaaattcccttgaagctatgtctttgatcagcatgcgatgtggatgatgaactgatgaagaagaaagggttttgtaatataggagggaatcgagtgtagtggccgttggattagacccacgtgttggggtctagatagaaccacatttacgggcgtgtggtagcctcatggccatccaatgggatggcgtcaacgaggagattccgtccacgtcagataaaagcttatcctattttcactgtcagtaataaactttgtctgattctcttctattggccctatatacactttaatacaaagttaaattgtttgttctacaatccacatcgttctttcaaattggtacgtgtcaaaaatctattggctcttatagtgttaatacaaagtaacgaaattaaatgaatcggtgatagaaccaaaaaaaaaacacctccgatctcggcgagagaaagagaaacgatctgtgagagagaatg

SEQ ID NO: 31467 - DNA, 3000 bp, Unknown; identical to SEQ ID NO: 9565
  misc_feature (1)..( 3000): 2750-1469P.txt file - cDNA_ID_3042438; gDNA_ID_1972154; Annot_ID_179408

SEQ ID NO: 31468 - DNA, 3003 bp, Unknown
  misc_feature (1)..( 3003): 2750-1469P.txt file - cDNA_ID_3042442; gDNA_ID_1972154; Annot_ID_179407
aggactgtcatactcttgacggtcgatctcttcatcacagatggaactccagaactcaattgcttggagggaaacgctctcttcatctccctttacagcattcgatgtgagctcaaagagtgtttgtatgtagtgctccagcacctcatagtatgtggatgcaatggacacaaggcactcgaaagcagcttgcctgatctctgcctccttggaacatgctgtctcgcataccatcttcatgatgtaattcctctccatttcattctcaaaatttgtctgagagaaatccaaggcattaacagtgcctttgttgctgcgagacgaacttcagcagtattttcagactggttcatgccctgcacaactgctgtgaggacagaattcacttcatcttgcacaagatcatggtgtgatatctcttcacagacatagcctagagtttccaaggttgattgcttcaagtgtgcgggactgccttgctgagtcatattgttaagcagcgatccaacaagttcaggccactgcttctgaggaatttcaatggaggctaccttagcaataacctgagctgaagtatgccttgcctctagggcagatgaaccaagagttcttagtaagcgatccttgatctgggatttaagagcaacatcaattgcaaaccattgtttcaccagatgatcttttgtggcagaatctttggcgtccagagaattctttagcagaataccggctagtcgacgggattcagcaggtttatcattgttggcaagctcaaaagacaaggatactaagaacagcggcaagttctgttcttggaattgcctgagattaccctctgcttcagtccggactcttgcatcggctgactgggcagccaacagaaactgtgtgatctccatcgccattctggtctctgcgcaacaaggacattcaccataatcagcaaaaaaaaagaggggttaatagaacaaaatcagcacaattctaaaaaaaaagggaaagctactgaacaaagtaatggtacaagtataaaaggcaataatactatacaaacggtcaacaagttcaatcagatggtacaaacaagagcatttgaacattatgagcaaatatatccatactccgagaaaattatatgagaatctctgcttggtgtaattgacaacaaaaatcattgaaaacaaacccaatatgaaatccgaaccaaagatgacccagcgttttctatgaaattcggaaaaagctttttctcctagtcgtgaagaacacgagttcaatttctaagaaggaagagagacaaataagtggcagaatcacagcgagcgagtaaaaaactaaagttaaaaaccctgcagtactagtgacccaaaacctaatccgaaagcatagatctataaacagatatacaaatccagagatcaatacacagttcaagcaagagatttacctggaaattaaggtttgcgtaaacgctagggtttttcgcttcaatttaaacaccacgtccctctcactgcagattctatccacaaaaagcttctcgaagaagagcaaaaaccaaaccctagagtttgcagagacagagagagagtctgtacttgaaactgtcgaaggagagagagatatgagaaaagaaatttcaatttcgaatacagagaagaagcgggtgtggaactgtggaagggcaaggctcaaaagctaaaaacactttattcctaaatcaccccatagactttgtatttgtatctgaaataacctttgtttaccataattattcgacacactttgggactttttgttatttgtttgttatacatcaaatgagtaaataactcttttatccaaatttataaccatcgtctatttgcaagcttattcattttggcacaaccttaggtgaatgaactgtatcataaccagtcatgggtccaagtaaatgaacatttaagtttgaaacctcaaatacattatacataactaaatacatccacactactttagaaaaacttaaatttgaattatgaaacaaacaaactactaaagtaaacttaaatttgtttttgtaatcttggttaattaatctggattttagtattttttttgccaaaactggattctaattttgaagtcgaggtaacaaataaaaattattggcaaatataagggggttacgtagaataaagaattgttaatggggtgattttagaaataaaatagttttaagcttctgctttgcccttccccacccgctccttccttatattcgaaattcacattcacctctctcagtctcctcattatctctgcctcctttccacacagtcgactctttttctctctgcaagtctagggtttttctgatccaccagaggtttttcccctgcttcgagcgccgtcttggagaagctttttctcgataggctttgcagtgacagggacacagggtttggattgaagcgaaaaaccctagcgtttacgcgtcttctcaagcgaaaaaatccttaatttccacgtaagtctattgcttgtagtgtgtattgagttcgggatttgcatatctgttactggatctatgttttctgattaggttattgggtcactactactgctagggtttttaattttgctgggattttaatttggttctttactcgctcgctgtgttcttcacgattagggtttaagcttttttcgaagttcaaagacattgttgagtcaactttggttcggattttatactggaatttgtttgtagtgatttttttgttaattactcagagcagagattctcctatggttttctctgagtatagatattaatttgtttgctctctggattgaacctttgtacggtttgaatagtattattgccttctatactcataccattactttgttcagtagcttttacttttgcttagaattgtgctggatgtgattctatttgactactgttttgtcgctgatactggtgtatgtctttattgtgcagagagaagaatg

SEQ ID NO: 31469 - DNA, 3000 bp, Unknown; identical to SEQ ID NO: 9563
  misc_feature (1)..( 3000): 2750-1469P.txt file - cDNA_ID_3042446; gDNA_ID_1972154; Annot_ID_179406

SEQ ID NO: 31470 - DNA, 3000 bp, Unknown; identical to SEQ ID NO: 9559
  misc_feature (1)..( 3000): 2750-1469P.txt file - cDNA_ID_3042454; gDNA_ID_1972154; Annot_ID_179403

SEQ ID NO: 31471 - DNA, 3 bp, Unknown
  misc_feature (1)..( 3): 2750-1469P.txt file - cDNA_ID_3042454; gDNA_ID_1971936; Annot_ID_177247
gat

SEQ ID NO: 31472 - DNA, 3000 bp, Unknown
  misc_feature (1)..( 3000): 2750-1469P.txt file - cDNA_ID_3042461; gDNA_ID_1972154; Annot_ID_179398
tagatatgtgcaacggaagtgatcgtcttggacaaagagaagctgaaggtatattctattgatggtctttaccattatttttagggttttaaattttgttctcaattttgtttctgcctttggcttacaagttactagagattctgtagaattcgagaatggttgaccaaatatcaagtcacttcatcttaatcttgtgtgctaattagaacatggaatttgtattatttgatgatatctcacaaaagttctctggtcttttgaaaaatcagagatttgcaccaacaatgtgagggtcttttcatataattcattaagatcagccactgatagtttccatccaacgaacagaatcggaggtggtggctatggcgttgtctttaaggtaataaaaatgataacttctcttacaatctgcttaaatcatgttgaggttcttctggtgaatgtagtaaagggttttgaatcttgcagggagttttgagagatggcacacaagtagctgtgaaatcactatcagcagaatctaaacaagggacacgcgagttcttgaccgagattaacttgatatcaaacattcatcatcctaaccttgttaaactcatcggttgctgcatcgaagggaacaatcggattcttgtctatgagtaccttgagaacaacagtcttgctagtgttttgcttggtaacttttgccacaattgcattcttgtctaccaaatcccatttgtgtcctgtttttctgatcttgtttgagtgatatcaggttcaaggagtagatatgtaccgcttgattggtccaaaagagctgcgatttgcgttgggacagcttcgggtttagctttccttcacgaggaagtcgaacctcatgttgttcaccgtgacatcaaggcgagtaatatcttactagactcaaacttttctcccaaaattggtgatttcgggttggctaagctttttccagacaatgtcactcatgtcagtacccgagtcgctggaacagtgtaagaatccctctataaacatatcagtttccatctttcctctacatgtattttcagctgatgaaactgcgactacaggggatacttggctccagaatatgcacttcttggtcaactgacaaaaaaagcagacgtttacagcttcgggatacttgtgcttgaggtcattagtggtaatagtagcaccagagccgcctttggagacgagtacatggttcttgttgaatgggtaaagctaaaagcctcgtacctcaacaaaaatatatatagctctatgtttgtgttaatgtttcttacaagtgaaaaaataatacattttcaaaatgtaaaatgcgaaaacaaacaatattcaatgctttaaactctgtcttgggcaggtgtggaagctgagagaagaaaggaggctactagagtgtgtagatccagaactaaccaagttccccgcagatgaagtgacccgtttcatcaaggtggctcttttctgcactcaagccgcggcgcaaaagagaccaaacatgaagcaagtgatggagatgcttcgcaggaaagagcttaacctcaacgaggatgccttaacggaacctggcgtctacagaggtgtcaacaggggacgcaaccaccgtggaatcggtcttagggtcggccaaggaggcagctcacaggagagctcgtcaacgcaacgtgacaaagggaaaagctcagccgttcctcaagggtcgacgtccaactctaatatttccttccagagcatcacagagttggctcctagatgatttttttctgttaatagagcacaattttattcttgagtatattaattagtttatgatgtgttaatatcttatacatagggtatatatgaataaaccaaagatgctatctgataaaatgttatgtagttgtctgacatttccctttgtgtcagaagccagcagtttaaaattatgattggcatgattttgcaacattcttgtattcaatgatttggcttgatttgcaacattcttgaaatgaatgattgataccttattaacttactaaaccatcggcaataatgagatgagtataatattattgggaacagatttttatgcaactaactatgcgagctttcaattgtcaaagtcaagatgcttccataacttgacaagttgtttggatgaaagatgtatatggacttatttccaattcaattatgttgtacgtgaaaaaacaaaaaacaatatgaaggatggattagacaataaaaaaatctgatgaaactaaatataacaaactgaactacgaggaaagtgcctgacacatctttagtacctcgctttgagccttttaaggtgccttcttagttatagcaagaaaatagttaaattcaacgaaataaatgttttatttgtcagtcaactatatgaaagtaagcgtgtttataattaggaagaatttttttaactactaaaattccaccataggcggcctaataattaataacaattatgaaagctagaagattaagaccatatcaaaagacagattaatagttgctttgtccttgcaagaaatatttatttaaaaattacgagaagattctaaagatcatcaacatgtaataaaaagattcaaaataatggataatgtagctgtgctcactaaattgatatatccaaaaagaaccaaaatatatcaatccgaaaataatgaacagggtcctaatggatataatcatagagatgatcacagaaaagtcgtctatatgtagcaaaaataaaagtgaaatgtggataaatcatgatcatttatttaagcgtatggtcccattttaattacataacaaataataatctacgtccaagtcagcctgctttggctgcttaagaacttttcaaaacacgacagcttcttcaccaagcaagcaagaaactcaacacaaattataagagaaaaacaaaaaaatacagacttcactatttttttcttctcctaacttattttccaaaaaatg

SEQ ID NO: 31473 - DNA, 3003 bp, Unknown
  misc_feature (1)..( 3003): 2750-1469P.txt file - cDNA_ID_3042461; gDNA_ID_1971936; Annot_ID_177252
ttctagatatgtgcaacggaagtgatcgtcttggacaaagagaagctgaaggtatattctattgatggtctttaccattatttttagggttttaaattttgttctcaattttgtttctgcctttggcttacaagttactagagattctgtagaattcgagaatggttgaccaaatatcaagtcacttcatcttaatcttgtgtgctaattagaacatggaatttgtattatttgatgatatctcacaaaagttctctggtcttttgaaaaatcagagatttgcaccaacaatgtgagggtcttttcatataattcattaagatcagccactgatagtttccatccaacgaacagaatcggaggtggtggctatggcgttgtctttaaggtaataaaaatgataacttctcttacaatctgcttaaatcatgttgaggttcttctggtgaatgtagtaaagggttttgaatcttgcagggagttttgagagatggcacacaagtagctgtgaaatcactatcagcagaatctaaacaagggacacgcgagttcttgaccgagattaacttgatatcaaacattcatcatcctaaccttgttaaactcatcggttgctgcatcgaagggaacaatcggattcttgtctatgagtaccttgagaacaacagtcttgctagtgttttgcttggtaacttttgccacaattgcattcttgtctaccaaatcccatttgtgtcctgtttttctgatcttgtttgagtgatatcaggttcaaggagtagatatgtaccgcttgattggtccaaaagagctgcgatttgcgttgggacagcttcgggtttagctttccttcacgaggaagtcgaacctcatgttgttcaccgtgacatcaaggcgagtaatatcttactagactcaaacttttctcccaaaattggtgatttcgggttggctaagctttttccagacaatgtcactcatgtcagtacccgagtcgctggaacagtgtaagaatccctctataaacatatcagtttccatctttcctctacatgtattttcagctgatgaaactgcgactacaggggatacttggctccagaatatgcacttcttggtcaactgacaaaaaaagcagacgtttacagcttcgggatacttgtgcttgaggtcattagtggtaatagtagcaccagagccgcctttggagacgagtacatggttcttgttgaatgggtaaagctaaaagcctcgtacctcaacaaaaatatatatagctctatgtttgtgttaatgtttcttacaagtgaaaaaataatacattttcaaaatgtaaaatgcgaaaacaaacaatattcaatgctttaaactctgtcttgggcaggtgtggaagctgagagaagaaaggaggctactagagtgtgtagatccagaactaaccaagttccccgcagatgaagtgacccgtttcatcaaggtggctcttttctgcactcaagccgcggcgcaaaagagaccaaacatgaagcaagtgatggagatgcttcgcaggaaagagcttaacctcaacgaggatgccttaacggaacctggcgtctacagaggtgtcaacaggggacgcaaccaccgtggaatcggtcttagggtcggccaaggaggcagctcacaggagagctcgtcaacgcaacgtgacaaagggaaaagctcagccgttcctcaagggtcgacgtccaactctaatatttccttccagagcatcacagagttggctcctagatgatttttttctgttaatagagcacaattttattcttgagtatattaattagtttatgatgtgttaatatcttatacatagggtatatatgaataaaccaaagatgctatctgataaaatgttatgtagttgtctgacatttccctttgtgtcagaagccagcagtttaaaattatgattggcatgattttgcaacattcttgtattcaatgatttggcttgatttgcaacattcttgaaatgaatgattgataccttattaacttactaaaccatcggcaataatgagatgagtataatattattgggaacagatttttatgcaactaactatgcgagctttcaattgtcaaagtcaagatgcttccataacttgacaagttgtttggatgaaagatgtatatggacttatttccaattcaattatgttgtacgtgaaaaaacaaaaaacaatatgaaggatggattagacaataaaaaaatctgatgaaactaaatataacaaactgaactacgaggaaagtgcctgacacatctttagtacctcgctttgagccttttaaggtgccttcttagttatagcaagaaaatagttaaattcaacgaaataaatgttttatttgtcagtcaactatatgaaagtaagcgtgtttataattaggaagaatttttttaactactaaaattccaccataggcggcctaataattaataacaattatgaaagctagaagattaagaccatatcaaaagacagattaatagttgctttgtccttgcaagaaatatttatttaaaaattacgagaagattctaaagatcatcaacatgtaataaaaagattcaaaataatggataatgtagctgtgctcactaaattgatatatccaaaaagaaccaaaatatatcaatccgaaaataatgaacagggtcctaatggatataatcatagagatgatcacagaaaagtcgtctatatgtagcaaaaataaaagtgaaatgtggataaatcatgatcatttatttaagcgtatggtcccattttaattacataacaaataataatctacgtccaagtcagcctgctttggctgcttaagaacttttcaaaacacgacagcttcttcaccaagcaagcaagaaactcaacacaaattataagagaaaaacaaaaaaatacagacttcactatttttttcttctcctaacttattttccaaaaaatg

SEQ ID NO: 31474 - DNA, 3000 bp, Unknown
  misc_feature (1)..( 3000): 2750-1469P.txt file - cDNA_ID_3042465; gDNA_ID_1972154; Annot_ID_179397
gagatgcttcgcaggaaagagcttaacctcaacgaggatgccttaacggaacctggcgtctacagaggtgtcaacaggggacgcaaccaccgtggaatcggtcttagggtcggccaaggaggcagctcacaggagagctcgtcaacgcaacgtgacaaagggaaaagctcagccgttcctcaagggtcgacgtccaactctaatatttccttccagagcatcacagagttggctcctagatgatttttttctgttaatagagcacaattttattcttgagtatattaattagtttatgatgtgttaatatcttatacatagggtatatatgaataaaccaaagatgctatctgataaaatgttatgtagttgtctgacatttccctttgtgtcagaagccagcagtttaaaattatgattggcatgattttgcaacattcttgtattcaatgatttggcttgatttgcaacattcttgaaatgaatgattgataccttattaacttactaaaccatcggcaataatgagatgagtataatattattgggaacagatttttatgcaactaactatgcgagctttcaattgtcaaagtcaagatgcttccataacttgacaagttgtttggatgaaagatgtatatggacttatttccaattcaattatgttgtacgtgaaaaaacaaaaaacaatatgaaggatggattagacaataaaaaaatctgatgaaactaaatataacaaactgaactacgaggaaagtgcctgacacatctttagtacctcgctttgagccttttaaggtgccttcttagttatagcaagaaaatagttaaattcaacgaaataaatgttttatttgtcagtcaactatatgaaagtaagcgtgtttataattaggaagaatttttttaactactaaaattccaccataggcggcctaataattaataacaattatgaaagctagaagattaagaccatatcaaaagacagattaatagttgctttgtccttgcaagaaatatttatttaaaaattacgagaagattctaaagatcatcaacatgtaataaaaagattcaaaataatggataatgtagctgtgctcactaaattgatatatccaaaaagaaccaaaatatatcaatccgaaaataatgaacagggtcctaatggatataatcatagagatgatcacagaaaagtcgtctatatgtagcaaaaataaaagtgaaatgtggataaatcatgatcatttatttaagcgtatggtcccattttaattacataacaaataataatctacgtccaagtcagcctgctttggctgcttaagaacttttcaaaacacgacagcttcttcaccaagcaagcaagaaactcaacacaaattataagagaaaaacaaaaaaatacagacttcactatttttttcttctcctaacttattttccaaaaaatggatcatgacatcacgacgaaagtcagggcgatgtttgatcaccgtaggttaaaccgctctggatcatcactcttcacagcgtttgcttccacggttatagctctggtcgttttcaccatcgttctcgtctctaatttatcggtgagagaagatttctcagcgaaggtggtgacaatagagatcaagacaattgttccttacttacctctaagctcagagaaggaggtaagtgatcaagtcaacaataactattcgatcaagcaacaaatcacagtcaaagaagagattaacaaactgcaagttcttgaagtttttggaggcaaagacgtgtcggagaagtttcaacagagagcaacagagtttttgagagatgattgtgaggtcaagttcatgatgacatggatctcacctgcggaattgttcggtaagagagagatattatctgtagaaagcgtattcaaatctcatgctagaggttgtttgatgattttatcatccacaatggattctcttcaagggtttagaatcctgaaaccgtttcttgatcgaggttacagagttatggcggtcacgccggatttgccttttcttctcaaggacacagccggagaatcttggcttgaagagattcagaccggtaaaagagatccaggaaagatctctctagctcagaatctatcaaacctcatgagacttgcttatttgttcaaattcggaggtgtttatctagacacagacatgattgttttaaagagctttaaaactctaaggaacgtgatcggtgcgcagactctggagccggtttcgagaaactggacaagattgaacaatgcggtattgatcttcgacaagaatcatccattcttgctcaaatccattgaagaatttgcgttgacttttaatggaaacgtttggggacataacggaccgtatcttgtttcacgagtggctcgagccgtggaaggaaccgatggctataacttcaccatcttgacacctcctgcgttttatccagtgaattgggttgagattgagaagctattcaaggttccaagaacagagaaagattcaaagagagttcaagtcaaggttcttgaaatgcagaagagaagctatggattgcatttgtggaataagtttagcagaaaattcgaaattgaacaaggaagtgccatggataaattggtttcaaatcaatgtataatttgtgacagtgttgtatctgtatcatgacttttcttttttcattttgtaattccattgtagaatagcttgtaaattgtaattaacaatgaaaccctcagtttttttcatttctttcaatttaaaccctgattaaaatcaatctctctataaagctcctatcaggatggttctggctttttatgtttgggctgataattatcctatagagattagcacaggcccatataagttgacaagtcatcagttacaattacgtttcttcttcacacagcccaattagcaaaaactcggttcaagctgaaatcgaaactcgaaccggactgtgatg

SEQ ID NO: 31475 - DNA, 3000 bp, Unknown
  misc_feature (1)..( 3000): 2750-1469P.txt file - cDNA_ID_3042486; gDNA_ID_2684231; Annot_ID_192275
tttatttttctatcaaaatgaattgcttaaaggtgaaaacttgtgaaagatatttccaggtttctaacattatatacataacatagtctccattaatcatcatgaatactaccccaataaaaagtaaatcaagaacaaaaaaaaacataattcaatcaacagcacctgatacaaaaatatcaaactatcagtgtgcttaaacaatgaaacgacataatagtattaaactatcagtgtgcttaaacaatgaaactacataatagtatcaagagaataatacttgccgagtcatacccattatcatctactgatatatatatttttgtcttatgttaagatcagtctactagaaatgagacttcattattttttataaatgtcaaaataacatagaacatcagaacatataaactaaagcttaaagtttacacttttttttttttttataactttattagatgcattgataaattatcatttcatttactccacagctctcaattgaacataacccatatccttggccatctttctcagaacattctttcgaatcttcccagtgggagtcttaggaacatccgagaagactactgtctttggaatcatcttcatgttcttattcccaagctttctcttgcagaactcaatgatctcttcctctctcgcttcagctccttctttgagcttcacgaaagcacacatcgattctcctaaagtttcgtccggtcgacccacgacccctgcgtcataaaccgccgggtgactatagagaatcccttcgatctcctttgatcccacgatttctcctccgcatgttataacatcttgtgacctatctttaaattgtatgtagcttcgcatgtggaaacatcataagcataaataaattcaaagtaatacattcaaagtaatgcatgattcatttacttacccatcaggatctataacacccatgtcgcgactccagtaccatccacctcgaaaagccgcttcagtggcttccttgtccttgaagtaaccgctcatgactgtatttccccggagagcaattaccctgatagtctttccgtcgtgtggaaccgatttcatggtggttgggtccaatacatcgacagcttccttggcgaaatggttgagaccatctcttgccttgagccttaaactctcctcttcaggtagagtctcccactcgggcatccacaaacaagctgttcctagtccatacacctccgagcatccataagccatcatcactttgaatcctagcttcttgagtttcaacatgacctgtccaaataaattaatatctttactatgattctatgttaaatattaatgtactgtgacggagctaacgtataaagcaagggattgattatatataacctcaaaatatggaagttcaaccaaataagcctgattgaacaaacatgtaattcaaaactctgtgatagttagttttacctcaggaggagaggatcctccgctcataacctgtacggtccatggaaacgacttcttgaccgagtctcttgcattagcaatcatgttgagaaccggaggcgagccaccaaagttagttaccttgtgcttcacgatactatcaaatataacttcgtcgttgacttccctgagacagacgatgactcctccaaaagccgtaactgtccaaatatagcaccacccgctacaatgatacataggaactgtacatagataaaccggcattggtttcatctcattcataacaccaacagcagttgcgttcagataggcaccgcgatgactatagacgacacatttgggagtcgatgtggttccagatgtgaagttgagggcgattggatcacattcgtcaactggtcgtattggtttgaaattagggtttccagtggagagaaaatcctcgtattgttcatattttgattgctctgttggattttctgtgattgtgatgatgagaggtttttcttcaatgtttgagaggagactgagagattcttcagcgacagagaggaactcagagtcaacgaagaatacttttggcttcgttttctccagcgccatcgcaagcatctgagaatcgaatgtcgtgttcaacacgcaaagtactgctccagccatcggagctccaaaataaagctcgcataacgcaggaacatttggcgctaaagcagccacctgataaaagaaatagtttaaacaaaagaaaaaagtatgaccaatatataaaagtcgtttaaccacttacaacgtcatggcgagagagaccaaggtcagagagagcagatgcaaggcggacgcaacggtcacgtgtttggtgccacgtgtactgaatatcaccatacacgacagaggttctggagccgaagacgacagcagctctctcgagaaagctgatcggagaaagcgggacgtaattcgctgagcacctcattgttccttccatttcttttctattgttattctctattgagctactaaaatcatataaaaattgtggagtatttataggcaaactattttgtgtaacgctccaaacaattaatatggaatctttgattaatatggactacaagaagccaaattggcaattaaatcagaatctgtgaagaagatttgtacattgcaacatctgtttagagaatctgagttgtcacaacttttttttttgaatctaatcaccactcggctagttgtcacaagtgtagaggagctttaatttacaaacagttcttatctttttatttttttgggtcaactaaacaaatcttatcttatcttatactaataaaacttaagagtaaaaacaaagtaacaaaaaaggcacacaacattcaactaatgggcccaataaactaatgggccgatccaaaatctaaataagaagtccataagagtgtggagctttaacgagagaagctaaattgttcaaagctttttggctgctaaaaaggaaaagggaaggttcaattagggtttagtgaatcgacgaagatg

SEQ ID NO: 31476 - DNA, 3003 bp, Unknown
  misc_feature (1)..( 3003): 2750-1469P.txt file - cDNA_ID_3042486; gDNA_ID_1972155; Annot_ID_179469
atatttatttttctatcaaaatgaattgcttaaaggtgaaaacttgtgaaagatatttccaggtttctaacattatatacataacatagtctccattaatcatcatgaatactaccccaataaaaagtaaatcaagaacaaaaaaaaacataattcaatcaacagcacctgatacaaaaatatcaaactatcagtgtgcttaaacaatgaaacgacataatagtattaaactatcagtgtgcttaaacaatgaaactacataatagtatcaagagaataatacttgccgagtcatacccattatcatctactgatatatatatttttgtcttatgttaagatcagtctactagaaatgagacttcattattttttataaatgtcaaaataacatagaacatcagaacatataaactaaagcttaaagtttacacttttttttttttttataactttattagatgcattgataaattatcatttcatttactccacagctctcaattgaacataacccatatccttggccatctttctcagaacattctttcgaatcttcccagtgggagtcttaggaacatccgagaagactactgtctttggaatcatcttcatgttcttattcccaagctttctcttgcagaactcaatgatctcttcctctctcgcttcagctccttctttgagcttcacgaaagcacacatcgattctcctaaagtttcgtccggtcgacccacgacccctgcgtcataaaccgccgggtgactatagagaatcccttcgatctcctttgatcccacgatttctcctccgcatgttataacatcttgtgacctatctttaaattgtatgtagcttcgcatgtggaaacatcataagcataaataaattcaaagtaatacattcaaagtaatgcatgattcatttacttacccatcaggatctataacacccatgtcgcgactccagtaccatccacctcgaaaagccgcttcagtggcttccttgtccttgaagtaaccgctcatgactgtatttccccggagagcaattaccctgatagtctttccgtcgtgtggaaccgatttcatggtggttgggtccaatacatcgacagcttccttggcgaaatggttgagaccatctcttgccttgagccttaaactctcctcttcaggtagagtctcccactcgggcatccacaaacaagctgttcctagtccatacacctccgagcatccataagccatcatcactttgaatcctagcttcttgagtttcaacatgacctgtccaaataaattaatatctttactatgattctatgttaaatattaatgtactgtgacggagctaacgtataaagcaagggattgattatatataacctcaaaatatggaagttcaaccaaataagcctgattgaacaaacatgtaattcaaaactctgtgatagttagttttacctcaggaggagaggatcctccgctcataacctgtacggtccatggaaacgacttcttgaccgagtctcttgcattagcaatcatgttgagaaccggaggcgagccaccaaagttagttaccttgtgcttcacgatactatcaaatataacttcgtcgttgacttccctgagacagacgatgactcctccaaaagccgtaactgtccaaatatagcaccacccgctacaatgatacataggaactgtacatagataaaccggcattggtttcatctcattcataacaccaacagcagttgcgttcagataggcaccgcgatgactatagacgacacatttgggagtcgatgtggttccagatgtgaagttgagggcgattggatcacattcgtcaactggtcgtattggtttgaaattagggtttccagtggagagaaaatcctcgtattgttcatattttgattgctctgttggattttctgtgattgtgatgatgagaggtttttcttcaatgtttgagaggagactgagagattcttcagcgacagagaggaactcagagtcaacgaagaatacttttggcttcgttttctccagcgccatcgcaagcatctgagaatcgaatgtcgtgttcaacacgcaaagtactgctccagccatcggagctccaaaataaagctcgcataacgcaggaacatttggcgctaaagcagccacctgataaaagaaatagtttaaacaaaagaaaaaagtatgaccaatatataaaagtcgtttaaccacttacaacgtcatggcgagagagaccaaggtcagagagagcagatgcaaggcggacgcaacggtcacgtgtttggtgccacgtgtactgaatatcaccatacacgacagaggttctggagccgaagacgacagcagctctctcgagaaagctgatcggagaaagcgggacgtaattcgctgagcacctcattgttccttccatttcttttctattgttattctctattgagctactaaaatcatataaaaattgtggagtatttataggcaaactattttgtgtaacgctccaaacaattaatatggaatctttgattaatatggactacaagaagccaaattggcaattaaatcagaatctgtgaagaagatttgtacattgcaacatctgtttagagaatctgagttgtcacaacttttttttttgaatctaatcaccactcggctagttgtcacaagtgtagaggagctttaatttacaaacagttcttatctttttatttttttgggtcaactaaacaaatcttatcttatcttatactaataaaacttaagagtaaaaacaaagtaacaaaaaaggcacacaacattcaactaatgggcccaataaactaatgggccgatccaaaatctaaataagaagtccataagagtgtggagctttaacgagagaagctaaattgttcaaagctttttggctgctaaaaaggaaaagggaaggttcaattagggtttagtgaatcgacgaagatg

SEQ ID NO: 31477 - DNA, 3000 bp, Unknown; identical to SEQ ID NO: 31475
  misc_feature (1)..( 3000): 2750-1469P.txt file - cDNA_ID_3042486; gDNA_ID_2684231; Annot_ID_137621

SEQ ID NO: 31478 - DNA, 3003 bp, Unknown
  misc_feature (1)..( 3003): 2750-1469P.txt file - cDNA_ID_3042490; gDNA_ID_1972155; Annot_ID_179465
catgagaaaataatggattaacaaaataataataataatataacagaaacaaattactcgatgttaaaatgctagttttactagactacttatattatcatgttaaaatcactttttcaaacatgaaatgtcaaaatgttctaaaatgttatgaataatatcaactcaataaacgtaaattgatactcaacaaaagtttataccaatgtatatatatatttataatacttaatgccatactgcgcattaaccatttacttgataaaaaatacacgaaaaagcttacggattcacatcatcaccacgccacacattagcatcatcatgccacgcattagccatttcgtaaaattattaccataaattaaaaaaatacaagaaaaaacagaatacctttttccatacaaacaatatactatgtgaatttacaagctgtcagattaatcaagatcttctttatcaggaaacgtgggtccggataaggtaaggggtcaatttcagtctcggactagtcggctacaaaatcttgcgagttgctaaacaatagaaatttcaaagataatcataacttcaatctcaacctaacagtctcatactattaactatagaacccgaatcgagaaagaggcaataactcatagtattaacaaatatagtcaacaattaattgctatcacacccatatcttagagacatccgttaatacctttagaagcgtcatttttgaccgcaattttgttataaagtaacgaggaaataaaaaagaatatcatattggatgggattgtgacaacatcaaataccaaacccatcatcaaacaaaaaatcccttcacatgagtaacgtacggatcaagaaacggttacaccaaccctaaacctctccaactaaacggaggtccccgctcctgatcactttcttatccttaattatatattcccgaattttatgcacttaaaaatttaatgtaatactccaacatttaattaattgaaagttagtgaaaagaatttataaggtaaggaagttcaaaagagtcgataaattaccttaatgccattgggcgaattcataggtgtgaggactcgaaccatcggctcagtctcattgattggcttaggctcaaagatacgaacccaagcaagtcttggtgcgtccttaagtaaccgaagtttgaaagaatttttgtcgagaggactattaagaaacaaatcagcattaggataaaccctcaagatcttctccataatcgacggtccggttaactcaaaccgcctcgctcctcctaccaaacacaccgcaatcttcgacttaaccaactcctccctcttcctccgccgtcgattttccatctcctccgcttggataacgtcgttagggttcgaatctgacaattcgacggtgaaatcggtgacggttagggtatgagtgtagattaggttacgaagaggggctagagttggaaaaggatcaagtgagagagatgagaaagagattaagacgaggagggtgagagatgggattatgagaaggaggagaagacgacgatcgacgtcggagattctcctggaaacgtacataacggcggcgtaagtgatcgtaaccctaatctgtgagaataaccaccaccgtggattgttcacacacgtttcatttgccgagagagagatttttgtatttatagagttttgattttcttcaaaacttttgaagtgattcggagaggcgctggtttgttggagtggaaggtgaaatcaacattacgcgtgggtttggttttcgttttctcttttcttctagagagagatatgaaatatctatgtagctctgtataaaaccgatgcataattaattaaaatatacgtatttgattacgttttcaaaaaggaaatgatcaatgttacttttgtttttttcacgtttctttgtttgcttagtaaataatttatgaatgtttgaaatactttggtgaatagttttagtgctcgatcgttacagtaatcaattcgaataaactcttcactaaatatgctcgttacagtcttcacgtttattgtaactgttagacccccactcattgtgtattaggggatgttgacaagtatattgaagagattgatatcttgaaaggcgtacgtggactagtaaagaaatggatagtttgggttgcaagaaaagttttactttttgtattcaacaaaaggaaaagaaaagtattttttgttatccaagatatgactttatgtagtatattcatttgagagcattgtattaattagaatgttcacatatatcaatatataattatatatagaatttgctcttcaattgtaaagaagaaatgaggttccaaatttgttattagtgctctaaacatatatttttattaccttagaaattaatatataatatttctttctttgctttcccatgactttttactgtttttggtaacaagataatactttccctagtatataagatttttaaagcttttttgttgttgttcccaattagtttttctctagtttctagtcataatttatattaattccatagtttatgattatttaaattatgcagtattttttattggttaaatttttattaatgataaaacatgtgattttagccaaaacatctaataaaatgggacatatggagtactacaatagtgatagatcttttatttacctgtttattatatatgaatctattcaattttcatttatttacatgtttatttaaattatttatttaatttgcatctaaaatttgcaaaactattgttgggccatgagtgtcaactgtcaaatgtcaaccatagaagcaaaaataaaacagtttatgattcagtttgtaaaagtgggcttatttaaatgaatattggcccattagtatcatcttcacgaaacccagcaaaatcagagagcggcaaatcgttgaagagagatcttcttcttcctgaatccgtaacgttagctcaggcgtaagagcataatg

SEQ ID NO: 31479 - DNA, 3000 bp, Unknown; identical to SEQ ID NO: 9572
  misc_feature (1)..( 3000): 2750-1469P.txt file - cDNA_ID_3042504; gDNA_ID_1972155; Annot_ID_179452

SEQ ID NO: 31480 - DNA, 3003 bp, Unknown
  misc_feature (1)..( 3003): 2750-1469P.txt file - cDNA_ID_3042510; gDNA_ID_1972155; Annot_ID_179445
atcttttatatgacgacgacgttggaggataacaaatcaattcattagtgtcaccttacaacacaaaaatatactaatttgattaaaaagttacaaaaatggtgggattaaccaacaataacaaaaacaatgtcaaaatcttcaaactaagcttccatcattttgcttagagactatgacttgctctttcatcaattttcttatgaacaagaacttggtctgtgttttgtccacagctgccaaagtttaggtctggatagtttctatagttcaaggaatgtaaccaaagagccatatttccgtattttcgctctgtagcgccgatatgagaatagatatgcttcaatttgaatgcttcagcttcttctttgtatgcttccatggacacttcttcatgactgtcttcaaagtttctgttataagacgtgaagaagcattcgtccagataaagtccaacttctggcgccattggtacagttatattcacatccctggttacataatttccgaactgagtatcaaaacaaacaaaactatagacattgcaaagcttcaaaaccaaagaaaaaggagaagcttacttgctgaaagcactttggataagtgattcagaagcacaattccgcatgattgcaacagcaagacccatcatcttccgaatctgatgaagcataaagcttttgcctaagacttcacacttgataaagtcaatcccatcaagattaatcacagtattagcagtgaaggagatgatttgacgattcgcagtcggatcatctgcttttgttcttgtagtgaagttatggaaattatatgatccaacataacaacttagtattctactgaacctttccttttccttttcaccataacaaaacttgctctttaccttagtctctgatgaatttgtattcaatttacaactgtcttcttgtatcctacctacttcaacatctactgagcataagccagctaaattagaactcaaagcttcaatcttgatgtcacttcttaatgcactagagttgttcgacgaaatgtctgactgaaaatccaatgatttagtcccaaagttggtacctttccatttacccacaagacctggaggaatcttacgacctctctctgagcactcaaagcacttaacatattcctctcccggacccaaactagccattactgtttctctatcacgatgcgagattggatcaagagcaaacactggaagcagatacacataccttcttcgatcgcaaaacttcttggagctaaacgacggcgttacatgcttgtaaccgaagattctaatctgattagggagatttgaattgagacgattcacgaatccaagtggatcaacgataaagcgacctgaaactacttgtccaacagcactaactcctttatctgtccgtgcagatcgtgcgaaatcgtatagttttggcttgcctctaatggactccggtacagctccggcatgaaacaaagcttcttcgagctcgccttcaatggttttcgcgccgggattcttttgcattccttggtatcctacaccacaaaacgcgaagattatagcaactttttgaggctccgtgacacctccgtcgcaggacaagtctatttcctcatcggtggtagttgtcaacatattgagctacttctgatctgattctcaatcaggaacctcgaaccgggggaaatctctcggttttcaaactcctgagcctccattatagtaacaagagttcatcgaactctctattttccagctttcctctgcaacaacgttaatggctaccgcacaaaagtcgaaacccttgaagacgactgaggtatgcttctctacgacggcgtttttgatatcagaccgctctttaactgggcctataattttgttttatatatgggcttattagtctcaagcccaaatgtttctcttataattcaagtcaaatttgaaaaagtcaactatatccattgagcacacatctttggaaatacagtctgttctagtgggcaaaagaaagagagaaaattatagccgttctaattgtatcaaagtatgaaactttcaaatctccttgaggtataggcgttgttgtcttgctgatggtacacgcgtcgtatgaaaaagcgtacacaaatcttatttcaattgaagttatcgactttattctaacagtcaacgcgtgtctagatttttcttcaggtggacgaagaagaaaaaaaaaaactactttggcaaattatgaatcttcgtttctcgattgagttttaaaaccctaaaaattcaaaagagagaaaaaaagacatagcttttaatctctgagattctctgctcaagttgtttacagctttctactttttgaagaaggtattgtattctataattggctcatctcttgatgaataccgtagaatcgaatcgacactttgtgtttgtgggtatagtccaatttgctcttttaattcttcttcttcattgtaacatttataaaaggtttgttttttgtgtggccgaaagttgtttgacatttgattctgattcgtttgggatcagaaactgtttaatcacttcacgttctctcttcggctctatatatatatatgtaggattgtttctttaagggacttgtgtgatttagcttcttcgtttccttggtatttgatcttcttttatgtgtgtgatcttgttaaacagaattttggttagcctataatcaatctcaaattggaaacagaattttgtttttgtttcatttatctgtcatgaaacaaatgttgctcttcactgatttttttatcttagtggaaatgtttggaatttaggatcttttgatttattagtttgctgcttcagaacacatactggtttgtgtctcaatacgcttattacttattgttttggatctctctgaaatggtatcattctgtatgcaggtaatcgttctgttttttcgttgattactgtttgaggttttcattgaatcttgtctcgacatg

SEQ ID NO: 31481 - DNA, 3000 bp, Unknown; identical to SEQ ID NO: 9567
  misc_feature (1)..( 3000): 2750-1469P.txt file - cDNA_ID_3042522; gDNA_ID_1972155; Annot_ID_179440

SEQ ID NO: 31482 - DNA, 3003 bp, Unknown
  misc_feature (1)..( 3003): 2750-1469P.txt file - cDNA_ID_3042532; gDNA_ID_1972158; Annot_ID_179502
gatacttagagagaaactagagcaagatccaacacatgtccctgttattacatccccggatttagaatccgagaagcagtctcaacgatcagcttcatcttctgcttctgcttacaagattgctgcttcagctgcgtcttacattcactcttgcaaagagtatgatctttcagaaccaatttataaatcagctgctgctgctcaggctgcagcgtctaccatgaccgcggtggttgctgcgggtgaggaggagaagctagaagcggcaagggagttacagtcgctacaatcatctccttgtgagtggtttgtttgtgatgatccaaacacatacactaggtgctttgtgattcaggtaatatgtgttcaaagttactactttcaagcaaatcctctgtttcctcacatcatgatccttgaatctgctagctaattagtgttatgtcgttgcagggatctgattctttagcttcttggaaagcaaaccttttcttcgagccaactaagtttgaggtaaagatcttgatcttggctagggatgtacatttggtttttgattcggttatttaactcggtttatccaatcgcttaggttacattacaattattttggtttgtgtttatcctagagaccttaagatattgatatgaatgtcgcaggacacagatgtattagtccacagaggaatctacgaggcagcaaaaggaatatacgaacagttcttaccagaaataacagagcatttgtctagacatggagatagagctaagtttcagttcacgggtcattctcttggaggcagtctctcattaatagtgaatttgatgcttatctctagaggactcgttagctctgaagctatgaaatccgttgtcacgttcggttcaccgtttgtgttttgtggtggtgagaagattctagcggagcttggtcttgacgagagtcatgttcactgtgtgatgatgcatagagatatcgtcccacgagccttttcgtgtaattatcctgaccatgttgctctcgttctcaagcgtttgaatggctccttccgtacacatccttgtctcaacaaaaatgtaagtcttactataatttcctttttggcttaacgttttgaacatcttaaattaaaaatacggatgttgaagttttttggttgtgtttttgcgttttgacagaaactgttgtattcaccgatggggaaagtatatattctacagccgagtgagagcgtctcgccgacgcacccatggcttccaccgggaaacgctctgtacattttagaaaatagcaacgaaggttactctcctacggcgttacgagcatttttaaaccgccctcacccgctcgaaacgctgagtcaacgcgcagcttatggctcggaaggttcagtcttgagggaccacgactccaagaactacgttaaggccgtgaacggagttctcaggcagcacacgaagctcatagttaggaaagccaggatacaaaggaggagtgtttggcccgtgctgacatcagcaggacgtggattaaacgagagcctgacgacggccgaggagatcatgacacgtgtctaatgaaggaaaatgtacggttgtatataagtggaatcacttctgattatgcgtttatttacatttcttgtgggtgagccgaaacaagcgaataaaatattgtaaagaataaattattctaaacttctaaaatattgtaagcaaattatggttggtggagattggaaaatttggttttctccaactccatggatcactcactcccattcgatgcacaccgttttacaaaaatgggcatatattagcaagaaataattaggcccaataataggcttatgcaatttgaaatcttcttttcgatagtaaggcccactaattaaaccaggcgtatttattaaaaaagaaagaaaagaaccatcctttaattttgttttttttaaaaaaagggttttctttttagttttatcaatgtctcatatatattcattaatccataaatacaacattcgtataggagatttggtttgaagaggcgattctcatatatatacgtacacatcaaaattaaatcaacgaatgacttcaatgtcgtttatggaatggtttcattttgggccatgagaaattagtaaggcacgtggaaaatttgcgtactcaaaatagaaaacacgtacattttatcattttaattggttttattattgataaaaacagaatatatcattattgcgttgtttgtgtgtgtgactttacaattattttgtaaggcatagttttaattaaatgtcaataagctatttaaattatgatacaatgacgaaaacgcccatggagaagctgagattcaccgggattgcctatcctcgtcaccaaacactcccactttttcctcttcctcccagaaagaaagaacgaaagaaaaagaataatatcatcaacaacagaagaagaagatattaaaaaaaaaaaaaaaaacctaatcaaaatatatagatgttcatttttggtcatgtcttcttcatcatcttcttccgcacgatttcagtccgccagtggtaaccttgatcaatctcgcatttgcctctcgattcgtcgatactgctagattttctctcgatttatcctctagggttcttattgatttccgccacccactctctgtttttagaatctaactcccgtctccttcgtttcctcctcctagggtttccttcttcttcaattcgatttccccttctccgatttcgatttgattctttacaaatttgtctgtttggggttattggattagccagatagatccaaggttctttaggctcgtagctatttgatttgttttccccatttccggtgactttgaagctacgattcatcagggaggttgcttattagcaaccgttgaagaaaacgtaacggttggtttaaggtctttgtttggattagaggggtaagctttcgtcggtgactgtcacggcagagatttgcatg

SEQ ID NO: 31483 - DNA, 3000 bp, Unknown; identical to SEQ ID NO: 9585
  misc_feature (1)..( 3000): 2750-1469P.txt file - cDNA_ID_3042543; gDNA_ID_1972158; Annot_ID_179497

SEQ ID NO: 31484 - DNA, 3003 bp, Unknown
  misc_feature (1)..( 3003): 2750-1469P.txt file - cDNA_ID_3042578; gDNA_ID_1972159; Annot_ID_179557
aaacactaggtaaatgatttttcttcttttgaaaagcattccagtgtattgtttttaggacaaaattgcaaacttttttcttttttttttcgaaaaacgcaaatttgttaaaagtattgattggtaactgtattgtagttttaataaaaaaacaagaaaacgccttttgtatgtttcttaatcacagtgtatgaatggtgacatagaccgcccccaaaaccgtaccgtaactgtaacagtataaaaaatctctatatatacatatatatctatgtatttttgttattatttgaaccgtcccatactttttccgtatcacaaaatacagtcatcattcgaaccgcaaaactatatatagtatttcggtttttgaattcaaaatgaaggagaagaggaataggcagattaatataatttcgttatttctttttaatttcctatcttcaatttttcctcacccactgaatttgactatgccattaaaaatgtgtatactaatcatcataccgtcaataaatagagtttgtgggaaacacacgacagacacgtcatcagctctcgacggcgcgtttccatgcctttattatccttcacgttgaccccacatgcccctgttttttttttttggtgttctacggtatatttttgtgaaaatgttacttttcatctactcgataaaattcttaaacagatagtacaactttttacccgattaatctgtagaaaatacaatgttatttacactcaacaaacatttccattaatagaactttacccgatttaaaccactcttccactcgattaatattattattttattaattaaagatacgatgacgtgtccatgagagatgagctttagtggcacgcaacgtaagagaagaagacaaaagtaaaaaagagaaaggcacatgtcgaactcacgtgtccacttaaacgcaccaccttcttctgtgctctccacgcgcctccacacgccctcctcaacttcggaccttcttcctccaaaaaaaacaatttcactcttcattttctcagattctcttattatttcttctactcgtttcgaatcctaatcgtctacagtttccgacgagattctcaccggagaaagaaaggtagttcttttctctgaatctgttgtgttgagaacttagccgtaatttttgagaattattcttcactatttgatttgacaagaatatgggtaataaagacagaatctaaaacacttgcttcagtttttgaggaatcaaaaatcacacgaaagttttttttttttttctgctcctatgtttcttggtgcgtttgtgtttatttgacattaggagtgattgattgattataaagatgaatgatttgttagattcattaagatcactgttctttttgattaatcatcttatgtctaaattttaggtgacttgacagagaatcttgttctgtaataaaagcaaagatggtatcgaaaactccttctacatcgtctgatgaagcaaatgctactgcagatgaaaggtgattcttaaggagacaattcttggaaatagattatggaaccttttatttttatttatggggattgattatgtttggtgtataaaacagatgtagaaaaggtaaagtaccgaaaaggatcaacaaggccgttcgtgagaggcttaagcgtgagcatttgaatgagcttttcattgaattagccgatactcttggtaaatttctcatctttccgtagatttgaatgaacaattgctcgagtgtgttgtgatattttgaatgtgattgtgatatctaactgtgaacatgtttctttgttgcagaactgaatcaacagaacagtgggaaagcttctatactatgcgaagctactcgattcttgaaggacgtgtttggtcaaattgagtctcttagaaaggagcatgcttctctcctatctgaatctagctatgtaagtcaatttctatatgcacattgattgtgtttatgtattctgtgacgtgaatcaacaactaagacgaatgttgcttcaagaagttacttcatctttgtatttttctaaatggtcttgttgatggaaactggtgttgtgtgtaggtaaccacagagaagaatgagctcaaggaagaaacatcagtgcttgagactgagatttcgaaactacaaaacgagattgaagctagagcgaatcagtcgaaacctgacttgaacacctctcctgcacccgagtaccatcatcatcattatcaacaacaacatcctgaacgtgtatctcagttcccaggacttcccattttccaaggccccggctttcaacaatctgctacaactcttcatcctcctgcaacagttcttgtccttccaatacaacctgatccccagacacaagatatctcagaaatgactcaagcgcagcagcctttgatgtttaatagctcaaatgtgagtaagccatgtccaaggtatgctagcgcggctgactcgtggtcttctcggctacttggagagcggctgaaagccagtgaatgaggtcttgaacggctccacatggagtagcaacgcaagttataagacatggcaacttatgaaggactctggttttgtattttttaatacatcgttctgatgtccttgtgggtttggccttggctatttcttgtttttgatggttgttcataggatcaggaagttatggccttgatgggtcgtttgagataaataagtaaattagctctaaccattgtcattttcttttgtcttaagattctaaaaacacagaaacagaacaaaaaaaatcaaatttctttttaagaaaaaagctttctaatggaaactaaaatgtgaaattgggtttaaaagacaaaaccggttaataggttttggtttggattggataaagaatatgatggtattttggtaaaataggcacttgagaaaaagagaagtgagaggagccatcttatctttgctatcgagtgggtaagaagaatcagaaaacagaaaatg

SEQ ID NO: 31485 - DNA, 3000 bp, Unknown; identical to SEQ ID NO: 9594
  misc_feature (1)..( 3000): 2750-1469P.txt file - cDNA_ID_3042580; gDNA_ID_1972159; Annot_ID_179555

SEQ ID NO: 31486 - DNA, 3003 bp, Unknown
  misc_feature (1)..( 3003): 2750-1469P.txt file - cDNA_ID_3042584; gDNA_ID_1972159; Annot_ID_179553
aataaatagaattgtagaaataaaacagtacatatatatatagagaattatatatgaaaatattattttgatttgtattttggtatagtgacttataaatttatttaggcaaaataaagtagataaaatttcagtttaaagtacatgtcaaatgtaccaataagatagcagaattttttttttggaattaaatgtttgtcataaggtattaaaataataaattcaaataaatttaaagaaactaaatcactattaaggaggacaaatgtcacccaaagagagtgccaaatgtcgcaatggtaggaaaagttagaaaaaaaccttgtcttattatataagatgtccacaatacctaattatttccaaaatcgtaactaaggattcaaattgagcctagacacacaaaacgaaccatcaagtacatggtaattttttttattagtaaatgataaataaattatgtttaaccgtaattatagtactagggtggagaattatatgagatccaaaatccaacctaaaatataactttttctttttttaacacatgaaatctaacttactatgctcttgataactggtcatgaacatataatttttctagattcatgtataagtttccaagagtagttttctaaaatatttgttatcatctttacattttaatcttttgatctgtaaaattatacctagtacatttgatatacaatacaattttgcaatcagctcctttctttcttttgatgagatcagtcagctcctttctagtagctctttaattgctaggacactacgtaatacatcggtgtagatgcatggaggcgtgtatggccaggatgcaaccacctaaactctgtccggatatggaaagcgacgatctcggacaagacattggcaccgaatatcatcaaaagcaaagcaagaccacactttgctttcttttgttgggtatgtttgtgggagcccactccaaaaagcaatattttatcgtatagctcgtacatggtccccatttgaattatcacgtgtcgctatgtgatcacttggacgattctatacttacgctctcttccatcgtgtccgttgaaacgtgtcgacgggaaaaagaaaaaaagattaattacaacaacaagatctcgatctttcaatattaagttttggaatttttgcaaatgcatgggctatatgttgttactattacttttcatatagtgatttatgtattaaatgccatttttttgctgtgaaatcgctaattattggtcattttattcatactatataggaccatggtgacataatccgatccaagagcttgaggtctgtaagtcaattttcatttggatttgttcacattgtgtttaatgatatctttaagatgttggtatcattaagaaattaaattatagtttattcctttgatttatatatattaaaaacatcaattcaaagaattaaattgtagttttttaccggtatattattgtagctaattcgggatagtaaactcatttatcataattatgttagttaaagctaaatatcaatttccatgtatacggtttgttatgtactctaaaatttacaaaaaaaatatagcttctataaattagttttgtttttcatatgagatcagtgagttactcaaagtcttaaacccatcgagataaaactagtctaaccaatacaaactttatgatgacaattttgagagtttaattgaattgtcatcatcctaaataaatgttgatcatctcatagatcatgtatttataatataatctgacgataacccacaacaaattgttcagtaagttcttcgaatccagtcaacaaaattatttgattataagacatgaaaattaaattatgatcaatatcatttaatacttttccttccactgatttgacacaaaatatatactttttcttccactgatagttttctaatttctatccactgagagacttaaatttgtgactttggaagaaaaaaaaatctacttatgggttttatacgagttgaactattgaaataatgattgatgttgggttatatacttgtcattttctttttttaatatacttatcatcttatttaagagaattctaataggtaaaaaaataatagtttcgagaattgtgttgggatgttgaaaatgaggattgtcggacacaggcagtgcgaggtgggggtaagaaatgttccactaatcaaatcatattgggaccatggactatggaccatgtaccatggcttatacaatacaaacttatttatttcgttgcccacttcataaaagctatgtcaacattataattttcgaaaaaaaagagaggatgatacttgtagaaaatgagtttaagttgctaacgtaattaagtttttttttggtaaagtatcttattatttatttataaacgtaaaaataaactacactcggacactctgcgtaaccataaagctaaataagtttttgaatcaaataacttaaagtaaaatgtcaaaaccttgcacttcaagaaattatcttttgtcgtctacaactcacatgtatgtataatatcgaatcgattcgaaccatagcacatcaacgatattactataaacttctaagttagaagctctagttgtgtatatcaaatattaaaaatgtgtgaaaatatgaatcatctgattgtaggaatgttaattgggctataatgattaatgaggtctaaaatgatataaatgtttatgtcaagtgatattaggtcaactaatttaggcgttccaaattagtaagaggaacccggtaaacgtaaaattgaaagaagaaacccgggtttaacatgtatttgggtttaagttcaaatatagcgagacatttaggcccgtttcacaatattgggccgagcccatgaataaatacaaaatagtatttttgattggagaggatcggccctttcttgtcgtcgtttcgaagagactaaaggcgacggagagaatcggagaagaagatg

SEQ ID NO: 31487 - DNA, 3000 bp, Unknown
  misc_feature (1)..( 3000): 2750-1469P.txt file - cDNA_ID_3042591; gDNA_ID_1972159; Annot_ID_179549
gtgggcagctatagcatcatatcttccagaaaggacagacaatgatataaagaactattggaacactcatttgaagaaaaagctcaagaagatgaatgattcttgtgatagtactatcaacaatggccttgataataaagacttctccatatcaaacaaaaacactacctcacatcaaagcagcaactccagtaaaggtcaatgggagagaaggcttcagacagatatcaacatggctaaacaagctctttgtgatgccttgtctattgacaaaccacaaaacccaactaatttttctattcccgatcttggttatggtccatcatcttcttcgtcctctaccaccaccaccaccaccaccacgagaaacactaatccatacccatctggggtctatgcttcaagtgctgagaacattgctcgtttgcttcagaattttatgaaagacacaccaaagacctcggtgcccttgccggttgcagccaccgagatggctatcaccacggcagcttcgagccctagcacaaccgaaggagacggagaagggattgaccattctttgttcagcttcaactccatagatgaagctgaagagaagcctaaactaatagaccatgacattaatggtctaattacacaaggctctctttctttgttcgagaaatggctctttgatgagcaaagccacgatatgatcatcaataacatgtcactagagggtcaggaagtgttgttctagaaagcattaaagtttgacgatttgcttgaggaaccacgaggcttagttataaacaatttgtataattaagtactctttagttttgttttcaatccttattatgatcatattgcagtaattagggattttagtctttagtagtaactcttaagttttaacacatttttctctatctttttagtagtaactctttattttttccttaaatctttgtcgacgtggagatgatatcttctatgtagtagaaactcaaaagtgtacatcatctttattaatgtaacgtctttttaatcgtgtgactcatttggttatacaaattcatgtcacttaattagtattgatatggttaggtttcagattttatgtttccataaacttcaatcagtaggtagaacaaacttttctcctcattcattatatagattaagattactttaaactgtttaatgtactaaataatgaagttctataataaagatataggttcttttactggtgagatatttcattaaacaaacaaaaaatgagttgttactaaaagaaaattaaagagcaaaatctagttttgtatccgattataggaggcaaaatctagtgattcatagaattatgtaaaactaataaaataaagctgctaattaacaggagaggcaaaaaaagaagaaaaaagtagtgaatttaatgcagaagaaaatgtgagtgtttgtttgacttatgcctgtgttgagcacaacgagcatgatccaagtagagatgctttaccttagagacatcacacatattttaatgtcacactgtctcacacccaactcgttgactttttttttgcttgagtctctaataaatttcgggcttagtaaattaattggctgaaaatggaatttatggaatttatttgactgttctgatctatttttcaatggtttaaaaagtttgttttgatagttgacgaacgttttgtgagattgaacagaataaaccaaacaaatatttcaattaaaaatagtgaaaatattttaaacataatatgatttgaaacaagttaaattattttttgttatacatttgatttaaaaccgaatccgaaccaaaccaatatttttcatgaaaccaattttattggaccctatttttccaaaacctgaaaaaactgtaaccctaaaaacctaaattaaccacaaaaaccatgtacatgcctctactactagttttgttaagctgctgataaacatatgttacttactttaagcaatgatcaaatgtctactagtattattatttttgtttgttttccactgattttttttcctcttatggaactgaaactgaatcgcactacaagtctacaagaaagtatagtaaagaagaagaaacacgaatatgtgatcaaaagggaaaatgagacaaggcctaatggctaaaaaacagagcaatagaagctcaagactttagcaatccaagatcaaaacaagttaataggtttttatggaattcgtttaccttaggatgtgcacacttttgatattttctacgtccaatatctctttcgtttttcacctgaaggaagatacacagagagatttgagaagtatattacataatagtttcaatcaaaactaaagttaaatcacagtgatttcctttattttgatttcacctctataaattaaattgatgatttaaatccaagccgataatgaaatgatgaattattatttataaagctcaaaacacaacttttcgtattttgtcgacaaagagttaaacttcctcaaagaattagctttctggattgggctatttaagttgggtcacagcttataaactgaattgttggttaaacttttagtctgtcaagccttgtaagtggaagttttcactgttgtactttttacaacataaattttaaataaaatgttacacttttgagaaaaaaataaaatttttcattattagccttatatagtagtccaaatattatttaagaaaattcttacaaataaagagtttttaaaaaaaattaaaatttcaagtcattttccttttctcactaaaaaataataaactaaactctcatcatcttcagtcaacagttcatgtgatatgaaacaatgagaactcttttgcacaacttcaattttgtccctcaagattctccttattacaaaacgtccccttttcccacatcatccttcttcaacgttcgctttcccatcaagaacaaccaaatctcttgtaacaaagcaaagaatttgagaatg

SEQ ID NO: 31488 - DNA, 3003 bp, Unknown
  misc_feature (1)..( 3003): 2750-1469P.txt file - cDNA_ID_3042594; gDNA_ID_1972159; Annot_ID_179548
ggagatcttcgtaatgcgacgaatggcttctcttcgagcaatatggtcgggtctggcagttttggtaccgtatataaggcattgctcctgacggagaaaaaggttgttgcagtgaaagttttaaacatgcagagacgtggagcgatgaagagctttatggcagaatgtgaatccttgaaggacataagacatcgtaatcttgtgaaactattgacagcttgttcgagtattgattttcaaggaaatgaatttagagctctcatctatgagttcatgcctaatggaagtttagatatgtggctgcacccagaggaagtggaagagattcataggccctcaagaactttgacccttcttgaaaggcttaacattgccatagacgtggcttctgttttggattatctccatgttcattgtcatgaacctatagctcattgcgatcttaagccaagcaacgtccttctagacgatgatctaaccgcccatgttagtgactttggtctagctcgtcttctcctcaaattcgacgaggagtccttcttcaaccaactaagctcagccggtgttagaggaaccatcggctatgccgcaccaggtatactatcacacatctgtagcattatatgaagaaaattagtatctatcctttctttttatcattacagtcttcttaacattgtttctatgaaatatggtgcagagtatggagtgggaggacagccatctataaatggtgatgtatatagttttgggattctccttttagaaatgttcactggaaaaagaccaaccaatgagctatttggaggaaactttaccctgaacagctacactaagtcggcattgccggaaagaatattggacattgtagacgaatcaattcttcacattggtctcagagtcggtttccctgttgttgagtgcttgacaatggtttttgaggtgggccttaggtgttgtgaagaatctccgatgaaccggttggcaacgagtatagtcgtcaaggagttgatctcaatcagagagaggttctttaaagccagtagaacgacttggcgttgaagtgtttggttttgtctacaaactttgcaacccaataaaaaggcttataatatcttatttcataaattggggttttgtctaagaatgcttgtagaatattgctaatgaaatgcttgtgttaattaataaaaatgtatgaatgttgtggtaccaattttatatggagacaacgtagctttatagttgcaaatccacattgttcccaattttatttggattctctttgttttggtaatgtaaagttctgaacatggagcaatagatcgatgttcaacgataagtaagtaagccttgtcgtcttggtaattgcgtttactaaaagtcccacaagtgggatatggagaaaatacatctaatgccggtcagatcatgaaatgagatcgacgtcaacatttctagcataaaattgacttttgttggcacagtgatcacgacattacgatacgttttagcttacaaaaaatcgttaaccggattatagggtatgttacccataacaaaacaaaattgtgagcaactattcgtaacactggtggatattacaagaataatcttcgtttactgtacttttaatttttctctttgaaattttactattttgttgcaactagatgttaatttaggtatgcaaaccctatttaattaatgggtatgtgtaagagaaattgatccatttaatttcattaagaaaaaaagttaaatggggttaaataggttagcccaactaaacatatttattaaatgtagttttacaactaaacatatggggtatccaattaaacctatttatttttcttttatattatttattcttattgaaaatggtaatatgtttatacattaaaattaaattaataaattattctatttaacttcactttttggtttaaatatttgtttttaaactgcaaagctccattttccactaaaaccgtaaaccaatgttttcccgtcaaaatcgtaataccacgttttcccgtcaaaaccacaaaaagtgttttccgcaaaaattgaaaatcatgttttcccgccaaaaccgtaaaccgacgtttttctaccaaaaccgtaaaaccacgttttcccgccaaaaccgtaaaactacgtttcctaccaaaatcaccaaaaatgtttttctgcaaaaatcacaaaaagtgttttcaaccaaaactgaaaatcatgttttcccgccaaaatcgtatgccgacgtttttccgccataccgtaaaaccacgttttctccccaaaatcacaaaaaatgttttcctgccaaaattacaaaaagtgttttccgacaaaattgaaaatcgtattttcccgccaaaaccgtaaaccgatgttttctcaccaaaaactgtaaaccaatattttctcgcaaaaaccttaaacccgtattttctagctaaatttttctttgccaaaagaatattcacccataaaaatctgtaaaataattattgattatattatatagatatagatctaaatgggtttaaatagattaatgataatttaaatagaaaagataaatgaaatataaaattaaaaagagttaaatgatttagagtaaataggatagattttaaatgggatgggttaacccctattaacatttgcgactaaactattttggctttgcaataataacaaatgaaacctgtcgtcagttggtggatttcttaaacccaaggtgcgtgaaaataaatatacaagtgacataagttgtaaacagtaatgactagtgtcatcttttaacaaagttgatttgttgacttagacggcaataatacgtgtcgtattctgtgtggttgtgagccaatttattatcaccacaatacgtaatgaaaggatttgcaattgcttcgtccccttttaaatcagtttcctgcaaagttgataagcacaaaaacattcaaaatataaaaataaactttgagaaggatg

SEQ ID NO: 31489 - DNA, 3003 bp, Unknown
  misc_feature (1)..( 3003): 2750-1469P.txt file - cDNA_ID_3042598; gDNA_ID_1972159; Annot_ID_179547
tgaccgacccgcgcattctggcaatggcggctgcagaacgtcatttcttggaagcagactatgatgaatattctgagaataactcaagcggagctgccttttgtcgctctgctgctctcatcgtaagctctcagttgagaagatgttttcttaccatgatttaatactaaatgcctgcactctaacttctgtaatggcagctaatggcacttttactgttacgagatgcgctaaatctcacaacgaacccagacgacgaggacgatccaactgccttcttctctgtatgttcatctttacttactttcactacttctttataccgtcactgactacacttgtttgtttcaatagctattccttcttcgtgctgctggttttctcctcccatgttacatcatggcatgggccatcggtatactacaacgtcgaagacaaagacaggtgtgtacacggaaaaaactctctgtatcaaactctgttatattgtaagatactcaatctaacagatgagacaatgtactgcttttgtttgtaatcaggaagcagcggctctagctgccgcagaagttactttcatgatacacggtggtgggcctcaacgcagaggactgcactttgctgtagcaccgcagccgccgatatccaatgtcccaacaccagtttgatccttaccggcaatgattctccgttaaggctattagataaaaccttgaacttggttataagaactctacctacttatgcttcttcaaatgttattatcttcctcttatgtttgtgttatctgaatctgttaaatgtctacttcggctctcaaatgttttacaaagagctctcacggtatactatgtacagtcttattattatcatatgattatataagtattatatttttatttaccttttataaatttatttggtcaaccaaacataaataaatgtccaatgcaatattggagggtcaattacaagtcttgtcgtttttttcttcacaatgactctttatgaactccataaccgttaaaaccaattgactttgataattggtataacaatgatcagctccttccacaatctgtagctcgtggttcggtattatctttgcaaactcctttgcatcttccactggtactgtctcgtcacccgatccatggaccgtcaagaccctaccattacatcaatccgggcttgtttataatgtatctcaaacaaacgatatgagttggtgaacttattgaatctcacctgcattctttgtcaatcttgaggcaagcttcatgcatatctgtgtttaaccggtccatcaaactctcctcggtaacacggtaaccagaatctcctgtaacaaaccagtacattgatagtaacactaaagttctgataacggtgcatgaaaagcgaagagcgataacaataccatctttaacatcgatgtatccttgttgcttaattctttccaaaaaatcttcaccaagacgttctcctatgcctttcttcagatcataacgtcccgagagattgatcacattggggatatcgtgatacttggaggcatagaggaggaccacatcacctcctatgcaatgtcaaagtataagttgagtttcttgcaatgtaagattcaccccttttgaaaatccgttgctcgaagcagaaagatcggtactacttacctttactgtgaccgagaattatagtaacaacacggttcaagttagagaagtattggataacagaatgtagatcatcagcttcgtaattgtagttaccataatagaaactgccttcactctctctgaaagaatgaaagcaccacaaccccagagtcaaaacaaagaccaacttattcaagataatgcaagaaagaaaaacatacccattcccggagaaatcaaaacggaaagcactaatcccttctctctctatagcaacagccacatttttcataatttcgaagttctggatacattcataggccaaagacaaaacaaagttaatgcatgcaataactcctaccaacatctgcaaccctactatgtcatgaggactccactttctttgtgtacaaaataaatattcccaaacaacgaagaagcagagctactaatgggaaaacattataatcactataaaaaaagtgaactaaaattatgcacaaatctttggtaagatgttggattgagaaatggacattcaagtaagtgagaaaaaagcagaaccgaaactaaccttgtttgatcgaaagccatgacacaagactacaatttctgtagaaccagtttcatgaagcagacccaccaggttctcattgtggctgttcagaatcacaatcttctgttgtgtacttccctgcgatgaatccattctcaacttttttactttgtttgttgcaggaaatttgggtctccttaatggtaaggcgtgcgttgagaaagataatgtgggacaaccacatgatctctcattgatcatattttggaatttatatatatatatatatgatttctatttaattttctttgtcactcattattttttctctcttttttctagtgtttaaaaaaacttagtttttaccaatcaaacctaccatctagtaaatgtaaatgaataattggtcaatttctacatcatctcctgactcctgttacatgtttataaataaaatagttcatttgctagttgctacaaaagtgccaaaatatttcatcctgtagccaccgcttgatgtctgaagaaaagtcataaagattcgtaaaatgtctttgtttttttgttcctttttagataatgggatcccataaaacgtgtctttgttgacgacttgacttaaattttcgaaaagtggcagtttaatatccctattttttatttcaagttgcattatcactacaggcattttaatttgcaattgcttcgcctcttatatgttcattttcctgcaaaacatgagaagcatcaaaagctttttaaccaccatttgtttttttggaaagcatg

SEQ ID NO: 31490 - DNA, 3000 bp, Unknown; identical to SEQ ID NO: 9592
  misc_feature (1)..( 3000): 2750-1469P.txt file - cDNA_ID_3042602; gDNA_ID_1972159; Annot_ID_179546

SEQ ID NO: 31491 - DNA, 3003 bp, Unknown
  misc_feature (1)..( 3003): 2750-1469P.txt file - cDNA_ID_3042605; gDNA_ID_1972159; Annot_ID_179540
aaaaaaacaaaaacaaaaatataagtgtatcttcgaatttatttattaaagtaagaaagattttacatacatacaaattgtttctctttattggttgtattactgtaagatatatttttctgttaaatatttgatttcatgaaatccagaatccatatcaccagatggtggatgaatttcaatctatagtgtaccatgttatcaaaaaagaaaaagaaaaaaacagtatatgttccacaaattaggcattttataattgccatagttgatattcctaacattagtgaacaaatatgattagtcaattgaaaattgaacaaagcaaattaaacgtgaattctaaagcactagacacaaagcttcgtttgagtcgacccatttgttagtgtaatgactaactataaaatagacacgcgtaattaagtgatcatgcccattggctcccacaattccaccactttaaacagcatccataatctacaagtttttcttattgatcatttacatatgcaaatgattcatacttcaaggaagagaacattctactaaagcaatctccactgactttcaacattgactataatcttatcttttcttttaaaacaatatatagtatgtttaatgtacaaacactaaaaaccctacggataaattaggattttgcttatgtatgatggagtatacacacattttttcatattgtaattataattagtatcatatattatatcgaacaataaacgtggaaaagtgaaaccgcgtcgattacttggtgcttcgtatatgttcttttaaagtttagacattttggtgggctgatacaaaatactatagcagtccaaatcagattaaaaaaacattccatgtttaatttagtgatgaaagccccaccacgacaatattttaaaatgcgcaaataggaagaaaagaactataaaggaaaccaccacaaagacaaaactcaaaacaagttggaggaaaaagagagacaaaactcacaacaacatcaaggttttaactaaatttaattttgtcataactattcatatatagtcaaatggctaacaaagctctcattcatctcctcgtcatcttcttcttggctctatcacacatcttcttcttcccttcccatgcttcgagtaaaatcttcatctctcttaaaatcgtattttatgtatttacatcatatgttttaacttatatcatctatattttgtacgtatacaggacttgggagtttgatggagaagccaaaaattgttcgacctcaacaagatacactaatggttagttatttagctatttatctgtgttcttgagaggttaaaattaggttattaaagattttaatttggttttgttttacataatcaatgctattaggatgtgaagaaggaggtcgaagaaaggatggtgatggagttaaacgactatccaggttcgggtgcaaacaatcgccatttgccacgacaacgaggctgcgtcgttgattgctgatcgatatataaaatgacgaaaaacgaattaatatgattatagctagtatcgataaattgatgtataagtaagatacgtctaattatttttcagaatatgaattgagttagtttaacattggagtctatagacgattagactatatacttgtctactctacggagaaaagcatagttttatttatgtagttcagttggtaaatcaatagatgctattgttaataaaccatatatatggatgatatgtacaagcctttaatttcaatttggtgataggacataattggtttactgccaactaatagacattagactgacgtaaagtttttcaaaataaagataagtcactactctccttttcacttatatttaccaaaaattgagttagttaacttcttattcaaatttatattttgctgatatatcttatatactcgtcatgttttacgccacggatcaatataaaataaagatttaaaactaaaaactgatgtggaaaaagagtggtttaataaagtaaaacaacaacataattgaagttttatgcaacaccctaagtgtggactagataggaacatagaggacaggcaaaaaaagaagaggtaattaacatacctaccttggagtacatgccactatgccagttgggtttgatttttaccctcgaaatattagtatgttaccgttcatctccgagtaggtgttgtgattttatagacgagcaaaaaacaaaagtggttcatgagttttgtcgggctctctccaaagagacaagattgggaaagaatactctatcttctcattcttgttacattgattttgttttattttgcataggcgatgcagtaaaactattaaatatatactcaaggtttcaattatcataactggtgtgattgttagagggttaaatttaagatttatataagatgtgattacataactcttgtattaaaagtgtttactgtatttgtatcactcacatgtaatcattcaaaaaaatactaagatgaagatatggtaaaacatttcaacatagaaaaagacacaatcgataacaaaatagaacagtacacttgacctaaaccaatgcggtaaacacacacacacttatatacatattgttaataattttgaagttatgctatacaacttattattttgtatatcaatacatattcaaatagcttaatatttaaagcgctatgatgtcaatttcaaatactgaaattattttcaaaactttgtcacttatattatcacttataaccattctatatatcttcccaccgcgaaatttataaccacacttttacaaactaaatttcatacattttccaaatagtattgtaataaacaaaatagtttaaaaataatgtaatttacaaaacaataaatttttaatataaaacatattgatcagcaaaaatgctggttgatgcataaaaaagactcaactacagaagaaatattcagcacacgatatcacaagaagaactcgatg

SEQ ID NO: 31492 - DNA, 3003 bp, Unknown
  misc_feature (1)..( 3003): 2750-1469P.txt file - cDNA_ID_3042621; gDNA_ID_1972160; Annot_ID_179579
gcttaaattatttttataattctgtattatttcgttttcacgagttttacgagtcttttaataattaattaattgtataatttgttacgataaatatcttacacgtcttaatcgatcccagttcttatgtatcttctaagaaaaagagtagttatacattccgagaaaaatatggatattgggtattttctgaattaaatgccgggaaaatattgtttttttggtggcacaaaaaattgacttataattattctttataactatattgtagtatctgatggttaagaatttttggaattattttaagatttgtttttttcttgtcaaccgatttttatttagagttcagaaaactcatcccttaaaaatgttgtttatatatgtgatattatgcggttcggtataaacttttcgtcaaattaagatttggctttgaaaagacaaaagcaaaaattttaaatctaaaatggtgtgggaaaaaataataataataccttgctaaataagacggaaaatatgtcgtgcagcttactgcttatacttacatcttacattacctattaggctataacctaatgcttgtgttataagtctgtaagatttggtcattcattctctttgtactattgtcttcttatattgctagaaacttagaaactaaagaatttcaccaatttttgtgggcatagtatatagcttattagcttgtaataaggcctaataaggccctcgagcgttacaataacatccaaattagttttggcatggtaccgttaaagtggtgttaaactattaatttaccaaagactcattgtttggactttggaccatacgaaaaatgcagtagagcccatagtgacatagtgtaccggctcttatagctgagaaattatatcccaattaacagcccagtatttaatcatttagaactcaacgtgaaagaggacatgttaaagcccaacacaagtccatagactcatgaaatacaagtccacaaacccaccttatctaaccatgtaattaggttttatagcataatataatgaacatcaatgaatgtaagtaggaatgcaatttgtgcaacctctatttgacaatttctttcatttcttctcaatagtttacaagtctcatacattgtttttgttctgttttcaaagaaatagttttggtttttctattgtatgcaatatgacttcccactgtacatcataaacattgaagtatatataatattttttctattgtgttctgccgtacgtctaacttataatctattttataacattgattttactaaatatataaaggtaaaatctatcttgttgcattcacttcagaaaataaatttttggaagaagggccacaaaacaatactaattttcaaaaattgagattgaaattatgttataagattgatatttaaaataggaataccgttgtaaaaataagtagttgatttatcgaacatctaagcatctgtttaacaccaattttatgtcgttgttgatcaaaactgtcgcgttcaagtgtcttgtgtcgactaattaagcaaatgaactttaggtaccagaagttcaacgaaacaataatgcatttttaaattactaatggactgaagtaattgggaataaagaaatataaagagacggcggcattcagtggaaaatttgcctaattggagtgtaggtaagcacaccacgtaagccatgaacggcgccgtttcaccgcattgctataggaaagtagaagaagacactttgacttattaatatcattttgttgtagatcttctgttcatcatatatttgattttgttactagctaatgtaaaggagaaaagaaatgtttgatttggtcacacacgtgagacagcatcgtaggcaaaaaaacgcctctatctttcttctaaaacatttttcatattaaattatcaaaacccttaaggttgatttaagggtcaggtagtggatttgtttcgttgaagggtcagcttagccttaaccctaaacaaaacaatctcattggtttcataaataaattgtttacaaagtatacgtactgcatgaacgaatgaaccatatctatatttataaaactcatagagaccaatagtttaagagaggcacttatatagctcaacaaataatagcgaactagagagaatatgatctaattagttataaatctcaattttgaaattgaagtgcgttatttcatttgagaatctatgtgttttttttgttgttgttagatgagaagctaggtttttttcttttctttacaccgataatcgataatatatgttaatcacactgatttttgtttgagacatgaagattcgaaaaatttgtcaacgaataaacactggatagatagaattgagatctgccatcaaataatcgagatcgttcatgcatgacgcaaacatttatatagaaatgaagcaagtaaagaatatgaaaaagaatagaaatgagaaatttataaagaaagaaaaaaagaaccaatggttgaggaggcaactattcgcggggacacggagccgttcgcacccatcaccttggaatctctctttcttcctctctcctcatcaccaactagtcaacaaccacacaccatttttaactttcataattaaacctaacataacatttttttttgtataaactatagcataaattaaattcagttaatgataaaataaatatattttgtagcaatcattctattttgtaatttggtagggctctttaaactttgattattatccaatttttattaaaatataataaaatctcaaagccatgacccattccttcactcaagtatcaatgtctattgtctataaatattacataactcttcttcttcaaccaaacattgaaacactttgtcccactctctctctttctctttcttgtaccaaaagctttttgaatctccaagattatagcaaaaccaaagataaaatactaacttaaaagatttctgaaaataatg

SEQ ID NO: 31493 - DNA, 3000 bp, Unknown; identical to SEQ ID NO: 9607
  misc_feature (1)..( 3000): 2750-1469P.txt file - cDNA_ID_3042645; gDNA_ID_1972160; Annot_ID_179588

SEQ ID NO: 31494 - DNA, 3000 bp, Unknown
  misc_feature (1)..( 3000): 2750-1469P.txt file - cDNA_ID_3042648; gDNA_ID_1972160; Annot_ID_179584
tgtgtaatctgagcctcgttacaagttacaacttagtctagattcatattggtactgtaaataattttttaaagtgtcaaaaatctcaaaacacaaacttttaagaaaccggagggagtaataagaattctcatatttataaatccataatttcgacattataaaagaaatccatatggatatgaaaatgtattagtaaacaacaaaagagcacactggagaagaagaagaaacaaaaatcggccgagacatctctattgagtcctcattctgctgctttctgctgccctgacttgagcgaaatagggatgagcctgtcatcaattcataaaaccatcacaatttagcagactatgagaacgaaaacttgtttgagttacgttatatgatacttaccattgcttcttttgcagttaatctgtcttgatgatcataccggagcagcttgtccaaataatcaatcgcctacatttaaaacaaagttacagctcgagagagaaaccatggcaacaaacaaaagcgtttgtgtttcttatagaatacagagaacaaagtaaacaaacctcaggtgagaccaaatgcctattgtcagcgttgatgaatttggaccaaggcttcctgctatgtctgtggaaagaggattggtcattggcactgctttaatctactcttatactatagagagaatatgtgagttctgcttacctcccaacaagtgcctctagttgagtatcaagttctaactgatacttattcagatatgcattcaattcatcagttccgagtacctgagtcaagaatcaaacatacactctaaagatgtgaaaaaacactcaatccctctaaaattcccacatttacccacgcatttgattaccttggcaattttgacgagctgatcctggttgtcatggccatagaagaaaggttccttgcggaatatctacaagaaaagataatttagacacttcatcattacgatactatattttggaaattttttgaaaagaatgatcatatataaatgtagcattggaagcctagcatttcgcaaggtactcaccatcccagcaaacatgcaaccgaggctccacatgtccaaggaatagtcatagtcctgtaaatcaactagaagttcgggacctttgaagtatctgagacaacatttgatcaagcttagatactgataacgactaaatattaaaaatggataggaaaccaacttatcttgaaggcgcctatcatacataccttgaggccacacggacgttgtactcttttccaggatgataaaactcagcgagaccccaatctattaggcgaagtttgcgcagctcatggtcgatcatgacattgtgtggcttgacatctctgtgcattattccttgtgagtggcagaagtccaaagcctgcagcatatcataggaaatttgcaaggttatcactgaactaaatttgttgtggaaccgagaaaattccacaaatcagaagtcgtaatgaaataataaactctacataaaataaattaaaattaccttcaacagctcatagatgtagtagcgaatgtcataatcagtcaatgttggatacagaaccttaaagtctgtgctgtttacatactcaaatatcaagcttggcgtttttgagtgttgatctctgacaacatcaagcagctttacaatatttggccctccacaaagattctgaagtattttaatctcccttctaatctgtaaaaggatcatacaaattcagaaaggcaacccaaaatcaaaactaagtaaagacaaaaccttttgtaaaagcaacaccattcattgctatcaatcataagtcaccaattgaagtaatatagacactcaccttcttcttcttaacaggcttgagaatcttgataatacacttctcattgttattcatgttaatcccctcaaaaacctcactgtatttccctctccccaccttcctcactacctcgtaatcatcttgctccctgacaacgaaacccacataaaaaagctcaaaactttaacaaaagcatcatcacccatcatgatcataatcataataaccaacaaactctcctcaaaaccagattaaaaaccaagaacatcgccagctagacaaaaagctcaatttctacattacaagatccaatttttttaactgattagcttcctagggttttcataattttcgaaaaatacgatcttacccccactgaacattgagagattcgtaatcccaataatccttaggtcggatcacgttaacatcggtataaacacgagctttcgacatgacggtggaaagagagatcttggcgagagaatcggtatcgaggcaacgatcgaacctgataccagtaacgtctgattcaacggttccggtgttgacgcacgttaatggtggtataagagaatgcgccaacggcgcacgtaagatcaagatggcgcacaataacaacaggtaccgtcgaagaaagtaggagaagaagaagattaggtgcatgtaaccattcggtgcactctcccgcggtggattatttcttttagtggcatacactgagttatggaaataaaacaaatatttaatttgacttgttgccaaaaacgacgcgttttggcttgcttaacacaaaaacgcagcgttttggttaaaccctaaaatgatgcgttttgggtggctctaccctaaaactaaaaatcttcaacagcgtttttgttcttcatctgcattgttctccgcctctctctctcaaactcttcaggtaagcttcttcaatttcattaaattagtgtttttgaatcgtttctagacttaaagtttctcccttttcgatgttttcgtgttgattgatgataaaaatttacattttattagtcaggattgaaacatagtctagttgattgctgtgacttagaagttagacatcttatatcttcgtaattgttttacagtttgcaaaacccttaagaaggtgtgaattagtaagtaatg

SEQ ID NO: 31495 - DNA, 3000 bp, Unknown; identical to SEQ ID NO: 9623
  misc_feature (1)..( 3000): 2750-1469P.txt file - cDNA_ID_3042687; gDNA_ID_1972163; Annot_ID_179644

SEQ ID NO: 31496 - DNA, 3003 bp, Unknown
  misc_feature (1)..( 3003): 2750-1469P.txt file - cDNA_ID_3042691; gDNA_ID_1972163; Annot_ID_179643
ctgagacattttatcgttgctgcagtttgagagttggcattcttttgatacaaatccactatatgctcttctccacgaggccatatactgtgaggtatagtctcttcaaatttctcatctttttttctatttcagacaattacttcttcttgttatcgtttatgtttaaatggaaactttttcagggtgcttcatcaggatggtctgctcatagattacgggataaatatgagtacaaattcgacgcaatgaaggcagtcaaagaaagtcagcctgtactcttcacaggagaggtacaggttttgagtatttctaattgtatggctcatagcttggatgattggtccacattgcttaactaaaatagaatttggatttgtatagatgatatttccatggatgtttgatgaaattcatgccttgaagccatttaaagctgccgccgatcttttggccaagaaagaggattggcctccattatatgatgttcctagattgcagaataacaaggtctgtttcagaatcttgatcgttctttcatatggatcaaataattttactctgtttcacatgatttctttttgtaggtgcctgttgctgcagcggtttactacgaagatatgtatgtaaacttcaagctggtgacggaaacagcttctcatatatcgggtatcagactttgggtaacgaatgagtttatgcattcgggtcttcgtgatgctggaagacaaattattgatcatttgttgggaatgatcaatgggaaaaagcctctcttttgattccttgtactagtcagtactttgtgacttgtggttttcttcgttatacactttctttgagaattaaatgagtaaaaaagaaagagaatgaataaaagaaagtctttcaagttttgactttcctttccatttagtgttcatgcagacagttgggcgagagacagtgagataatgtaaattctagatactacttatacaatatacgatgctggtttagcaaaatccgttgtagtctagctggtcaggatactcggctctcacccgagagacccgggttcgagtcccggcaacggagtctttttttgctttctgtttttttatttccggaaactgtaaaatagaatgaacttagaagtcgtgagatactgttactatctgctcattgctcaataaaatgttgaatgatgaaacgaaaatagctagaggtaaacaacaacaaaatatcacacatgtcaatgtcatacggctcaagcatttaaactaaataagactagaaaaacttgacctcccttgggccacactactaagtgaagtcactattcacaaaacgtataacaagaaaacctaataaatgcaaagctattaatattttgccaaacattgtattcaatgccgtagctacatttccccacccacctccccaaaacaccaaaaaaataaatacaccaataataatctctccatcactcttttttgccatcgacgccaatcccacatggccctaacctctttcttcaccatcaaatgtcaaccgccaccctcgtcgtcttccctcctccacctcctgtccctatccctacctatataactagcctcggccttggctactccatagccatagctctaggtttcctcgttcttatctccacaatcattctctcttcttacatctgttgccgcgcctcacgcctccgcttctctgcctccgccgcaaacgcaaacgcaaacgcatcgtttagcgaccgtggcgttatcgtcccaagaatcatattcgtagctgaagacgacgatcttgagtctggaaacgtcgtcgttggaggtcttgatcattcagtcatcaactcttaccctaaattccatttcactaaagatatcaccgccgtagtaaacggtgatgggtttcacgacggagaaggaagagagacgacgtgttcgatctgtttatgtgagtacatggaagaagagatgttaaggatgatgcctgagtgtaaacactacttccatgtttattgtcttgacgcttggcttaagctcaatggttcttgtcccgtttgtcggaattctccacttccgacgccgcaatctacgccgcagtcaactcctttgtcggaagttgtgccgttgtctcaatacgccgccgatcggaggagatccagaagataaaacatttcttttttttgctccgtggcatttattattaaatctttttttcttggtataatatataatttattgatttgctttacatactctttgtcatgtaattaagtttgtatcaaacaaacaaacaaaaagttcactgttgcattcatcttcttatattttagctaatcgagatttggactacaaagtcaagtcaaatatgtagttaatcaaattagattagattaattgtcggagatgaatgtctctaaagatgggaacaaattagttggaatttgagatttaaacaaaaatgttcctaaatatcggtaacgttgactaaaaaaacatatgtttttctaagcaattttaatgtgtttgaaatgtcaaagaatgtaaaaaagagaaagaaagaaagtctctaaccgagataaagactttgccactcactgacgaaatgtcccacgacgtcgttctatcgaccgtttgtttttttttaaacgagtgagccgttgatattattcttatatgaaccgatgactgccagtctgccacgtatacggaatctccttacgcttgtcggttactttatgtaagtaaaaaagaggagttacagagcgcaccaggcccactaggcctttgttggatccttggttgcctccacgttccaggcactaaacgttgacgtccgtttattccttctttaaaaaagactaacgtcgttaacgtatttctgtggttcgggtcacgaatctaaaggctcgttcataagttgcctaataaacctatttctccgttcgttctctccctctctctcgcttcacgttggatcgaaatcggacaaaagtaaacgacaatg

SEQ ID NO: 31497 - DNA, 3003 bp, Unknown
  misc_feature (1)..( 3003): 2750-1469P.txt file - cDNA_ID_3042695; gDNA_ID_1972163; Annot_ID_179641
cttttcttctgtcaaaagccttcccttccaaacctcgtgtaacacaatatccgctgtgattctattaggaggaaaaacagattctttctgaagcatttcgtcgagcaccttgaaggcatcatccacaagtccatttcttagcaagacgtctaccacaacattacgaacctgcgagtttttcatattcgaatcgagtctttcgtatacaagaaccgactgattcaccatacccatacgcccaaaccatcggatcagaagattagtggcaacgacagtaagaggaatgttcttctctttggcgatctcgtagagacggagaagtttatcacgcgggtccggttcactaccggcgaattcaatgaccgactgaagcgccaaggagagagattcttcacggcgtttcagagactgagacttcgcatccaggtactcgaagaacgagattgctagagaatacgatcctagccgccgcgtgatttgcgagaatactaaaggagaagcagaagaagaagatacgacaagcgcacttagcgactcgctcgacgcccaatcatgttgcggggttttttgaagagttttcacaaatttgactactacaaattcctggctctccaatttgatttccggccgtgggtcaacatcatatgaaaaacgacggaggaatcgagaatggttgagcagaatataagagttccggcgccgggaaattgatagcatgatactcatcgtctaaggttttgaaaaagacggccaccgggaaaagtgagacgacgaactctgttcggcgaattcaacgaacaagaagttgggcccattttaaataatgggcttacacatatttagcccaaataaacctttacaatattacacaatgggtacaaaaatttattttttctcataaaactgaacgtgagctttttattatgctgactgattacattatatttataacaaaatgaggacgaatctttatttttctcatataattatcctctttgttttattaatcaagccaccaccctgaactctgaaatagctcctatggattacactagttttacccgctaataactatcctattaaaggatttttatttcttcaacctactcaaaatgaagagctacgagaattgcaacagctttgtcactgagaagatggtgaatctgaatgatccatcttttcagctgatgctgctgcatcagaagcagctttatctaatcccaatttctgtaactcgcttaagaatccgtccaggtcgcttgaggagatcttgtaagggctgtgagaaggacctggaaacaagtgtttggatacttcttccttatactccaagagggctttgttgatcacttctcctacttgagcgtactgtttgcaaaactttggagtaacctgaaatgaaaaaatatagggatgcaacacagcggaaactatcagataatgaatcataaatacaggaagaagcatgatgatatatgaatggtccaggattttaccttagcgtgatgtggatgctgcatcattcccagaagatcatggtagactaaaacctgaatccacaagaaaaatgtgacatacttgatcagaaatgtagataactcactctttttgtgctgatcttactctttaatcatgcaaaaaggccaataactgagaatatggtttattcaatcaaaccatgtataagcacatgaaaccgaaagaagcctattgctctcgttaagacaatgtaaagagtatcaaaacgaacctgaccactgcagaaagggccagctcctatgccaatggttggaatattaagagcagaggttgcagcagcagccacaggaggtggaacacattctaaaacaaccgaaaaacatccagcttcttgcaaagccatagcagtttccacaacctaatccaccaaataagagaaaaataattttatcacacacccctttaaaaaataacctcttaaggattacatacacatgcctgaaccattacattcaaaccttaacagcactagcaatgtttttgccctgtggcctgaaaccaccaagaacactgatagcttgaggagtcaacccaacatgtcccataacggcaatccctgcttccacaatggattttgcagcagtgatccttgaaggtgatcctccttcaagtttaatagcatccattcctccttctttcaacaccctaactgcagtatcaaccgcctgaacatcattcaaactaaaacttaatcaaccaaatcgatgctttgctcgaacaataacaaacttgatatcaaagcgattaactgaaacataggataggatcctttgggttgtgaatttgaaacaaagtatccaactttcgagattattcacctgattggtgctagattcataagtaccaaacggcaaatcgccgacaagaagtggtcttttggctccgcgagcaacggcgcgacagtgaacaagcatctcctctaaggagataggaagagtggtgtcatagccatggacaaccatggcagctgaatctccgacgagacaaacatcgattccagctgtatcgatgtgaacggcagaagggtaatcgtaggcggtgaccatagttatcggctcacctttccgatgcttctgtctcaattgcgtcaaagtcactctctgattcgagttctgcggtttcggtcctccgtaaaccgtgtcctccggtacgttgctcataaaccggacggtggtgatggctctcgaagcacgagagcaacaactcctgacgagcgaagcagccattgttgttgctgatgaaagcgattttggaattagttataaatttaaagacttttggataaatatttttcttttaagaataaaaacgatgttggcgactcacgcgctggtgactccgattccaaagttgactgctttcgtactctctctatctactactccatcaagattgtctggttctgttccgggtttgattgatttctaccgtcgccggagattttgtcgtgtaatcacctccatg

SEQ ID NO: 31498 - DNA, 3003 bp, Unknown
  misc_feature (1)..( 3003): 2750-1469P.txt file - cDNA_ID_3042699; gDNA_ID_1972163; Annot_ID_179634
aaactatgcttttgggactctccgatggatctttatatagtatttcctggaaaggagaggtaatgtacatctgcttcatctgcattgtttgttcttggggtttttgaattctttgtgcaagattcctgatttctcatgttttgtttgtctttgtagtttggtggagctttcagtattggctcccacccttctgctagcaacgatgatagactcttgtcctacactcttggtaatgggctagtctctggagtagcttcaccaacacttgcatctgatgataaattctctacaaaaccggctattgttcagctggaactttgcactcgttccaagttattgtttgtgttaaattcggatgggcagctagtagtatgctctgtgaataagaaaggtttaaagtacactgagagtattagagctgagaagaagttgggtggtgatgctgtttgtgcatcagtggcttcagagcaacaaattcttgctgtgggtacaagaaaagggatggtggagttatatgatctgtcacactcgatctctctcttgcgaacagtttctttgcatgactgggggtaagcaacttgttactatgaaaagggatggtggaattttgtgatgaacctttattttttaatatttgttttgaaaggtttgagtattactattcatctgagtagtttttattgtggtgttgtgtaaagaccataatatcatacttgtcatactacaactggaagtttatacgcctttggtagttttcaagttgtcttactgtgatttatttcatgcccttgatattttggctgcatcgttaataaaactgttttaaaacttgcagttattcagcggattacactgggcctgtaaataacattgcatggacgcctgataattctgcttttgcagttgggtggaagtcgagaggacttgcagtttggtctgtttctggatgtagattaatgtcaactgtccgccaaattggactgacttctacatcttcccctaaaattaatccaaaacaagactgtaaatacgaaccactgatgagtggtacttcagccatccagtgggatgaatatggatatagactatttgctacagaggaggcatcatgtgatagaattcttgcattttcttttgggaaatgttgcttaaatagaggagtttcaggaaaaacttatgttcgtcaggtaatgtatggtgatgatagactactcatggttcaggcggaggacactgacgagcttaagcttttacatctaaaacttccagttgagtatcatcatatccgttatccccttttgctcattcatcgtatcactttgaaataaatttcttatatatattttcttggtccaggtttcttatattagccaaaattggcctgttcaacacgtggcagctagcgaggatgggaaatacttggcggttgctggtttacatggcctgattttgtatgacgttaggtttaagaagtggagggtatttggagatgtcagtcaagaacaacagattcattgcaagggtttgttatggttggggaagattgtcgtaatctgtaacttcattgaagcttctgagacgtaagtcccgatctatattattagtttctaatcatggttcactggctatatttattaatgtttacaaggaagagaaagtgccttttaatagaaatgtgtttgctactcttccagacttttttacattaatgtgataaacgtttctgagcattttgtctttgaatgttgtttaatttcacgtgtatgttcgctaattattgcagatatgagctgcttttctatccaagatatcaccttgatcagagctctttactttgtcgtaaagtgctgcttggcaaaccaatggtgatggatgtttaccaggattatatacttgtatcttatcttccgtttatcatccacgtctaccatgtgaagatatatggtgaattgacaccttcaagcaaagcagatctacaggtagttagttattccggttcatttcttctctgcatcattttcagtaaattatactttttaacttccaaatgtgaacgcttgagttgcttttcatgcaccttaaagtgattaaatgacaaacagctttccacagtaagagagttgtccatcatgactgcaaagagccatccagcagcaatgcgatttgttcctgatcagcacccgagagaaggcgaattggatgaagataatttgtcttctgatttgtcagaaagggaaccctcaaggtaatcatcaatagagtagaatatcctttcagtttatgctgtcattctaattgcctttgtggtctccatagatgtcttatactgagaggaaatggggagctttcacttcttgatttggttgatggacgagagagggaacttacagactcagttgaactattttgggtgacatgtggtcaatcggaagagaagacaaatcttgtcgaggaagtatcttggctagattatggacaccgaggaatgcaggtaattcctctgcttcaaagctgcttgttatgctcacttttcttcttcttcttttttttttttttttttttcttttttctttttctcgttatagggttgccctgcccctaagtgtctgacagtaactctctgtttgatccctgtcttttgtaactttttttgatttgtttaacgctgagattctatattataggtttggtatccttctctaggggatgatccttttatgcaagaggatttcctgcaggtatgcatgctagtagagtccattttcaccgccattggtggcttatctttttgttctgatttttattgtctgtaacattattgtttgacgacattgacattcaaacacatccctcttataaatttctaattttttcattgtttcaaatgcatttttattatgttccattcttcagctggatccagagttggaatttgatcgtgaggtgtatcccttgggacttttaccaaacgtgggcgtcgttgttggagtttctcagagaatg

SEQ ID NO: 31499 - DNA, 3003 bp, Unknown
  misc_feature (1)..( 3003): 2750-1469P.txt file - cDNA_ID_3042705; gDNA_ID_1972163; Annot_ID_179632
actagcttttgtgtgtgtgttttttttacaggctttcacacccaagtgagacaacgaaaaagggttatggggaggtgaatgcgtttgtgtgtgatcatgtttgtacaaatatcattttgaacttaaaattattatgtactttatataaattgtggtcgaatgcaaattaaggttccccgtaacactcttttcctaactcaatgatcataagatgcttttacattgtcattcggagcataaaagagtccatcttaattgtttttcgttattgttgatatctaagcttatgttcttcttctatctctctctcttacctttctctctttccgaatatctctttctcacctttctctctctctcttgcttacctttttctaaatctctctttctcacctatcttcttttctctctctctcaatataacatgacaaatttaaatattgaaaatcaactgaaaatttgttattgtctaatgcatattcactaaagttaaatctaagatagtagttatacgttaattatgaacatgatttagcaattatacaacttccaaatagataaggtggaaaaaagtgaacacatgagtaaattgaagtttaacttgtaaatattttgtacagagaaagaacctctatcaattaacactcgataaattagtaatcactataaattacttattttttcagtctcgagttagatcaatgtaatatttaacatcatttgataaaataataacttgtttgaaaatctaatgtaactaaatagtctagtaatatcgtaaattaataatcattatcataaattaatataaacttatcaaacatcaaaattccgattacaaaaagaataaaagtttagttatgttattaattattaaaaatttagacgaaggtatactagttttgtaatcccattattaatagtctatagaatggtaacgggctaacggcgatggtgataaacggaagagaagagagagagctagggttggagaaagagacaaaagagagggactacggaatgcagaggaaagcttcggcggtgttcatagggtcgtagaaaggagaaaaaaaacagagagaaacgacggaaggcagaggaaagcttcggcggtgctcataagaaacccatggagaagtctagagtcggagatgttgtcggagaaaggagaaaaaaacagagagagaagacggaatgcagaggaaagcttcggcggtgctcagctcataagaaccatggagaaatctagcgtcggagagaaatacaaacacacaacagagagagagagaaagagagagcttacattgtgagatcagagcgagagcttccatccagagagagagagtgagagcttatatagatggttttccgaatatatagtgtgtgagaacgaagaaccatcttttgtttttttgtttttttcttaagtacttttatataaaaacacgagagagagagagagagcacggagaagagggagagagacagagaaagcaatggtaatgatcggaatatggtgcacggcggtgatgatcgggaaatggtgcacggaggagagagagagagctaaaaaaaacttacatagtagtacatgaaatttaattgtttattttttggggtttctatgaaatcgtagaaatattattttattaaatatgaaacttacaataaatattattttctttaacctagagaaatagtagagatacaagtggatattggatataaatacctctttatcaaagacattttatacaacacacatatcaatattaataatacaacggttgattaaagtcaaaaacaaaaaatcccaacccaaatttttttaagttcacatatgtgtagtttgtttagcgtttcagaattcttttcaaaccaagtaatccgactttatttttaactgactcgtttttttaattatgttttggtgtcaaaactaatcaacccatggaaagtatcaacccacatatgtggtttagctttttcataaatatacattttaatcatttcttgtttagttagtgacaagacatgttacttgtttgatgacaaatatttgtatctccaatttctaaatcttttagccaaatgaaattatatatttgaccaaaaaaataaaactaagaaaagtgaaagagtatgggggcatcagaatctctgtcatgtgagtactattttttgaacaagctaagtaacgtcttgtatctatttgatttttttttagtatcatatagcacgagtgtcttaatgaaatcgttattagcttcaataatactaaataaaatgtttactttcacaatatgtaaccgattaaattcgtaaatattttgtacgaagaaaggatctcactcgataaattagtaattactataaattaattatttttttaatctcgagtgagatcaatgtagtatttaacataatttaataaaataataatttggttggaaatataatgtaattatatagtctagtaatattataaattaataatcattatcataaattaatataaacttatcaaacatcggaaattcagattaaaaaagaacaaaagtttagttgtattattaattattaaaaatttagacgaaggtatactagttttgtaattctattattattactctatagaattaaattaatagtctatagaatggtttgagtaaaccgagaaatgagagagagttctccttgaaccaaggataatcaataattgattcccggtttattcgtaaaattagattcgtatcaccgaaaccaattatattcgcaaaattaaaatccgatcaacataaaccggtcgggcaattccaattttgatgctccgtttattgagcgtttattgatctgcgactgcgagatccatcttcttcttcttctccttcttcttcttccaacgaatgttcctatgatctctgtgtatgaacagaatctgtaatcagatccattgtagagagagatagccatttcaattcgaggtagccaaagatgtatatg

SEQ ID NO: 31500 - DNA, 3003 bp, Unknown
  misc_feature (1)..( 3003): 2750-1469P.txt file - cDNA_ID_3042709; gDNA_ID_1972163; Annot_ID_179631
aggcagtagataaatagggttacgttctcggtattaggacattttcataagaacaaacaaaaaatagagcactaattatcattattttaaaagacattagtatatgaaaattttatcaagatcgttaactaatcttgtagtaaagtaagatcaaatggctgagcttcattccgtaaatcacacgtcaaagaggtctcatgcgttgtctctattagcatttatactggttataggaaaacaacaaatgtatttgaaaagtataaaattcttttgtaattacatatgataagctaagtagctaactactgtattaggttcttttctttatttaacaagtttagatatttgttttgtgattctatgttggcatcagtggaggtgtatatatcaaataatgcgagggatcacctaaaatattactatttctataaaccagttcattgcttttgtctttcttttttttttttggtaagctgcttttgtctttcttatatatataggaaactatgctctaatttgcactacggtttggattagtttcttattttgactacagtaatatagttaggattgcttctagttttgaaaaagatgataatatgttttgagatcggtacaatgtttaattgaaatatatatatttgatgatcaaattaaaggcatattaggttgagtaaaaacattacaaaagcaaaagttcaaaaaaaaaaaatgaagaaagcaaagagaaacgagagaagggtgtgtgtgggtcaaggaggctttaaagagatgattaataaagaagaggaatcaaccttatctatacccctcaccctcaatttcgaaaatgatagattatatatatacataattaataattatataaaagtagaaaaaagtctattgtttaactgagtggtggaccggagagaggtataggagacaagtcgtcggtggcaatgatccttccaccaaccggcaatggttcatggctcaactatgatcggagaaatgtcgtttttgcaatgaacatatatgttttgttatctataatcgtattttaaaatcaagtggtcgtatatatatactctaatacttatagtcatgtggaaattttttcataagatgtacaacttacttacgatgatatattcaaacttagtaggaatttatttggttctatagcctatatatagttgactcactcaaaaataaccagagataaataataaaattgatgttttttggtaatatttatgaagtatgggccttatttataatcacacgctgaattctgaaaccttataattagaaaacgcattcaaaaaaaaaaaaaaataacaataagaaaatctatatagcctagtagaacggtcacaaaaacccacaaaagtatcaaaaactcgtaaaccatcaacgtttgagctcattttgttgttatagtcaaaatcattcaaagttattttgacaagacgtattggtaccataataacgcattaatacacctatacatttataaattattttattagttatacacgatggtagtacaagaatacatgtattgtagtagaattttgtaatcaattaatgtcacaaaattcaaaccaaacttcaatgagaaaattcatgatgctcaactagtcaatgtgtatgttatacgacaaaaaaacatgcaatttgtcaattaccatcgatccaaaaaaaaaaaccctctaaaacgataagaggaacgaaataagtatggagaatggtgtgttgatttggaaatgttataatgaggccgagacagccacatggccctattgcttgtatgcatatcatctcatctcctacctctcccacacttctctttgtcatgtcactgtttaatttttgaatactcgcaccatctcgttctctggtcccatgatgcatcgatacgaatatacttgattgactgtttcttgtttgtttcataactatataccctactttaaaccctatttgatccaatattgatcttagatttaagatgatgtttcggtggaatatgaggttcaatcattgcttcatttgtaattaaataaaattttagatgatactgaaaaagtcacgacaatacagatttttttattacactataattgtttttcaaataaaaagattggagttcatgtattcagtctctgttagggtcttaggaaccttttgttgttgatattatacgataaagatataattagcttattctctatctttatgattcctattcctactgatgtctttatgaatctcataatttataggtcacataaaacatggctaatcagtgttttgctaatcataagattttatagatgtgattcgcaattttgtttcctacaaagcaggggtggttttctagatagaaagagataaacgtatacaatcattcgctataataatatatgatcgattaacaacgatgtttatagatatttaatcattttgctagtgagtatacagtcttagatctcgtcgtcttgtctttctcctacacgtcacatggtaccacttcatgtttctttttgcttggtaccactccatgtttttattatcaaattggatatagaaaaattgcaattaatttgtagaaggtacataaatgaggtcccgctccggcaaatgttaaagccgtagttattttcttgaaggcctaatgctatcagctgaagattaaaaaaagcccaaaaacatatgggctttggtattctttataagcccagtcacttggaatactagcttatattttctttctttaaaactcagttaatagttatgttcaaatagagagaaaatctaagatgtggtgggacgaagttgccacgtgccaatgagttgaccaatgaggaaactcagtgcgttatccgtagggataatcagataagcagaatctgattttgtcaccagagtgcttttatagattacacaacacacgttcgtttctttcttcttctaacacactctgagtcttgaaggtcaacaacgtcgagaataatg

SEQ ID NO: 31501 - DNA, 3000 bp, Unknown; identical to SEQ ID NO: 9617
  misc_feature (1)..( 3000): 2750-1469P.txt file - cDNA_ID_3042712; gDNA_ID_1972163; Annot_ID_179629

SEQ ID NO: 31502 - DNA, 3003 bp, Unknown
  misc_feature (1)..( 3003): 2750-1469P.txt file - cDNA_ID_3042716; gDNA_ID_1972163; Annot_ID_179627
gtcttttctatttggcaattagtacactacttacgttttgtggtaggaacaaataatttgtaatcttggcacaaaccagtgctttgtaactttgatgatagaaaaaatttattcactagttcgataacgattatcaatcatcataaataaaaaaagttagtttagacgatcatgaagagagaaaaaacagaattattggtactatctcttaatttcccaactctgtaggtacactcattaatcattatggagaatgtcatagtcatggtacataatgaatgtgcatggtgcttatggtacagatgttcttaacttcttatcctggctggcaaacgccagatcatctcaactggaggatcatgttttgttcgtaacagttagtaactaaccaaattagtgacaatcatgagggattattaaaaacagacattgatctatttttgattagaaaacattactgataaaactacaaaaatagctggaatggagcattcaaaactctgtccaaagtccaaacggttaaattatcactgacccaatccaataattagatttatttagtaagtatgattactacgaagataacattaacaaaattttatgttattgtcaatttgtcatcatcgtctttattttttatttctcaactttctttgcattacatcttccaactatataattaaccactctactttctcaaatcccacactcagagaagaagaagaagaaaaaaaacagagctttacaatttctctctacagagatcgaagatatggaaggcaaggaagaagacgttagagttggagctaacaagttcccggagagacaaccaatcggaacatcagctcagagtgacaaggactacaaggaaccaccaccagctccgtttttcgaacctggtgagctttcttcatggtctttttggagagctgggatcgctgagttcatcgctacttttctctttctctacatcactgtcttgactgttatgggagtgaaaaggtcaccgaacatgtgtgcttccgtcggaatccaaggaatcgcttgggctttcggtggtatgatatttgccttagtctactgtaccgctggtatctccggtaagtcactctacttctccaagtatacgcctttttactgtaattaggtttccgagtgtttgggttgtgaaagaagacgataaagctataatcttgagaaaattgtgtttagatttatagcttcttagcctgaacttgttccatttgtatctgattcaagaaatctcagaaagctacaatcttggtggaatttgcagttttctaatatgaattgtgtcctttagcctaatcttggaatgtattttttttatatgtaactctcaggtggacacatcaacccagcggttacttttggtctgttcttagcccggaagctgtcgcttactagagctctgtactacatagtgatgcagtgcttgggagctatctgtggtgctggagtggttaaagggttccagcctaagcaataccaggctctaggaggaggagctaacactgtggctcatggttacaccaagggaagtggtcttggagctgagatcattggcacattcgttcttgtatacacagtcttctcagcaactgacgccaagagaaatgctcgtgactctcatgtccctgtaagttaccactccttgtaacatatctgctaatagcttcttgaaacaattgaaatgagtgaacttttaagctgcctttagtgtgactctcatgtccccgtaagtaaccagtccatgtaacaattgctagaaacaattgaaatgagtgaacttgaagctgccattagtgtgcactaaagactgattctcaatattggatttgttgcttaccggcttgagttttgtaataattgtgcagattcttgcaccactcccaatcgggtttgcggttttcttggttcacttggcaaccatcccaatcactggcacaggcatcaacccagctagaagccttggagctgcaatcatctacaacaaagaccattcctgggatgaccacgtgagtttccacacactatataccaaatcgcattccaaactcggtttcgagcatttttccctgacaatttcgtttttttttgtcgtcattccagtgggtgttttgggttggccccttcattggagctgcacttgctgctctttaccatgtggttgtcatcagagccatccccttcaagtccagaagctaagtaaaaacaagacatcaagtcctctggtttctggccttgtccttagttgcttctatagttctattgttgatctactacatgtatgtgtgcaatgtgtttatctatgtgccctcttaatgcaatatttgtaaacaaggaagaagttccaaaggagaattatttgcaaattatgatgtttaacatgtttattacagatcaaagatgtttaacatggatattggtaaacgagaacctatataaacccaaattaagatggtctatcaccgcttaaccggttaggtattgtaatggtattttaaacgtgtcagtgtcaccaacctcgcctaaatcctaatggaattgagacacagccaccaaaaaccatcagaaaaatggttccatttgtcaaatacttttcaacaaagcacgaagattccttgaccgatagaaaaaagtaaactgtataagaaaagaagttaaaaatttactagaaacaggtgtaagaagttgactgtaagtttgatcattccacgagtacgaataaaactctgacaagaacacttcacttaccacaaatccacaattacttttctcacatagttccaacaagcaacttgtattattatattcttaacaccaatggtaatggatgatgatgcaatgtatttgtctcgttttctcatccatttatatgattgctttcttctccacctcaccaatcactcctcctctaaacttttcttcactctcttgtctcttcaaacttcggttactccgttttagtcgacaacaatg

SEQ ID NO: 31503 - DNA, 3003 bp, Unknown
  misc_feature (1)..( 3003): 2750-1469P.txt file - cDNA_ID_3042720; gDNA_ID_1972163; Annot_ID_179626
atgtattataccatacccggccatcagtagacggtttgatgcctgaaaccatcatgcttttgagccccatctgttgttttgactttctaatggaatctttaccaagtaatttctgcgatcagaacacagttgataactattacgattgagacttacgagaagagcaaaactgaaacatcaaggaaacaaacaaagaaccaaccttcctcgtagaccagaattcgtcttccgtcaggactttactttccacaaattgcttatgcaatttctgcaactcacttcattatcataatatcagaaacttttacccaaaaagaaagcaacttttataagtgattacacacctattttctcgaagaagcttgaagcgtagctcaaattctgccatactaagttgttcagcaggtgtcaagacaactagtttattaggctcctcttcacatttagcaagggccttagctgttcatagcacaattggttacagcaacaacaccacgaaagaaacacagaaaaaatacttaaaatgaatcaataacaccaaatcatggcacgtggagcttactgatgaaatcacgacaagcatgcatgtcaggataattttcaaactcaaagatatgactccttccctgtaataatcaaagacgaggaaacttcagtgatacacctatcaatattttttagccttgagcaaaaagggccgaggaaaaacaacctgcttgctggtcagattgagccaaggaggtttatttgatccttctttggtatatttctgacctgagaaatttaacatggcacaataatcatttagagaaattattcatgataaatctgaatgaacaatatggataatcaaacacttacttttgatgttgtgagtctgaactttaagcttcaaatctgatttaggatcatttgggacaaagagcagcatcacttcactctgagaacaaaaattggaagatcctttgagaaaaaaaccattgagtaaggaaacaaaaatagaaatcatatagtggcaaagagttaaagtattcttactaattcgagggatccaagagttcctggatccttcacaaagctcttgtatttgactcgcttctccattgatatatgcccaaggttctaaagcatggtaaaattggtggattaagtttgtgagccggaggaggtaaggagtgtcgacggcggaggaaatatttgaatctggcggaggagaacggctagcgtcggcagatcagacaaaaatagctaaataatttgggaattttgttaattttaagttcgagagataatgaggtggttagaaccacgtgtacgagccgtgatagctcatgtcttgagatggttcaacagttcacacccgaagttgatgagtctcaagagccacgtgtacgagccttgtttaaccgggcctgcgatcaatagtagtgttgttagcttaagcccgtatatgtatggcccatttattgtctcgagctaaaagtcgcaacttttttttattgtttttttttagtttattataggcagacgataacatttgtcttattaatttcatgttaggaggacattggtaattttcgcttgtttttttgtgtttggtcaatgaatattttttttttttatggagccgtgacgcaaatgggggtggctaggtggggcaaatgcaatcatgaatagcagccacaataaaattaataaattgatcgagtacatatgtcataagataaatggtcggttttggatatgtaaggcgccggcattaggtggtatgactccacgtatcttatcgtcgatgcattggacggctattaaataatcagtctccaacataaaaattccaaaatcacacttcacacattcttttatcatgtcatgaggcttaatgggtcggtctttttttttagtggctagtgattttagctgatgtttcaacattttggttttaagtgtttctattttgcagcttaaatatacatataaaaataataatttaaagattgaaggtcctcaaatcgtgtaaatgtggatttttagtttgagaaagtatctcacatgagccttttttatcattaattacttaattacagtgtcaaaatgattgataaggagttggaaaatactaggtggtaatcaagatggcccttggatgctacaagagcgtagggccatagggcccattccagaacaatatagcaaccactaagcatgtttttgttttctttaacattgtcttttctatttggcaattagtacactacttacgttttgtggtaggaacaaataatttgtaatcttggcacaaaccagtgctttgtaactttgatgatagaaaaaatttattcactagttcgataacgattatcaatcatcataaataaaaaaagttagtttagacgatcatgaagagagaaaaaacagaattattggtactatctcttaatttcccaactctgtaggtacactcattaatcattatggagaatgtcatagtcatggtacataatgaatgtgcatggtgcttatggtacagatgttcttaacttcttatcctggctggcaaacgccagatcatctcaactggaggatcatgttttgttcgtaacagttagtaactaaccaaattagtgacaatcatgagggattattaaaaacagacattgatctatttttgattagaaaacattactgataaaactacaaaaatagctggaatggagcattcaaaactctgtccaaagtccaaacggttaaattatcactgacccaatccaataattagatttatttagtaagtatgattactacgaagataacattaacaaaattttatgttattgtcaatttgtcatcatcgtctttattttttatttctcaactttctttgcattacatcttccaactatataattaaccactctactttctcaaatcccacactcagagaagaagaagaagaaaaaaaacagagctttacaatttctctctacagagatcgaagatatg

SEQ ID NO: 31504 - DNA, 3003 bp, Unknown
  misc_feature (1)..( 3003): 2750-1469P.txt file - cDNA_ID_3042774; gDNA_ID_1972164; Annot_ID_179703
agaagttttttttttttttttggttagagagaagagggagaaggagagggaatggatctggaccgttggatcttgttcgtggagatctgtgttggtccggcgcgtggtcttcggttacggtttgataaatttcgaaccatgggccttgggctagttttatttttgtgtgctaaatttatgatttggtgtccactaaatgtttagtttattcttactgatccaacccaacaggttacagaattgatgaagtatattcatacagtatatgtatttttctatatttcgttctgagttgcgttgcgattaagctctgggaaaaaaaaagttgtttcaatcccttcacttgtaaataaactcaattatttaactccaaggggacgcaaaggttaggcaaaataataataataataataagagttaggcaaaaagagagcgattgacaaattgaggaaatttgaatatattgtcgtcggtgttaagcaaataatcatccaaagaataaagcgtggataggaatctacaatgatcctacgtagcatctaatgtactgcatgagcattcgtttactcaaccccatccaccgatcatccgctgcggacaagtccacatcttcacttcttcacgaccaatgaggtaatgccacgacgaaagcctttcctaaaattacacgatccatttccttttctaaatggatacgaagagtgtttccattgacattaaaggaaagctaactttacttaaaatatcgtccttgaggtaacaaaaaagtttaagcccctatactgtcttatttaatgttttttttttactcttacactatttagttctatgttaatccaaatttatccaattatttccgatatctaactattatccaaaaaaattagggaatgacacgacacgacgtaagcctttcctaaattatacgatctagtttccttttctaaatggatacgaagagtgattccattgacattaaaggaaaaagttaaagcatacattctcagatttgttttgaatgtagactgcaattattacgttaatgtgatcgtcttattaatgcttttaactccaatttacaatgagattcatgtttatccaattttatcccaatctcattaaactcttaccatacaaaaagtcagaaagattatccaaaaccttccgatatgaaaatggtaattatttgaaatgcacgtgtatatttatcataaaaattaatcataaaacggtgcttacggtgatggtaattggtgacttgtatcaatcaatgccagtaaccgattataatacgagttcaaataccaaaaaaaaaaagagctgtaaacaacaaaaatccatataatatctaatacttttaaaagtataaatctaataatttaaaataataataagttagtaatttattttaaactcctaatatcaaaatagtatagaaatcctatactatcataggaatcctaaaagtataaattattttaaattctactaatttaatagttaccagctgaaaaaaaaaataaaaaaaataaaaaaataatagttaccaaaattactatcatagacaatccatgcatttttgcatgaatcctaatactatataaaatacgataaacacccatatttatcattttacacatctttttgtttgaattatccatatacattatgtatagaaagaaaataaaaacgaatattcacttgacagattaacatatgcttttcttttgattgcagtttgtaatccaccgacagagaaattgcgatgtcataaatctgaacacgaattttcggtgcactcgccaacacctgatctcaactctctccagcatattccccaaattaacagtagctaacggagacttaacgtggactcctcgcaatccgagtcactttaacgtgtatcagacagccaaaccttacgttgaccccaccgccgttaggaattccgtctatgtctctttttccatcatccaataaaatcttgccacattgacactttcgggtccggacatattccaaaattaaagagaatttaatttattgttttccttccagaaaaatattaatattctttctaaactaaaaaatggagtcttcaaatagcacagaagcagagacatagagcgggaacgcgtttagtcacagctttcttctcctttagcttttctctctacacttgcttctctctctctctcctttgggttatccttcttgagatctgtgcttgcgtttcttcttcattcgacgacactttatctcgggagatttcagatttgtcgatttgttcaggtacggatttcgaaatgttctttcaatcggatttgttcttcctcggaaggtttctagggttttgggattgggtgtctttaatctgtttgcataagccatgaacgagtttttttgttcccccgagagatctttgtgacttgtagatctgagttgggttccaaaatattcaatctttgtgatgtatatctacatttttagattatcaaactccattaaagagaaaatctttgctcgtttctcttaaggcccattgctttttatctgaagatgatttcaagagagtgccctgtttttttgtataaataaaattttgatcttttgctcgctttatacacatgtgggaacggttttgtcggtggagacatttatggattcgtgaactgctgcaaaaattatgcgtttcttggacgtttctgtaactttctctttattagattttgtatcttgtgtctctgtgtccaccattgcgttgtgtgtattcaattgatttccccaggtgttgaagattgttatttatatatttaacttattttatgcacagagatctttagtataattcatgaaaatatggttttatcttccatgatctaggggaactaaaacatttgtaaagtttgagcccatattttgtgtttgttgcttttcagagatgcatatattatggttgttgttctgtttatgaattgttatgtgcattgttttgcagcaatg

SEQ ID NO: 31505 - DNA, 3003 bp, Unknown
  misc_feature (1)..( 3003): 2750-1469P.txt file - cDNA_ID_3042788; gDNA_ID_1972164; Annot_ID_179698
caggccagtctaacttcgcacctcgtctgaagtatttctcagagcgccggctgcaagaaccgttttggttttgatataagaaatgacagttcaagttattttctgctggtatctgatgctgcaaataggatgatattattgttcttactcggctctgagcaccatatgaggtggtaaaggtcctaggaccctttccatcatggccaaatgttccaagttttcatgcgtttggaaaagcgcctctccctgcaaggtttaatccagagaaaacgttgatggagacatggtgagatgaatagggtggtgtaccggaagatatgcaaacataaagttactcaccgaacaaagttcaacaagtatgcaaccaatactccacagatcacatggatagttccatccaacccctgcaataaacgttccaaactcttaaataccatgactacacaaaaaaataatcatctacgtagatgtgtcagagtcataaacgtttacctaggataacttctggtgcgcggtaatgtcttgtggatacaatgtagttatggtcttgatgttcaaatgttgtacttccgaaatcaatgagcttgatggcacttgacttgggcagattcttgaagtatgacccatcttttgtgggtcgggatagaaactagattttcatgaccacacataggaaaagggtcaagagttatacaagttccttcatggatggatatcatattagccatgaaaataaatgagtccagcttggagatgattgattgctcaccttataatcaggtattttgatatattcagacgataccaaaagaatgttctccggcttcaaatccgtgtggatcagccgtaaatcatgcatatctgtcagaatggaatgagcaaagtctgagtacactagtcaacaaaagtctccagaaataactgtctgagcaatatggattccatggaaattgcattatcgaaagaacattaagtaataactattaacgcctaagtcttgtatcaaaaagttaagaaaaatgatttgtggcactaatggactactatatagaagaatgggtcaagaatattccacacacatgcaacagactccaaaagttgtctgccaagctcccgaacaagatcaatgggaaatgaacggtagctgtttttgcggagaaaatcatataagcttggtccaagcttctcaaatacctgttgaaaccatttaaacccatgcgcaagttcttttaactcacataacatttgggcgtgaagaaattgcattttcccctcaaacttgtcaaataaaggtaacagcacttacaatacaaatatgattacgatagtcaaaccaattccgtatttgcacacaactgcaaggaattgaaaagcttataccaaatgtaataaaattaaaactagcgaagaaatagtaagaggaaagaaatattcttaccgagaaccaccgacatcatgccttgtaagcctctgcagcacgtcaatttcgatcatggcagcttcacgatacttgtttatggaccgtataactttgattgccacgacttctttgtttttattatcaaagcattccaatacttgtccaaatgtacctgccaaaatacaatccaattgattaagataactggcgaccaaataaacatatttctcctacactttgaaaaacagaataatctaatcataatgattatataaacattttcgcaagagatgactaaccttcacccattttgctgagaatttgatctgcacgcacaatagaagaggcatgtcaatgtaaacctccatgataaagtctgtgaaacgtaacagataagatgtcgaaagactctgtaacataagactcacatcgtggagtcaaagtatccccaacaacaaagacataatggccgtctttatcatctggtctccagggaggagagccctgacgaggaaggccattatagaacatgtttgggtaaacaaaattgggaactaaaccactcgcaaactccggaccatagtacaacggaggttgaaatacctgaaagaaaaaaacacatcagctgaaacttagctcaagcacacaaataaaaatcttaatttcttactagttaacacaattcgcagtatcttatgaaaacaacaaaagaacagtccattgataccaatacaatatgtggacaattcgttaccgtgggtggaggaggaggaggaagaagaggcggagcagcatcccaagtcaatcggggacgtttcctgggacgcttatcaacgatccgatgagggaattcaacattcctctgagtttctaagatcatcgcgatcgagctagctttatcacgatacacactgctttgcataaaggattagaaaaatgcaaatccagagctgaaattcagaaacccagattatgaacagcgagagaattgcgattgaatttcgaatctaattagagggataataagattccgaaattcgaaaccctagttatcttcaatttgggggggatctatctccagaagataactaaaaaaggtgggaaaagtaacagaaaaatatattaaaaaaagtggaagtaatgtagctaataaactaaccgcaaatttctctcacacagagtaatttaaaacgttgaattagtcgctgtcgtaatttgatcgccggaattcagatcggagaaacaataaaaatgctcactgaattggaattgaagaaaaaaatctcaggagaaaatatttaacagcgaaagagactgaaatgagagagagagagagaacctgaggaagagaacagcgaaggagcgacagaggctctggaagttcttaatgggcttttttagtcaggcctttattaaatatatgttgactaaagaaacgacatgatgttattactgttgaggataaaaacgacgtggagttcagttatttaatatcagaacaatggggtgttttctccaaagtcttttaatatggaggagacgggagagtcgttgaacaagaaaaataatctgaagcagccatg

SEQ ID NO: 31506 - DNA, 3000 bp, Unknown; identical to SEQ ID NO: 9637
  misc_feature (1)..( 3000): 2750-1469P.txt file - cDNA_ID_3042799; gDNA_ID_1972164; Annot_ID_179689

SEQ ID NO: 31507 - DNA, 3003 bp, Unknown
  misc_feature (1)..( 3003): 2750-1469P.txt file - cDNA_ID_3042802; gDNA_ID_1972164; Annot_ID_179687
agcattaggctcaatagtcaatactaccagaagatgccatcttctcgaaccaaatcatcaattctgtcccaaagcctcctctccggttcacgtctgtattcaggagacaatggatccgagagataaaccctagctctccattgctgaggtttaggtttggataatgaataaaattagcaaagagttacttattagagccggttaagctggagatgtctagtctgggatcgggtatttcccaaacccgaatttaaccgtttaataaccatcccggttcagattcataataagaatgggtcccattgatagccacgtgtcgctagcgaagacgtaagaagagattgaaaatggctaaggaacattgtccggcggagaatcgaagaagagaagaagaacacaacagtcagatactttttcttcttattttgtccgtaccgaaatcggaaaatggacattactgttcgaatctccggcttaaaatcctccaatctaatccggataacccctagattctcatcttcctctagattccgttgctccaacaacgaacctcctcgaaagggaaacgagtccaacggtgagagtctgatctcgaagcttatgttcgttggtagattataatcggttaaattcggttttatttggtttatagcaggtggtggtggtgataaagcgtcgacggactgggacaaggcgtggaagaatttcaagaagcagagcaagaagtcattgttctcgcaattcaacgtggacaagtacgtgacttggaatcctcccagatcggagtttgatttgtcggaagaagtcgatcctataaaaagaacagagagatccaatctcatgctctggacaagtccaaggttcacacttgttggagccatcgtcattgtctcattcctccttctctacaccattcttgctcctgtcaagtgataataatctcattcatctttcatttagatcagattctgaatctgttgtttctactgtttatatgcattactacttttgccaaataataagatcgcagtttctacagtcaagcaaataaaaacgcagtataatagagccctttttgtttttgtaataaccgagatagatcatgagccgaaatcaagattaatcccctgaagtttatagaaattcgtgtatttttttgccgttgaaaatgtttacagtagttaaaaatgaatgataaacggttttcgtagatggtagaactcaatctctagacttgatcctctacacactcaaacaaaccacttggttacacgttcttggttgagcggatttcaaatgtgaaacattttaactcattttttttggtgaacctgaccaaaagaatattgattgtacaagaaccaaagttaaaacttgttttggtcgttgttgaataagaaaaccgtgctctcagaagtctttatataggcaaacatataaattgtgaattttgttttctttattatcaattacaatttattttaaaatataaataaagatataataaagctatatattcacgaataattctaaaaaagtggtaacaaaaaatgacttgaaaacatttttctagtttcaatttcaagtcattctaagaagttaaaattaaggaatatcacatgcatgaagttacattgaaagtgtcttcttacaaaatagaaaaaaaataaaaaataaaaacatagtaaatgttgtgcattattctttcaataattagggaaaacaataatacagtatcttagatgtttataagaccagtatttattcatccaggcctaacaaaactgcccgccgcgatttctcatgtaagtatgtaaccttagttattaaacaaaattgcatttcttagacgttaaccaacttaattatttgtcttatagtcaacgtgatttttttactttataataatgcttcgatcgtaagttgaatctcaatcaatgtcttgattcccgagagagaagtagagcgttaaaattgccgtacagaacatgatggagacattaatgaattcaataaaatcggcgaagttggaggtttagctgagggaggcctgtgtcatgctgattcgtttagttaccaactcttctttcaaacatctttagtatgttactgctttcatcctctttatttgatctactgattatatatatatatattttttttttactacattcgacattcgttgctaagagaatagaaaacaattttctttttcaaaattatccttagtttgatattggtatgagagatttacatgtaatttcgactcttgaaaatagataaatgtatgttgagtattgttgactataagaaactagatgaatgcatcaaatagaagtgtctttttgctttatgtacttccccacttgaaaacatgacgattctatgaacgatttcattcgtcataacgatagaattagtttgtcctacgaaaacaaatgtaaaactactataattttcttgacgtaatattggtgggtttcatgctgcggctgttggttgggaaacgtccaatataaacatttctaattatgtatatacctgaaaatttgtaaaagctaatctaaattgtgaaacatacataacaaatactttaagaagaaaaagtcatcaagcaaacaagaagacatgacctagaaccatttccgagacattatattaatataaaattgatattcaaatcctccacgatcttacagctttcaactttgagtatttcaacgttttctctgattacacataaactaaaatttgtttttttgtttttttaatagttgatagcatgtgttaattattagtttatatcatacaatgaccttagaatccgcagatcatttcaagaactcagaacaaaagctgatgtattcacttacatcattgaattgtgtcagtttgagtaacccataatataaatatacgcaagtcaaaatgcattgagcttatctctcatttagactttaaatttctgatttcagagaggtcaactctttaagccaagccatg

SEQ ID NO: 31508 - DNA, 3000 bp, Unknown; identical to SEQ ID NO: 9635
  misc_feature (1)..( 3000): 2750-1469P.txt file - cDNA_ID_3042806; gDNA_ID_1972164; Annot_ID_179685

SEQ ID NO: 31509 - DNA, 3000 bp, Unknown; identical to SEQ ID NO: 9650
  misc_feature (1)..( 3000): 2750-1469P.txt file - cDNA_ID_3042822; gDNA_ID_1972164; Annot_ID_179668

SEQ ID NO: 31510 - DNA, 3000 bp, Unknown; identical to SEQ ID NO: 9662
  misc_feature (1)..( 3000): 2750-1469P.txt file - cDNA_ID_3042840; gDNA_ID_1972165; Annot_ID_179742

SEQ ID NO: 31511 - DNA, 2239 bp, Unknown; identical to SEQ ID NO: 9657
  misc_feature (1)..( 2239): 2750-1469P.txt file - cDNA_ID_3042854; gDNA_ID_1972165; Annot_ID_179757

SEQ ID NO: 31512 - DNA, 3003 bp, Unknown
  misc_feature (1)..( 3003): 2750-1469P.txt file - cDNA_ID_3042858; gDNA_ID_1972165; Annot_ID_179755
aaaaaagagatttagaacatcaaattgctacagattcagcaggagatacagcacaaagaagatgatgctattatttgccagaaaactaaacaaaaagtctaagtcaacgcaggaagagacaagatatcaagttatcaacacaatagcaagacccacatgcaccagtataaaagaaagagaacaatttgataattcagcagagatagtgacaaaagaaggatctttatagaaaatcccaggaaacaagccatgcaactactcataccacaatgcaaaacaaaacaaaaaaatctagactagctaaatcctctaaacaaactatacaaacctgaggctcaagtttagggaatttaagagtttcctcaacaacaatgtctctattccacttataatccaaacgagcagtccaaacaacatcagacaccgttgattcaccgccgccgtatacaatctcagaacccacagaagttacggcgatgtcaggagtcaacaacggtctcttcttcctcagactcgagtaagaactgaaagacctcccggtgcaataaacaagcaatgaatcatggcgatagtgagcttcccaaagcgcattgaatctaagaaggtcattgttttcaggatcatcgtgatccacctgcgaatttggtgagaattgtttaattttgtggaatctaagagacgaattggaaatcagaagtgtgagtgagagaggaaatagaaattaccaatgtgcaatcgagatcagcaactagtatgagacgtggtggtccttcaagcctatccatcgatttcaggaacccaggtgtttctctttgcttctctcttgtctctttgctcaactaactttttggttcctttattcttgacttccttgggaagacgaagtttttcttttcttattcgaacaattctgtcgagtatttgaattagttataatctttctttttttaattagttagaaatttccttaagcacgtatttatataacatgtcaacgcaacgaagttccccctcaaaattcagttttatgcgtgcgttattacgacatgatagatcctgacgaccaccacatgatgcattactagcaatggatgactcttccttatcattcattttatattcagagaaaatgtgcaagagaatttgcttggtaagtccattggtgacaaaaaatcgatttagtttgagtggaaatagagaatcataaacaataccaaaattgttagagatgtatgtagtgatacaaaaaacgatattaaaaatatatattgttctggttctattatttgttatcgtttttatgattggtaactattaataataatttttcaattatagtggtaagaagttatcaattaaagtcttgttcttttgggtctaactttggatccgattgttaacctataaaagaatacaaggaatgaaaagtaacatgactaaaaaagaacaaacaggaaaagaaaaaattataaaataagaatacaaaagaatgagtgtagaagaaaaatagaacaaatgttactgtaaatgataaccaaaacatagaacaaatagtaacaaaaattaaaaaataaataaattattttcttaattaaatagccacgttttcacgtttttttttctaattttctataaatttaatttttaattaataaatgtttaatttgtttttctgtttgttcctcatcaaatttgagaaggaacaattttcttctacgattcctcaaaaaataaggaatgattaggaatagtgtggggtctacatgttacaatttggaaaaaaaatactactgaatggtaaaaaaaaagaggaacatgttgttcctgtccattccttttctaaaaagtggtcaccaatcggaccctttattgtgatttactaaccttttcagcggtaaaatattatcgttacactttcacaaataatttgctagtaacgttaagtgttagtgacttatatgagattgttcaagtttattcgacaaatgaaatcctttcgatctttactttaatgtgtcaaatatcatgtccactttcaaataaagactcttagcttgaaggaaaactctacgaaaaactaacgcaatatgtcccatttatatggaagacgcgcgatgttaaaattagatactgaaagttggagtctaatacattagaaactaatgatcattcaagaaaaccatagattatcacagtgacaataggcacaagtcccactccggctattacaagcattgttagaaaaagtttaggtgggacaaaagatcacaccttgcatttagtcgttacacgaccatccatcaaatagaagagatcgaagatcagctggaagaaaagctagttttaaaaaaaattcttacttgatttgaacataatacgatatgattaatgtgtcttaaaaagcatagaaaaacacatcgaaggccataaacgtgagaacgattcaaatgacataatttttacaagaacaaagaccagcaaatccaacttaccaaaaaataaaaccaccaaatcctagaaggcaagaatgtgtggcaaaaaaagaaaaagaatgtataccatttggatgggaggtccaaaattttcttagaaattagtaacttaaacttttaaaactcatacacatatggattatatgttgaaaaaatcataattcagaaaaggatcatatataactactaatatatttttgaggtctttgtttttagttattttattttattttcttaaactcgaggtctttgttttaacaatttttctaatttcattatcttacaaaaaatctcaaattttaataatataaatatttgtcataggtacgggaagagcggtttgttttccagcgaaaaaaaaagaacggtttttctctatttgttgttgttgtttttttttaattattttcgcccctgattttttttaattaatgaatataatttttgcaatttttcgtgggaggctaaaagaaaggcgaggaggaagaagaaggaaccagcattatatatg

SEQ ID NO: 31513 - DNA, 3000 bp, Unknown; identical to SEQ ID NO: 9660
  misc_feature (1)..( 3000): 2750-1469P.txt file - cDNA_ID_3042868; gDNA_ID_1972165; Annot_ID_179752

SEQ ID NO: 31514 - DNA, 3003 bp, Unknown
  misc_feature (1)..( 3003): 2750-1469P.txt file - cDNA_ID_3042876; gDNA_ID_1972165; Annot_ID_179738
tgcttcatttttagtaaatatcttgtggtatcaggtcaataagagtgccaagatatagagagaagacctcgggtcagtccagaaagattcatggtcaagcagaggaagaacaagagttgcattcataatcttggcaacagcgaccatgtcacatatctgcatattggtcaaaaccaacaaagaatagtacatcaaaacacttgactatggagaaaacggagatcaataccctctaatatccttttgaagtaaactcaccccagttctcatctgattcaatcctccatttgcgtgtactacaagatacccattggtttggcgttgcagtcctagacaaagacataaataccagattttgaaaaatcagaactgcaaacgagcttgaagaagaactaggaattttaagatagcaacatactcgtatagttcttagggcgcgtcacacattggcgataattcccgctttcaggtttctgccaaatttccggaatctgtgagaagagacaacaaaagcataaatccaaatgaccaagatcctcgaaaatgaagtcaaacagaagaaaaaactatcttccttacattgcaaaaacagaggaaatgataaaaaaaaaattagttaactatcaaaacatgtaagacctccgattacactgatcacagagaacttcgcgtactttaaatatgttacttaacgaatttaagtcaagttacaatttaactcaacaaaacaggttagacactaacacagattaaaccatatagtcaacggtaatgaactattaatcaaaccaatatcaacttggatccttatggaacttcaagattacatattgcagagctagaggattataaagagtttcaatttcaagtcttcacaaactagaacacaaaatgttatggattctgcataaaattagtaagtcaactaaaatggtaggaaggtattatccacacatcgaagccgcctataattccattgactatatattgctcgtcaaagtctcaatccaatagcaaaaaagtaaacctctcataaaaatcgccaccgagatattgattgttagaaaagctattataattgcacaatgataattcagttttgcaatcattaaagttgttgccagaattcatcttattacctaccccactaggccactacttcttcttcttcgtcccaaaaggagacactaatccaaacattgcaatctgtttacactaacttcgcaatcttaggatcatttctaatgaactgttcaacaaaaccctcaaacaattcagcaggaacaaacacataattaggattgatcccaagtagtatctaactaactaaaaaaaatgctgaatttgatcacaaagattgaatttttaaatccctaaatgtttaaagtaaagaagatgaacaaactcacgggaagcttttcgagaacacgcattggctgagaagaagcttggttctctgcaacttcacgttgagccattgaccaatcatcacgaagcgttctaacaacaacaaactccttcaaacgagcgtgatccaccacgcggacaccacccataaggtagactctaaggaacacagacgcaaccacaagcaacattagaagacccaagatccgacgacccacgtttctccccgatctaaacccttgaccaatcacaaccgtcgatgcaccaccataaaacggaatccagaattttcggaggagaaggtaacgaatcaccggatgactgtaaaatcggtggtagtgatcgtgatggtaatgagatccagtagatgaagcagagctttccgaagatggtgacgagtcttgaccagtcgcatctcctccgtctaaatctgttgatccaacgatgggttggttaattgtattgcagtaatcagatgaattcgagggtcgttcggagataacgtctagagaatcgccaacacggcggcgagtggtgggtgcaattggtacggggttaatcgctccgacgactgacatatcgtcgccggtgaaatagggaattgaagattagacaaaaggaaagagatagagaaagaagagagagggttgatttttaggttttggaggaagtagttgaccatgtatgtatcttctggtatagtcaccgtcaccgtgaaattcgccgaagctgagtttttgttttcagaattttttatattcgccagtgtgtctaattatatatttatgtgactgttctaatcattttttttgtttaggttttacattttttatgtatgatgtgaatggataattttcaagagtttgtcacgtttgtagcacatctttttatatgaatagttttttggatgttagtgtataaatataatttgtcatatcgtttagattaaacaaatataggcaaaagagtgattaacgtgttcttttgaaatagctaagagatactaacctatgatgattaagtttatgatacttaaactttttatcatcgagggcactctgcattgtgacgaagatgtgaagtagacctagaagatgacgcactgactttattgccactgctacaaagctaatcaactttgtaccaaatatacaaaacttcgacctctcacgatgttaaactaatggaattattagaacttaaaaaaatcggattagagattaaaaagaaatgaaattatttagagaggtagttagtaaaagtaaattcgatccagcgtggtgctgtgtcatttatttgactgggaattttcttcagacagtgaaagcaacataatcgatggatgatactatttaacaaaacaggtcgtcacacacgtgtgtataaataagtaaagcgcccactcctttctcatttcgtagcgcgcagagagagagagagagggacgatcttttctataactgaaacactactcgaggccaagttgctttagccgtaatcgtcgtcgtccctcttcccgatattatctcttctctgttcttcgatttcgaaaccctaacctcctctctttaattcgcgttttctggatcgaagatg

SEQ ID NO: 31515 - DNA, 3003 bp, Unknown
  misc_feature (1)..( 3003): 2750-1469P.txt file - cDNA_ID_3042882; gDNA_ID_1972165; Annot_ID_179731
ccgcagcatcaaagagtagccctgaaaatgacttgataaactctataaaattttccgttggcaaaaccaaataccataacttctctaccagccgatgagctaaggttctcattttttgatcacgaaagaagaatcccttagaaactaaaatcaaaaaatgaaaaaaaaaaaagtttcagttgtgatttcaatggacaatagtatcatatatataatctttcaaattgtttatttcttctacttacaagaacttgctacttgctgaaacaagttaagctggcttttatgggaaatggcagaagtcttgcgagccaacaagtgcaaggctttgttactatttggataaagggctagttcttttctatacaaatccactctttccaacatccacagaggtacatctgcaaatacacctgagtgagatgcaagaccaaacttgacaaaagtggaaaacaaaaagacaaaaagacaaaaagctctttgaagggtagattatatatttaccataaatatcagctgatatcatggtatgaaagagattcagatattgctgatcattgagatctttgatgcttgttttggagaaaagatattgaaccatttctccatggccgtacaaagcggcgatgtggattggtgtcattgttttctcgttcgaaatatccggaagatctcggatcatgtttattaacatctcagcagtctcaatgtctcccaacgcggcagcaaaagacaagggtgtgttgccgtctttgtttttcagtgacaagtcagggggatccatttctctgagtagatttctcacaaaatccttgtgctttgctgcaacagctatgtgaagagcaatctcagaattaccagtaatttgctccacgacattacactcttttctcgatattaaagtgctggctgttttccaatctcctgtcagaacagctttatacattaaattccggctatgtggttttgtaactggagaaagaaatatgaaaatagaagagattaacaaaagaacacaaacaaaaagtggaatcaataaataaagagagcttatatgaactgttgcatatataccatcttctgaagtatgatcctcaacattgggcagtgaactaggatcttcatttggagatgacccacttggctctcctacttccactattacgtcttcttggtgaagctgtttgcctttatccaagattcccataattgtagattgagatctcattttggcagcttcacactctaatctccaaattggtcagcttccctggattatcaacatcacatataattatttagtttacagtaaagagatcatatatattagaaaagagtctaaccataccttcaatatcttttgtcgtcgggtaagacaatgaaattaacaggtacacgaaaaatatcgtacaagcaggtcaatggtggtagcacaaccatagatgatgcttataagcaactcgatgaacatggtgaaaagttcgtcgatcaatttctaattagtaattacaaattgaacgatgcattgactatttttttgttttactttgagtacaaaaactatgatatgcataatcacgtaccatctttagcctaacttaataacatgttggaataaagacgcatacaaatttgagatcagtttcctctcgtcattactcaattattatcgtaacaattaaaaaaaaaaaaacagtagtggcgccggccatttgaatggagccaaactgaaatgttctattattggtttttatatgggaaaaatatcatttaaattattattttaccattttcgttggtttaaagtttgaactctggacttggtaaattaaatcctcaattttatgttgattttcaatttaaattctcgttaactaagccaattgaggcacaaatttttttttttccggcatcgtcggtcgatttaaagacgagagattactttgaattggaagaagaagagaaaattcgaagaaaatgagagatttcgaagaaaaagggagaaaaaatcagaagttttgtaaaaaaaattataacgatgtgctttaattggcttagtaaacgaaaattcatgattaaaataaaagttaacataaaattgaggatttaaatcacaaggtccagagtttatgctttaaaccaacgaaaatgattaagtgatgatttaaatgacatttttctcgtttttatatatctcaaaactaaataacccaacaaaacaactcagtccacaagaaacagaagtttttgctagggaaaacactgacttgttaccaacttctagaaaaatacataaacttttgttattcacttccaacttatatgataaaatatacatttttgtgagactttggataaatttcaaattgatagccgcgtttgccatgaaagatgatgtgcccttcttaatttgttctttgacatagttgatgtggtgtcaaaaagaaaacaatatataatcacggtttggagacgatgttcatgtgatagagccaacaaccaaatgacgacccgtagtagattaagtcagcagcggcaatttccgggaagatttatcacactaagaagccaccctagatactctcataagtggattcaatggacttcgtccatgcctttactttacttaatactaccacagtaccactattggttccatctagtattttgtgctactaaactatttggcatgtcgagtttgtaactggagttaaataaaatgcacttgagtgtaattggaattaaatgaaaaagataagcatttttggggttttacaacagtgaaaacaaagatagggaaaaactcagaaacgagggagacaaaagttgacacctttaacgctttttcacattgtccaagtgcttgacccatacctctctgttcttcctctctctcttcccccaccacagtcaccactttactcttctccatcaggggtccgatcccatctccaattttaaaccctagaaatcaatctcaaaagcaagcgtgcttcattaatg

SEQ ID NO: 31516 - DNA, 260 bp, Unknown; identical to SEQ ID NO: 9671
  misc_feature (1)..( 260): 2750-1469P.txt file - cDNA_ID_3042902; gDNA_ID_1972168; Annot_ID_179805

SEQ ID NO: 31517 - DNA, 3000 bp, Unknown; identical to SEQ ID NO: 9605
  misc_feature (1)..( 3000): 2750-1469P.txt file - cDNA_ID_3042902; gDNA_ID_1972160; Annot_ID_179577

SEQ ID NO: 31518 - DNA, 3003 bp, Unknown
  misc_feature (1)..( 3003): 2750-1469P.txt file - cDNA_ID_3042912; gDNA_ID_1972168; Annot_ID_179799
tccaacaagaagttgaggacagtaccattatctgagtcagatatctttccttcttcattccacaaaacaccagaagggagaaggaagctaacgaaggaagagttgcaaaaattcactaaagagagcacggaaaatgcattgaaggaattggtttcttcacctggttttggcgaatgggcggtgaaaaatgctaaaagaatcactgtaaatccgataaaggaatcgtcaagtaaatagggtgatactgttaagcgcagaagaaggttcctctggttctgaaaagcaagcagctaggggaacttctgaaccagtcggagagtgtagtaggttgcttgtgaacaaagcaacaagccttgcttatatatagtcttctggaaaagaactaatgagcaaggcgaaaaagttgagagattaacttctaaatcaacaaaatgtaacctttgacataaattgatattgaccaataagatcatacgtttccatgtgtgtagtcatcaatgatgtgaaactcaatactatagtgtattttatttgaatggacgatgatagttggtataataaaggaggaaataaataaagtcatctttttgttatttaacggctgaaatttcaatagcaatttaatttgaatgattccagttccacaaatatgagttggtcatctatatcacatgtaagttttcttagttatatttaaaaatcattaaaatctaagagtagtccttggagagaacatgtctcttgtctcctaaacctcctttattatccatcatcattgtcactaaccctattattattccattcacagcgaagaaaaagaagcaaagagttcgttataaagaaagaaataaaccctcagataagagcataacagagaagaagaagaagatgtcttatcaagacccacaacatcccgttagtgctcctcctcctcaaggtaattcccaattttttccaagtttttagggtatttttgtttcttgtttcttaagtttcgatgttgttgttttgtcagggtatcctcctaaggaaggatatccaccagcagggtatcctccaccagcaggttatcctccaccacaatatcctcaagcgggatatcctccagcaggttatcctccaccgcagcaaggatacggtcaaggatatccagcacaaggctatcctccaccgcaatatcctcaaggtcatccaccacaatatccttatcaaggtcctccaccaccgcattatggtcaggctccaccgaaaaataagaaagataagaaggattcaggaggcttcatggaaggatggtgcgttgaccaattatctctctctttttatattaacatatagttttgaatacttgaagctgatgatatacctttttttggttcattattcataaattttggtatggagtaatatggatattcaaagtctatatgtttggtacttataaaatgtgtatttgttttgtattacagtttggctatgctctgctgttgcgttctcttggaagcttgcttttgatcggaagatgagctgatatttgccgttgaccgtcttgaggatgctattcaattttgtcaaacatgttaaaaagacgtgtttgatatacattttagatctcttcttctggttatgtgtgtccacgttttgggtttgtttctttaattttctttaattttatgaatgaatccgaatttgacttgaggtcttgtttactttcatgactattgattgattcagggtatgttacccatcttttgtatatgtgtgttttatcttttgtataaaagccattcattctttccaactagaggaacacaaaaaaagaaagcaacccaattttgttctctttctcatcaaaaatgtaagaagaagtgactgtatcaacgtgatcaaaacttagcattaccatcaaacttatataaatttatacttacggtccgatatatttccattttccgtctcaaacatatatgtcacatccaccattcctcggttgatcaactattcaatgtacaaatttttataaaaatactactaaatcgtatataatcttgagtcttcacttcttatatttaatgtaagagagtggtttagtatccaccgattaactcggttcaaaccaaaaatacaccaaaatgatatgactgaattgtgaaatcagtccaagaactaaaagtcgatgagctcggcatcgacctccatgaagataaggaaagattcactcaaatcttaagaaataatacggtaaagaatattagacatattcccatccgaaaaataagaagctcgatgaccaaacaaaaaatccgtaattctattttcgaaaaccctaaatttattatattactaaaaaatctcttgtaattgtcaagtttactctcaaaaatcatttttcttgaatctcttgtttactctaatttctactttgcttttactcgcattgttaatttaatttcataaattaatccctaatagatcaaatgggtgtatttttgcaattataaagtttaagacgaatttgtaaaaatgaagataataaagggctcccagtaaagcacctcaaaatcgatacatacttcatcctccaacatgcgtaggtgaatcgaaagattaaaggtcaaatttttgtgtcttctcttcctctgtctcatgccacaatttttagatttcaaactttgatccatgacactctccatagcttcctctctcattcccttcagctttctcaggcatgtcttcttcttcctcttcttctccttgttaatttccccatttccctgatcgaaagctttaatctttttctcgtgcgtgtcttcgtaatctctggcgtttctattgaattactaatgcaattgaaaaacttggggatttcattataaagtattgatctttgtgatgttttcatctgttcacagagaattgaagtcgagacattagaagtgtttgttgtgtgtgtgtgtgtgtttctatagaatttttgaattttgtgataaaattgtgtgaatg

SEQ ID NO: 31519 - DNA, 3000 bp, Unknown
  misc_feature (1)..( 3000): 2750-1469P.txt file - cDNA_ID_3042942; gDNA_ID_1972168; Annot_ID_179778
aagttggatcatgctgttaacaatctcttgatgctcaggaagaagttgatgctgttttcgtaaacgccattttgaccgctatccaacaacggaatttagaggtaacgccacgaaaaccaaaagtttgtgcagtttttgtttctcttctgttcaagctaatgttgtatcttcgcatgtgatatgactcttcagcgaatatgggcaaaacctgtcttagaccgtgtgggtcttataatcgaaatatttaatgctcatgcgcatacaaaggaagcaaaactacaggtactgtgacaatacagatttgtccttttacatactaggaaaggtttattaatagctgattggttcatccattcacaggctgagttagctgctttgatgtacaataagagcagactggttcgagtgcgtggtactgatggacgccatacttttgggcagtttggagaagctgaagttgtcagtgcccgagggtgagtgattaatctatactactttgtgtattctctttactcttttgatttttgagacaatgatgaaactgttgttaaattgttgtgcaggagagcaggaagcaagggaaccggtggcggttttgtaggtggtgcaggagaaactgagcttcagcttcaacgccgaaggtcttgtctaattgttggttaaccgaaagacttagtgcatggctctcttttctaatattaaatctatgcgttaaacaaaatcttgatgtaccagaatatcagaccggaggattcgcttgttatcccaaattaaagaagcccagcgaacacggctattgcagcgtgctggacgtaagaaaagagtggggttagagggtgagagttcaggaaccattgctgttgttggttacacaaatgctgtaagtgtttgaattttgctccgaagaagtttcagctagaaaccaagtgttttagtctactttctgagtatcaattatctgcttttgttagggaaaatcgactctgataagtgcactaacaaagactgctctctactgcaatgagcggtataattcaatggtttcataactatcttaaaactgttaaatttgaaactgaagtcataacttttgaatggttggtctggcctctgcagattgtttgccacattagatcctacactcaagagtgcccatcttccttctgggtaagttaatttgtacgttgagaatcatgtttataactttctggtacacatgaacttgtactgaatcgcaagagtcaatttcttttcagaaactttgtgcttcttagtgacactgtcggattcatatcagatctgcctatacaggtaatgtatacctactttaattccacttatcctttatcaagtgatatttcacttacttttcttttcttggctcatgcctttttgcagctggtgaaagcttttcaatcgactctggaagaagttgttgaagctgatctacttctggtaagagctaaataaataaataaaataatattccatagttacatttagaagagaaaactgcagaaagacttggcgttgatatgattaaacccctgcagcatgtagttgattcaacagctccaaatatcgaggagcatcgttcaacagtgcttcatgtcctaaatcaaattggagtacctgaagagaagcttcaaaatatgattgaagtctggaataaggtaggattgatatataaaccatctatacaagtagaagaagcaaccaccttttttcacactgggaattttgttgtagattgattatgaagaagacgaagtggaggaagagaaatatctagatgatggcgaaggagtaggagaagaagacgaagacgaagctgatttaaaagctgaagaaactgttgatgcatctgaagcaacagtagatgaagaccaaatccaaaacggagacggtgacgacgctgatgggtggctattgtctgaagatgaaaatgctgacgaccctgagttctggaaagttccggaagttgctaaagtagatgctgcaaataagaaaggaccagatgttagagtttctgcattaaccggagttggtttgaaggagttgctgtatcttattgatgacaaaatgaaagagaagaagctcaagtctccgactatagtcgaaaggagtgagcttcataagcgtaaatggaggccacctcgtaacgatgatgaagaggagagattaatcccgttagatcaacgttgagaatataagaagaaacgaaacaatggttttgtcttctgcttctatgttcctttttttgtaccacggaatcagagaagtgcgtgtcgttttgaaacttgtacgtgtgtaaaaaacggcaagaagtttgttggtattctgattaataaatggacttaaaacgctgtcgttttcgtaacagcgcgtcatagactcgtagccatacgcgctttgtagaggcaggtataaataagtagatagcgatattgaagcagtgatattaacacttcgaagcttcttcttcctttagtaaattcaagtgtgaggtgtgtttattgataaagtgctcattttctcggatctcagatcttagatccaaaccctcattatttcattgatccaaggtagatttcgatttcttccttcttcttcttcctcttctcgatttgggtttccttcgtctaccgttctgcgagctgtttcatggatcaatctgtaattggatttgtttctggtgaaattcattgttaatgtagaacgaaacgcagctaatttgttgtgggatctaatagattttaaggttatgtgtttgtttcgtcgatggttatgttggatctgtgaattggagaattaattagcttagttttgtcgatttctgtgtttggtttgcttgagaatggtgttttattccacgttgatttgttcattttgcttagtgttgttctatgaatgttaattctaaaaaaggatacaaattaatccaatttagtgtttgatgtgtagatctaatagcttgagcttgctgggattttagttatg

SEQ ID NO: 31520 - DNA, 3003 bp, Unknown; identical to SEQ ID NO: 29463
  misc_feature (1)..( 3003): 2750-1469P.txt file - cDNA_ID_3042949; gDNA_ID_1972168; Annot_ID_179774

SEQ ID NO: 31521 - DNA, 3003 bp, Unknown
  misc_feature (1)..( 3003): 2750-1469P.txt file - cDNA_ID_3042953; gDNA_ID_2684126; Annot_ID_191115
caaagctatttttgcaaaaattgttatctagttaaggaaaagttgatagctttggaacagttctgttattgatcgagattcaacacttttgaagggtcgtatttagagggttgtaagatacatcttcttttggtgtttgcgtctatagggtattgttgaataaaggaattctcatgattcgttataaatttgcagaggttgtggaacatttcgtctgctaagttcctcaaaacatacactggccacgtgaacgcacagtattgcatttcctctgcgttctccgtcacaaatggaaagcgaatagtcagtggatccgaggacaactgtgtacacatgtgggagctaaactccaagaaactgctacagaaacttgagggtcatactgagaccgtcatgaacgtagcatgccacccgacagagaacttgatcgcatcaggctcgctcgacaagacagtaaggatttggacacagaagaaagaataaatcatcactctctctcttcagaaatcaaacatgtaggtacatgccaccttcttcatgcagtaatcatctgttgcttactaagcttgttagattgattctagcctcattatgtaaaagtctaatttttgtttggtgtaagggaagtgcaacagactgttctaaacttgtaatagttctctgtgtgactcagaactatttaggtaggtcttaaggcaaagactcctgcaagtgcaaaggcatttgagagaatgaacacaaatcttcataggtttaccctttactcattgtatctattaagctgatgcaatgcttcaccaatactattggttataaagtagtttcaggattgaaaattgttcatctgaaccatattgatgggtggctcatgggtcaaagtacagatatatgactataagtagataatgtatggtagttggttactttggttggccatgatgatgaagcttatggtcccctggtcctgtcccattttttacttttcattttcacttttatcgtaaagtcttcttttttttaaaccctacaagattttgaaatggaccacttgaaaatttgaacccactctctctttttttgttttcaatttcgaaaccaaaattttttaacaaaaagatgactttgtgacctttgttctgtcttttagctacacaccagtgggctgtttgcttttacagcgtgtctttctgtttacatgattcaagagaaagcaacagttcctaaagactcagtcatgtttgtgtctctcccaattgatacaaagaccaaaattcagctttggttcttttgtgtaaaagttctcgagatatgctaataagattaaacataaaaactctcaaaaagagtataaattgaattctttatgattgtagtagcaaacaataattgttaggtttagtgctatcataataatctattagtcaggttaaatatattcgatttggtaccaaatacgaaatcaagcttcaacaaacgaatctgcaatacacacacacccatccaaaagtatatcttcgacattttccccaaaaaagtatacatttcctaacacgtgcttaccaattcttatcattcgaagtaaaccattaaacaagaaatgttttcattattataaatttttcactaatataagtttattatttagtgcaagaaagtgcgttgcagatgaaaacttattctattgatccgggtccataaagaagaaaacaaaaattcacctaatacgagtacgacttattctagtggctacatatttccctaatcatgtgactaaaaatctgctttcaaaattttgacattcagtatttctttagatctatatcattaaaaattcatttttttcttttgcattttgattccatatttaatacaagattaaaaaaaaaaaaactaatatgtttgttcactgagcaaaccattattgttgatcagtgaactgtggtaactggcaaaagaagcaaatgattcgaaatcctactttcttacaaaatcaaattggataattttgtgagataataaaaaatcagtataaataaaataaaatacatgtcgggaaaccattattgttgatcagtgaactgtggtaactggcaaaagatgaaaatgatgcacataggactgtgtttaactgacttacttccactaatcaaaagtacgatcgtatccctacccatctctcgaggatcttaactgttgccgtgcgtcatctcaaggttgttctcgtcattatcagtcgatcagagtacagagaccggctctctgggttttgtcgatcatgccattgccttggggcttgttgttgtggtccgtcctaaggatagaaatgttattacaaagctttttaaggggttctttggttaattaagtgtttcgttttgcttaagagaggttaaagaagcgggtgtctcaataagttttggtaagtttgtgaatccccagtggtggactccatcttttcccgtcgaattataacatcaggaccgttcatttcaacatcatcaattaattcattatggggtttatctttaaaacatctttttgaatttatggttcgctttggtattgcattattacacttgtatacctgtgtaataaagtgttggattttgtcaagattaggtaacatcacgtttcaaaacaacaaggctccaaattaattaacattttcttcatgtaattatcgtttttgaatcccttcctttctaattccatgtttcattaaatccaccacatgcatatgtttctatatatgttaaataaacgacttttcaagtttttaatttgtgttttctattttcagaaaatttatgtgaaatcaaagtttcttaaaaatctccctccaagtaaattccaaaataaaataaaaataatacttttacaatatacaaataaaactcataaaaaacacacacacaatcttcatcttcctcacttactctcaccctttttaaaaccaaaccctaacttacacagaaagagaagaaaaaaaacaaaaaaaaaatg

SEQ ID NO: 31522 - DNA, 3003 bp, Unknown; identical to SEQ ID NO: 31521
  misc_feature (1)..( 3003): 2750-1469P.txt file - cDNA_ID_3042953; gDNA_ID_1972168; Annot_ID_179773

SEQ ID NO: 31523 - DNA, 3003 bp, Unknown
  misc_feature (1)..( 3003): 2750-1469P.txt file - cDNA_ID_3043071; gDNA_ID_1972172; Annot_ID_179871
aaaggaactagaaggttattgaacactttttgagtttagttctatttttttttctttctaaaaatactttagtgattctttttcttttaagcaatgagatttgttcttcttcttctcaccatatcctatgcaaaatctttcttgataattgaacaaatatttatgcaaaaagagagtatgggaagttcgattttcacggtcatgtatccatcagaaattgtgtacttgaattttcttagggttgtgtgtatcagtttgatattattccttttactttttgctttaagttcctttgttttgatttccaaaattctacaaaaatacaacctgaaaaaaggcctaaagccccccccccccactaatctggcttgactatcacaaatcttcttgatatttcttcctacaatgaaccttttctttttcgcttttcacaacttatgactgtttcatttttgcatagccgtcaaagagcatttttaggctccactttgttcaaaagaaagagtgagtttcagaacgccatggaaactaggagggaagagcaatatccgaaaaatcgaagttttgattccatgtaatgaaaccagaacgcacccgcatcaaactcgggtttataacagcaaaagtatctaacaaaaacaacaaaaaaaataccaaaaaggcggtttcaaaagcgttaagaacctcttttcaaaccccattacattcaacaacagcttcagcagctcgtcttggtttgttcttccttctgctcccattctgcctaaacccaatagacgacgatgatttcatagaatcttctgtgcttgattttgaccctaccccattctcttcttcagttatgttgctctctttagactccactggtttcttcctcttcctcccattctctgtcacattttctttacttgttactgaaccatttgtatcatcatccttgtcttcttcctcatctgtcttcttcactagctcttcttcttcttcttcttcatctttcaccggcttctgtggcctccctcttttcctaaaagctggaatcttttcttcctcgccgctccctcgatcttctctagcagtagcattctgcctcttgccttttcctctacctcttctcataactctattcaaaccaaaaaccaaaaacctcaagcaactagacaagaaacctgcaagttgaaaaggttgctttttaattaccagtagtaactcatacctcacaacaacacaatgaaggcgaactaaactcaaacactatagaaatttgttgaagaatgcagactaaaaagtgtgaaaagcaatgtcatttttttcgatatgcacaaaagtagaggatcattcaaactggcagacactccatagaggaggaactattcattgaagaatcaacacaagcgcaatcataaacacgaaagcaagattccatttttttcatgcattagaagcagtgcattgaacaagttatttaacaacatccaaatacaaattctttccaaaaagatctgaacaaaggaaacatatataagcaacacttgagtcacgagacattaaacaatttcatctcttaaaaacctatcctttagagctcaatagaaaccaagaactaagctacaagcaagttcaatcaattatcttccacgaaaactaattgcatgaacagtctaaacaagaaaacaagccctagtttccttacaatctcttcaaaacagagagacagagactcacctgtgaacccattggtcagactgagacaaaaaccccaaaaaacctataaagggtttctctttttactaatttatagttgggttctcaatcgatctaactcacgagtttctacagctaaaacccagatcagaggaaagactaagagtctaaagaaaactgaccaaaccaaacggaggaatcaaatcgaataaaaatccaaaggataagactcaagttaaaagaaagagatctaagagaagaaggaaggaagaaaacgaagagaaagagcaacagctagagtactagtgttggttgaaaaagattaaagttgattgctttcaaaaggcttctcttttctttgttctagcttctgtctctgagtgaaacttaaaagaaaaacgtaagaatgacgctttttcttctcactaccatcactgagactgactaaaatggatcttaagcccgttgaagatggatacggatttcacccacgcgccccctttttggcgcgtgctttcacattctactcgttttcgaactcgttgggttcggttggataagagacgacagctaatagccgcgtttcatccaaacatttcaaaacactttccacgggcttcttcttttcctttaacgtttgggctttggcccattagagttcactttatttgttatctctctattctctctatctatatactaataatattctatatgtcaaaatcatcacattttgtaattcagcttcatcagctatataaattgaagttacatcgcttcaaaattgttttcaaaaacattcaacaaaggattttgtcaccagactcaccactaacaactacaaaaaaaactaaaagagagagacacatatgattcttcccgggcttcttcttttactgggccttttatgcttatgcccattagagttcactttattgaacccgattttatatgaatagtggcattaaaccatttcggtctagtactcggttatgaatgattcattcattgagtaagaaggacaaaaaggtcaaagcagaaaaatcataatttcttcggtcctaaaccctactcaacaatttagaaaccctaagttctgttccggtggtccttgttatttttttttattttggtgttgttcttaaaattcagttccaaacggaaattgatttcttcgtcagttgcgttttttaccaacactcgaaagcagaacccatattttgttattgaatttgggtttttttttgtctgtgttaagaagattaagtaggaggaagaagaagagctagttttgcgagaatg

SEQ ID NO: 31524 - DNA, 3003 bp, Unknown
  misc_feature (1)..( 3003): 2750-1469P.txt file - cDNA_ID_3043077; gDNA_ID_1972172; Annot_ID_179866
tttattttctgtctatgtaaaagccatcatgattcgtttaggtgaatcagaagaaaataactctgggtaaaattccaaaatgtatactatcaaatggatatagatagacgacaagttttaaacgcgttagcgaactcttcttgtggctttggtattttagtttattaggtataaaatggaaatcatccacacttcggagcaattgttacaaaaatgcgattatctttctaccgactaatgttgggtagacataattagtttacaaaatgttctttttccatttgtcaccaaagttttcttcattattttatgaaacaagacttgggcagttggacatatatactatattagtagttaaattgcatatgtttgatctgttgatttgtatattcagttcttaaactaaataacaagtactaactatatttcagtatttgtatataatcatttagtatcgaaacggtctcgtggtcgtggcacctttaattgctgagagggccgtcttttacttttcgttctagctttatgatgtgccaccgagtagttaagagaatgcttctgctccaagtattttgacataatttaatcaaaagtattagctactttacacggacaataatctaattttataattagagtaagatagaaattaaagaagatattggtagtcgttgcaaatgacacgtgttgatcatgctttgctcgcatttgtatagcttcgacttgaaggatttcagtccaccgtacgtttaccacgatcgagtcacccactacggtcataactaatactataatttgataagtgtaataagaagacaaatgataaaaaaaaaagaagaagacaaatttgctaagatgacagtttgtaatccatatcttatcacatctacaagagagatatatacaactctttttcttaagagatgattaatgcgttaaacaagtttaaccagttatcaaaaatatgtaaatcttttctccagaggtttaaagacaacgtcacggtaattgtttcgtcgaaaaatgactattttaaactgtacggttcatggtcactttttgtgtatttacataaagaaaaaatattaaattttatactcagaattaggtatgggcacgaagcggatatccggaaaaattatgatatttgttattcgattcgttttaaacgaatacttgattttgtgattcgctttacttcgaaaatttccagatatccggaatttcgaatatccggaattttttgtgatatttgcggatatccgctttgatacatttaaatattaaaaaaatatgtatactatataactatatcatatattcaaaaaatttatccgtgcgttccttaattggtgtctccgtgtgcttttaaaataagttctaaataccaaacataaccgttgttggtatcaccggtcaacaaaatattatcaaactaattccaaaactaaaacccgatagttttttgatgccattgatcaaaacataacataaaaaaaaatgatcaaacaaacatcttaacataaaaacataaaatgacaacaatacacaaactatttatgatatctatatatagatatactatattttctaatatatataaaaagatacggatcgaagcggatattcgattttttaaaaaacaatatttattatttgattcgatttttacgaatactatatttttctatttgctttgctccaaaatcttacgaatattcggatttttcgaatcaaattaaatcaaataccgaatcgaaacggatcaaatcaaatcaaatcagaatattgagctagctgaatgaatgagataacctaagaatccaaaagttgatagtgttccctttccgaattccaatagtagcttgataacatttatttaacggcgataaattcaaccgttagtttgattaccaatcaaataattgcttgcaatagacggatgaaacgagtggtaagaataggtgattgaaacaaacggttaaaagcttaaacaaaataggtgagtttgcaacctctcttgttcaccattggaatattttagttatttaacgtttcttagatttttaaaactgtaatgtatttgaattatttactaaagagttttgtttttctttgttttttaaatatttttagttatttattaaatattttaatttagttttttttttttactgtttaaccgtttgttactaatcataactattatttaacggttcattttaaattatttatcattttttcttttaatatattttctaaccgtttttttttatcagtcttttttgtaagtgttaaataaaataaccgccttatttaaacgatattaccaattggtttaattttaggttgttcatcttttctaaccgtttttttctacccgcctttttctgtaactgctaaaaaacataaccgtctcatttaaacgatgtttacccattgcaaaccattttccttaaacaagcggacaatatttaaattgcaatgaaagcgagttatgagttcttttggcctaaacttcccaattttatctctctttttcccactaatcttctaacaattttaattaacagtgacaacttacaagtacttaggtaaccaagtatatttccctattgtaaaacctaattatgagttgtgatgatcaccttttctccttttgacgaacgcttaggacctaacttattgcaacaatggcctaactaaaacttaaatgcgatttgcattcaattctcaaatgggcctctttagttaacatgttatctccgttcatctgacgtgtcatagctcagatcaaaggttaatctactcgtaaatccaacgaccaaagaaacgaagcgtacgttactaacatacacgtgcacgcactgtaaccatctctctctctgctcttctccttcaatgaaatgattcgtcacccaaagaaagatctgcaacttcaccaccggaccagtctctctctatctcttctgtctctctacctcgcgcgacgaatcaatcatg

SEQ ID NO: 31525 - DNA, 3000 bp, Unknown; identical to SEQ ID NO: 9694
  misc_feature (1)..( 3000): 2750-1469P.txt file - cDNA_ID_3043081; gDNA_ID_1972172; Annot_ID_179864

SEQ ID NO: 31526 - DNA, 3003 bp, Unknown
  misc_feature (1)..( 3003): 2750-1469P.txt file - cDNA_ID_3043120; gDNA_ID_1972173; Annot_ID_179923
tatattttgaacacggccggattggttgtcttatgattaagtgaatgctttagatctggtgacgattggtatatgagatatatagtagaatgatagaacatcagaaatactataagtcaccatatttttaaaaaataaatgctatagaatttttgttttggtaattgttataactctacaaagttatgtgttatagagttttactagtttcatcgttatcatgtgtatagtataacacaacaaaagaaattttaaatatctgaaaacataaaaatttaataaaatgatgtgagtataagaaaaaaagaaagaaagaaacacgtaaaaaataaaaatcatcatacatataacaattttcaaaagatcaatgttactttaattagtcttttttcttatgtttcatgcaaatgcaatagtattacttttctttaatctaagattatgtgttgcttttaagcaagaactattcaaagagtcaaagacatgcatgtaaactttagagaacgggatctttcatcaatcttatttttttcccttttttttttacaacgaacgataggtagtaagcatgaatctggttcaaagtttggatcagtgtgggcataatcctggttcgctaaaaagaatcaatataatatatgttgagcgtaagagaagaaagctcatagttctgtgtagaaaaaacgtggagattggagagaaattactaagagagcgaagagaagagtaaacctagaagatacaaaagacgctatcaaaagattgttttatgtgtttatgaaacattcacttaggccagtataaatattaaatgtcattttgagaaagaaaaaaaaatggtgtcattttgaggatataaatattttctcaacaagatgttttagactttcaacataacgatcatttaaaactacataatttatctcttcgttaaaaacttaacattaacaaaaagttaaattcgacaagaagagtttattcaataagtatactgtatgtgtttattttattcacatgaaaagtgtcaaacaacacttgggatacatatttcatgcctaaaaatcgtataacaacatttaaggtaatcagtaaatttgatgcctaaactaaaatatgtgaccattttgaccaatgagcattttttggaaataaaactactgcatacgacctggtcaaacacatgaactgccactgcttttaaaactacctttttaaacttttgacgtccatttttatttactaattattatgttaatcaaaccactaacattatgattcgaaatttcgagtgatgattgttagaagtgatgtgaatgatgcggtataaaacaaattgtgatatatattcactcatatatatcaaaatcaaaatagcttatcgttccaaaacatgattgataaaatgtaattactattcaaaacttaaagccagtagttaaaataaaacaaaataaatagtatatgtttcatattaatgccaaaccaatattttgttttgatgaggaaaagtctttttttttttttctttttttttctcatagttaaaagacataaaaaaaattaatattacaaacaagacaaaaaaaaagaataaataaaacaacaatcattactgtcaaatcaattatcagagggaaaagttattaagaaatgtcaaccaatgagtatcattatcatcatgcttttttagacccttctttttaattcatcaagatttagtcttgtttataaatttgaagtaaaattctaaatgaatcaattctacaattttttccctacattattgtaacgataaaatttaagatcaacaattacttcgttaattttttttctgataaaaatatttgatatctttctgattatgatatattagcattgtttttgtattgtatgtatggtaattaattttagttcaaaagaataataaatggtttgattagcatgaatttaataaaaaaataagactgaataaacataggtaataaactttgtttcttttggtaaatgtaaaattagaaaaaatcataatcccaaggtaattactataattacattcaatgtcagaattaaacgtagtgaataaaaaccgtaaaacatgagaaaaacaagaatttattatctttgacaagcaataaatgaaatgctgacaaaaaattggtttcaaagtttcaacgcgtttcttataataagaattcaatttcgtgcagctaatcaggagataattatcataattaaattaatcgttactactttataatactcccaaaataatcgaaaacgaatttattttattgtaatttgtttaataataaagaattactgtttcctcccacttcccatctctcttttccttttgtgttcttcttcttctccgctttgtttccccaatctctctcttctctctctctgaagaaaaataaataaaagatctaactttgacggctctcttaatcttactcactccgtaagttccaaatctctctcctttactctcatatctatatcgtccgaacaaaacccaggagaattgcttcaccccctttttgggtttttaatcattttctcagattctcagtttctgtttccgtcttctagattctgggttcagtttctgttttgctcttattgaattttcttattcattttgtgtttcggagttattcatggtagctgaatttgttaattctgatgttgttttgcgttttcttcttttctagtttggctatgtcgtctttgatctgatgctgggttattctctttccctctgttttggtttcttttagggttttaagtcggaatagactgatgggagcttgatggttattgttagatcagatgtggatttaaagccttcgctgaactaacaagtctatggaagaagcaaagacccttgttttacactgtatgttgtgaggaatttgtctgattttgggtgataaaggtgaagtctttgagtttgtaattttgagataagattggatggtgggaagagaggatgcgatg

SEQ ID NO: 31527 - DNA, 3003 bp, Unknown
  misc_feature (1)..( 3003): 2750-1469P.txt file - cDNA_ID_3043124; gDNA_ID_1972173; Annot_ID_179922
aaactcccaaaaaaaacatatgtttcgctaattactttttattcgaaattttttgcatcctcttctgccaaaatcattatataaaacatcccaaaacccttggaataatgattccataaatgaaaatctatttttgacccgttataatatttttcatgtattgaacagtttatattcgtttgaaaaaaattcaaattatagcatatgcgaaaaaactctaattattttttataacgatgatattatttttcgcaaaaacagaatcatttaaagatgagaggtgaactataataattaataaaaaattaatatgataatttagatatcaaatctaatttgttgattgtaattggttacttttaaaaattaccaatgtatttcgttttttaattaattaaattagtatttgactttttaattcttaaagagatgaattaatttactttttaaagtattacttctaatggcatacctatgtacttacttacaaaaaataaggttacatttaaaatgtacttcccaaataatatagtaggattgaatctttcgactaaaaaaaggttctatcttcttcttcttctccttatgtgacaagaacgaacaatcctccattgacccaaatttcgaaaatgtcaacgaatctttttcgtcttattctcgtattcatcactttatctatcgcttcatctctgtcaactccgtcgccggctgattctcctccttatctatggccgttaccggcggagttttcgttcggaaacgaaacgctctcggtggatcccgccgtgactctaatcgtagctggaaatggtggtggatctccgattgttagagctgcgtttgtacaaacaggagataaacgtgcatgatttaatatgattttagaggaacttatgttctaggaaatagacccaaagataccatcaaattttaaagaccatttcacgagatatctcaaaagtcaaaagactgtctatacgtacgttagggacttatgtctcttcgttttggaaaacaagacattattatcttctctaagcacatcatgcaaacttagtataatcttcttatgatgtagaatcaggactcatgactcatgagtgttacttagtaatgtaagttcacaacgtaagcgagagataatcgtaggatttatatggttctacaatataatgaatagtataacccatctaattttctttttagtttgcttatgtgtatacataacaacttcacataaagaaagcttataagcattcaaacattcgaacattataaatggtattatatttattcaatcattctcatggttacatttatttgataaattatagtgataacaaaaactttttttcttcttcttaaggaccatcttcccatttaaaacagtaaggcaaatgtctcccatcacgatcaatacgacaaatatggccgttatcaccatattttcctacttcccatatacattttttacaaactggaaaacgtccatctggattatcatctctgtatactttaaaaatattaaagtaatgagatccgtcattatgtcaagtaaagtgacaacgaaatttggtatttttccaaaagttgacgtgaaagctgaaatcccatgtaccattccaaggaatatggaccatcccaaagtcatcttcactcgatctgcaatgtacattcaaaatttctctattttttaccacattgcggattacaacatgttttttggctagaggtaagtagtcgtcagggtccgaacttggtacttctacgggagcattagaaaaattcaatgcagacacaaaaagaataagaatagaaaagatcataaataacattggaaaatgagatttattattaaaagtcataactaggtaaattatgtaggtgtggttagatagaacttagagacaccctatttatagagataagaacatgtcaatatatttgagagtgaagttgactaacattcatgtaacgttaaatacatgtacttactctatgttagtattcaactcaacgacataattttttttttttccttttgagttatagatttattagttttaataagaaataaatatgtgtttggtaaaaaatatttttagttatgttttatatattataatctacaatatttggaaaaatagttaatcattttttgactgtcacataaaaagaaaaaatctttttgatgctttgactttgtaaaactattaaaagatctcaaagtcttatttttattaaatttacataagacccatgaaattgtttagtttacacaaaacacaaattaactggtctgggtgaaaagatgataaatatattaaacagacttcgtaaaatgggctttgcagttgggctttatacgttcgttcttcgaccctttatgaatccgatcaacttgtatataaaagaacatcaaatcagcttttgctagtgagaaatatcatatggtaattaatgtatcaatcaatgcacattctgatactaatcagaacacaaaagattttgaattcatcggaactaaacacacacaccttagtaagagttaagaaatatgtttccaccgaactaacagaaacatgataccaactcaagttggttgttcgtgtaataaataaaaattgaatctttcgactaaaacaaagtttatcttcttcttcttcttatgtgacaagaacgaacaatcctccattgacccaaatttcgaaaatgtcaacgaatcttcttcgtcttattctcctattcatcactttatctatcacttcatctctgtcaactccgtcgccggctgattctcctccttatctatggccgttaccggcggagttttcgttcggaaacgaaacgctctcggtggatcccaccgtgactctaatcgtagctggaaatggcggtggatctctgattattagagctgcgtttgataggtatatgggtataatctttaaacacgcttctggtagaggttctctattgtcgaggattagatttctgaaaatg

SEQ ID NO: 31528 - DNA, 3000 bp, Unknown; identical to SEQ ID NO: 9700
  misc_feature (1)..( 3000): 2750-1469P.txt file - cDNA_ID_3043140; gDNA_ID_1972173; Annot_ID_179913

SEQ ID NO: 31529 - DNA, 3003 bp, Unknown
  misc_feature (1)..( 3003): 2750-1469P.txt file - cDNA_ID_3043144; gDNA_ID_1972173; Annot_ID_179911
atcaactaaatatcccaactttggcatgcccatcactgataaagcaactctagacacacagaatcgattaccaccatcttcaaaaccgccatattcatcacaaagctccttaaaacatgaactgatcactgaatgaaacttagtggttttagccaaggctgaaacaagggtcttatgaagaggcaaagaattctccatgaagagtatctccaagtaaaacctaatagcttcccttacagaaactgtctctctctcgcctccttcattctcattggccttggcgagaaactctccgaacgaagcaacaactttcttggcgtgattaacttgcgcgtagattgaattcaacgaaaccaattcttcaatgttggagtaaaacttgggacaagactgagacaaactagattggctcaaagaagcagtgaacgagctggggaacagaacagcactgtaagtataacgatggcgatgctgcagagctcgccacttcgcagacatgtttcagtgagctgaggaaaaacagagaaacaataaaaatttgaactttatttttttcacttgaatgaaaaatagaaaatatggtaaaacagattaaagatcataccgggaaaagcggctaagtgtacgagagagcttattaggaggccggagcaataccagtgagtaacctaagaggcgacgcggcggaggcggaagaaagcacccgccttcaaatctttcaactggagaagatatgggccttacttgtgtttttaatgggcctgatttttagacaaatgagaaaacattttggttgtctaggacgactgcttagttgtgctataatgagttcttgaagccaatatttcagttgatttgagtgtaaatttcagttgcaactggttgcatagctcatcaacacagttcgaacatggtaatgctcttgtctcagattgcttataaaacaattagctaggttcttagactgtcccaaagtgaataataaacaggtgatgatgttaagtggcttttgttcgcagaatcttacgtttttgcagattttattgccgagaccaaatagatcagcccacgagctagttctcgaaagtcaaatagggtaaatctcaaatttataacaaagaacgtgcgtgagagatcatacaatcatgtttgaagaatcaaatctttaattgaaagaaaattcagatatattagagaagactgagggaggactctctgacagtagaaagataattaaactttgatggcatactttctaattggaaagtacatgtctttcttcttctctcgttctgtcttcagcgacgcctatccaatgcagagaaaaagtcatgaagtatggaccaaaacaaagcatgtcactgaattcaaaatacctggtgtttagtgagtctccttctgatggctctagtcttcttgggacggagatcgagtggcaacaacttcttgtttttgtatgcttctctaagagcagacttttgtttctgtgagctcacagtcaacacttgcgcaatcgacttcctcaccactttgctgcaacaacccaaaaacaaaagaccacaattagatccataataacttaatttgaggccttaccaagattgctaaaagtcctaaacaaaaacaatggtcttgcttgttcagagattcaaatagattatataaatatctttcttttcccatttcgcagacatacaagataactaaaaatcccaaaaactgcaacaataaacccaagactaatctaagcctcgattgttttaaacaccaatgttttggcgtctgtgtgcatagggattttgcttaagatgctaaagatatctaaaaacaatgaacataaaagcaaacacaagcaaaaaaaaactgatgactaaagactagaaatcaacaattccataagccaggtaccaataccatgcaaagggcaacacactaatcacatgaatgtatcaaaatgcctaatttgtaaacactggcaccataaacaattcaatataaatgcaattaacaattaaaaaatcaacaatctagtaatctactattctcagtagctttagatcatactcagaaagaggctagtgattccaatatcaagcagctcaaaatattccaacatttgtataataaggctgagagtagagaacaattacatcttagagagcttgttaggagcaccaccagtgaccttagcgacacgtagggaagcaagctctgccttcaattctttcaattgagtagaaagatccgattttgatttatctctcaactcatgaaccttgattctcgctgttcacggatccatttcaacacaacacaataagaaaatggagccaaacataagcaactcaaacaataatggtggaaatgattcaagagtagggacttacccatggcgtcttcgagccctctctgactcagtctctttgcactgctatagtaagacacctgaaaccctaaactgaagaagatgaagagttctaaatgggcctcaatgatataaatgggccttaagtttagtacagacagtgaataatttattctttttagtcatggttaatacgttaatctgactcaccatgtggtatttacaaaattaatcagattgtaatatgtcactttatgtataatgtttttgtaggattgattcaaaattgaccttcgtgtgtcttgcaaatatattttttcttttgccggcaatgtgtcttgcaaattttccatatatatcgaatttggtaatttgaggtcaaatgttatcttcccctaaagaaaagttaggtaattaacaggataaatttattttagtcagctggtcccataagtaaaacgcattaagcggtttttcgttaaaagcttaatctgatttgactctttgatctctccctcttactaatttttttttttggtcagatataaaactctcttatctcgtgatcctcgtcgtctatatattgaaacaaatccagttttctttcttgaaacgtataacaaaaatagaacatcatg

SEQ ID NO: 31530 - DNA, 3000 bp, Unknown; identical to SEQ ID NO: 9709
  misc_feature (1)..( 3000): 2750-1469P.txt file - cDNA_ID_3043148; gDNA_ID_1972173; Annot_ID_179909

SEQ ID NO: 31531 - DNA, 3003 bp, Unknown
  misc_feature (1)..( 3003): 2750-1469P.txt file - cDNA_ID_3043173; gDNA_ID_1972174; Annot_ID_179956
ttagctagatgtatgtagtgaacaccatttttgttctatactagacaacagaaacaaaataattaagaaaaataactggtagttctgtttcccttttattgctctaacgtgacggctacgcgaggaatattcttgtaattttatgcacttacagatggagcaagcgcagtagctggagaagcaccaccagtggttggcctaataaaatgataaaattatagttaactgatggagtgtctttcataattagttcttaaatgaattgagtattgatgatgaaaacttacaatccagctaaaactttgacagcatcatagataacccactgcgctccagtgagtgttcctatcatgaaaatgcgaagaggaaggccacgggttaacataccccataaccctagcctctttactgcctgtagcacatgaaagaatcaaaccaagtcagtagatcatataaaaagctctgtgttgtgtatccacaagtttgatgttgtggtgaagagtatggagcttttttacttacatcagcaacggttgctcctttagagttattgaggaaagacaccaaattatctgcaggatgtgagatgatggcgcagaatattccagcaatgtatccacctgcaaagctaactccgagctgaactggctttgagcactcttcttttggggtaggcatcactttcttgtatatgagctccacagtgttttcaaaagtagcaaatttcatcatcgtatctgcaaagaagtcgaattttcttttagtaactgaaatcatcatctcaatgactctactacattttcttgtgtatagagacttacatggaatctggcgtccccagagaggaacaagtcctttgtgtaacccgcggaagccttcggatttgatgatctttggtaaaccatcagataaaccgcgggcgaaaccaggctgagtctggaccctgactttgacagcttccattggacaaagagccacatcagcgacgatttctgcagaggctgagccagcgaggtaaatcaaggtcttgtatttagctgcgtattctggtccaacaatgtctgagtagtatttcttggcgtactcatagagaccgtatttaaaagctccttgggcactgtaaccaagaagcgttggtgaccagcctctggtgaaacccttaagcccttgctctttgattgttgtcttgaaagctgaagttatgttcttgtacttcagtggatcaatctgaaataacaacagaattaagggtcttttttggaaattcgtggaatattctctctgagtgaacatcaaaatcatgcatgagattgaaaagtcttcgacggcgttgaagagtcgatgccgtgtaaaacaagaaaacgtaaaagttgacaaaaacaaaaattgttattcgctgtttttttttccgctaataatttctatattcaagtttttctcactaaatattttacttatcacacacgtattaaaaatgttaactacaaatagagaagttggcttggaactttcacctgcatgttgcatttgatgacatcaagtggcgtaatcgccgtgtgggtgataccgcagctcagcatcccggcgaccgtacacgccgcgaaatacgccggcgagtacatttccactttttcattcggcgtcgcgatggcgaaactggtaccgttggatgagactgaagaattagtcggagaaatcaacggctgtgatttaaggtgagtactcatggtcgtcgcctgaaaaagacgatgatcggacgagtagagaaagctcgggatcagcgatctgcttgagtcagacatttcgagagaggagatgagaaattcaaattcttctgttggtttttcgacttttctcttcgagagaaaaaaatgtcaggttgagttttgctggaatctaatttgacgtttttataggtgctgagtttttggttatgaaatgtcatttttaccccctcactatttgcatattttaccattgactgacgacggcgatagaaacagtcaaatactgatttgtcacgactctttacttgtcaacagaccgaataaatcactgaaaagaaacatatatttctaataatactaacactgtatatagtaaagatatactgatctttgattgttggttagaataatcaaaattagtaaaccgtttctaccatgcgtaaatggtatttgtatgtaacaagttatctctccatacgtgaacttgtttaccattacccaaatttcgaaccttgagtgagcactttgttaattacctttgagaaaacttagccaagcatggctagaacttcatttgttgccactgccagctccaagaagattagacttggagtaacagtttcctttgtggattcttgtcaagaggtttgaggattttgaatcccataattagttctccaacattgttgggctagttatatatattatagtctttgataccaaaccatgtgcttttgaataattgaatttgtaaaattttcttccaaaataaaactaaacttggtcgaaaaaataacctggacaaaccacgaatcaggggggattttaatttactcatgtgatttgattaatatgtgtatataaattttctcttagaagagaaacaaatctctttataaactgtattaaaatatcacagataatatgattcagaacagatacaacataaacagttgtatatttttgtttttaaatggtacgcagattaagtgaaaatgattaaagattttgttaactataatcttatcattaatcacttacctttgaaagctcgcatgtgtttctcttctccgtgttaaacgctgtcgtttttggcgtcactgttatttcaacacttttctccaatctcaccgaacgtttattttcccttccgttttctcgagaaaatctacctttttccccgagaaatttcattttctctggttcacctgcttgttgctcgcttaaatacagcgatttcatccaaccaacaagtaccttcaccaacacactgatg

SEQ ID NO: 31532 - DNA, 3000 bp, Unknown; identical to SEQ ID NO: 9715
  misc_feature (1)..( 3000): 2750-1469P.txt file - cDNA_ID_3043177; gDNA_ID_1972174; Annot_ID_179955

SEQ ID NO: 31533 - DNA, 3003 bp, Unknown
  misc_feature (1)..( 3003): 2750-1469P.txt file - cDNA_ID_3043193; gDNA_ID_1972174; Annot_ID_179948
ttgataattgctatacataattgatcatgtaatgcatattgtgtttaatctttctaaagtacaaatgtaagtcgatactaacctttctttttcgacttgaagaactgcaagattgatgagaactttgaccaacatttacttcatcgtcttgcatatcaagatccacaacgattattttcttcggtttctctttgttttcttccaatgattttctcatcgaatgttgaacctcggaagaaaccttttggcatgcacttctattattcaatccagccaagtgatgtttcattctatttatttcacttccaacgtattgtttaccacaaaagccacaagttataacttttctccgtcttgaatcaatagcttctctaacatagttccaagccaaatcttgtttgtgatgactggaacggttcgacgatttctcttgctttatattgcttgtatttggtgaaaaagccttctccattgatgagtaaactacaaaaaaagaagaagtaaaaacctctacacaattaacatatgtatactctttaccaataaaaaatgtatataactcttacaaggattaaattaaacgaacaaaacaaaagtattcgaatcactcaaagttatattttcatttgtatatattagctagcgataagaagactaggccaaacgaataaacacataaggattggaagaaactcgacataatctaattatactaaatcaacagtcaattttataaaaactgcaagcttctctttctgccacgtatgcttaagtctaaaattttgctctttcaaaatcgtaaaccaattcacttctttttactattcaataaaattcttgtttgacaaaaaatgaaaataatttttttttaccactttttcagcaactgcttcttccacgttcttaagattcttcagtttctctcccatctttcaaaaaccctctgccagttaatttacgatctcaatggcaaccgtataagccattctcagaaagataaaaacaggttcaaattcttcttcttctctcctttctcataaccttaaatcctccattctttcatctaaatacgtctaacagagaaacgaaagtatgacgtaaataatgaaagttgagacttttgtgatgcctaatgtgatggacgctgttaactcctcacgacacactgagtttggtccacctaatcgctggtatgaatatcactaaacctttggccattttgttgcgttttacttggtcttatcttcttacattttccatgcacaccagctgctcgacaaaatgaccacataagtttacgagaatcgtatagaaacaaaatggatgcaaatgttttggggctttcaattcaaaagaagaagaagataaccaatttgagagatgggtggcatgacatggcatcttcttctacggtttagtgtgtaaaataatttaaatgtgaaagcatcttatatatttcgagttaaaaaaagcgttttgattagaaggtaattcatttctccattattattattgttaagcttttggagaagaaaaaacggttctatatattttttcttttcttcatctattccttctctttttctctatgtctatgagagaagtttatgtatttatgtaagatcatttgatgtttccaataaaagttttctccaattttgacacatatagatattacaatttgagtaaagttgaagaggatttctattgagagttatagagcaatgatacacattgtattttgtgaggttgtgatattcatcatttgtgtatagttgcagatttcaaagaaacaaaatgtattattggtattgttgttttcccgtgcaaggcacggcacgggctgcctactagttaagatatgaatttggaagatgtcaatgagagttattttccatttccaaaaagaaaagaaagaaaagcatatgaaactgacggataacgaatggtgataactatttaaaattatggcatacccataaactcgtgacgaagaagatgacaacatagaattggtgaagacaaagacatgcttaataatattataaaacgaaaagtgagtttggtcgttgtcttacgggttttgaaatcgaagaacacaagttgactgattgactctacgttgaagtgaaaattatattgctatatcacatctcctatactcgctacattttatttttctctccctacttctctcaattgcaaaggatacaaggaaacagtgtgtaactaaattgaaatacaaagagcccatacctctagttattgttacgaatccctatttcactggttaacagtttgaatctgctttgaatctaaagctgtgaatggtaaacaaaaccgcactcaaaaccgcaccgcaacagtgctgtaacagtatcaaaatctctacatatacatatgtatctatgtattttcgttactatttgaatcgcaccgcacttctcgcgtaccgcaaaacgcagttattattcggagctaagagtcactcaaacccaaaaattgtggagaaacaatgtcatgaaaaaaaaaccaaatgcgttaaagaaccctaatcaattgtttttctattcatttttaaataaggaaaagatgacagcacagtaattaataaaatcttccatatctctattttaagctatatataaatattcatttttgatattgtatagtatatagtattaattagatctttactcttcatagtcatcgatcaatacacataacattccctaataagttaaattagtggctacgtttgacgaaaagccctcgtttaaaaaaaaaaaaagagaagaaggaaatcaggaatgatctgattcttcgacgaaaggggaagaggttgttgaattcaaaatctctctctcttctctgtctctctcgcgtgagctagttgcagatttttccagatctcaacattgaaattcaaactcaaagctagagagggagagagatagatagatagagggagaagaagaagacgaacacggagctgaaacaatg

SEQ ID NO: 31534 - DNA, 3003 bp, Unknown; identical to SEQ ID NO: 27953
  misc_feature (1)..( 3003): 2750-1469P.txt file - cDNA_ID_3043224; gDNA_ID_1971867; Annot_ID_176484

SEQ ID NO: 31535 - DNA, 3003 bp, Unknown; identical to SEQ ID NO: 27953
  misc_feature (1)..( 3003): 2750-1469P.txt file - cDNA_ID_3043224; gDNA_ID_2926155; Annot_ID_198337

SEQ ID NO: 31536 - DNA, 3003 bp, Unknown
  misc_feature (1)..( 3003): 2750-1469P.txt file - cDNA_ID_3043234; gDNA_ID_1971868; Annot_ID_58448
atgaacggctgcttccgtgaagtgacgcgtgtttatccattaacggataatttgatcttaaatcacaaatcttacgtggctgatcttattattcaaacgcatgggcttgggccttgaggtaaacaggtttatatgggccaataacaataaatttgattaaaaataaaaggcctcttagctttaggttcaaacttcaatggagaagcagtggctgttgtccctcgcagttgatcttcttctcaatccaaaatccagctgataaataaataatttttctcttgtcgtcatattaaaaaaaagaaagattatctgtatttcaagtttcatgagcgtttgccaccacaacattgtcttttcgggttaatttcttcttcttcttccttttcttactaaattctcttaggtagttgtcgattcgatttctttgtcttcctcttcgcttattttcgttgaatctcttgtttacaccttttcctgaaaacaaaattgtgttttttgtagggttttagtcatacttaatggcttccaattcggagaaaaatcctcttctttcaggtgattattttcttctcagtatacaatctgatctgcgataatgaatcgtttctagtcagatttggttattggttcattgtaatttgtttactgtagatgagaaacccaaatcgacggaggagaataagagttctaagccggaatcagcttctgggagttcaacttcatcagctatgcctggcttgaatttcaatgcttttgatttctctaatatggctagtattctcaacgtaagttacctttgctgttagcacaattgaaaagttatcttctttgagtttttttttaattgataatggttttttttgtaggatcctagcatcagagaaatggctgagcaaatagctaaagatcctgcgtttaaccaattggctgagcagcttcagagatctattcctaacgctggccaggaaggtggtttccctaactttgatcctcaacagtatgtcaatacaatgcaacaggttatgcataaccctgagtttaagacaatggccgagaaacttggtaccgccttagttcaggttaggaattgatgactttttccatctaatcgaggtgtggctttgaatgaagctctgtgtcttatctgattttatttattttttttgcctacaggatccacaaatgtctccttttttggatgctttctcgaatcctgaaacagcagaacactttactgagcgtatggcgcggatgaaagaagatccagagttgaaacctatactagatgagattgatgctggtggtccttctgccatgatgaagtgagtgatacaaacttctttcaatgttttttagagaaactgtagagtttgtttctgtttatgaaggaagaattatttattctgttttaggtactggaatgatccagaagtgctgaaaaagctgggtgaagcaatgggtatgcctgttgctggcttaccagaccagactgtttcagctgaacctgaggtagcagaagaaggtgaagaagaagagtctattgttcaccaaactgccagtcttggtgatgttgaggttagactgcttcctacgttaatatgcttgaccatgtgagatttatcttgcgtgttgcttgaggaattagatgttccaagttttgttttgttgaactcgttattggatttttattcgttgattcattagggtttgaaagctgccttggcatctggtggtaacaaagatgaagaagattctgaaggaaggacagcattgcattttgcttgtggatacggcgaggtatgcaattctcttatcaattcacggcaattaaatattcggatttagatggttctctttttttcagtagctgtgaagttaagaatctttataatcattcaattggtagaaaagtaaccagtctacttacgtctacgagtttcatgacacaattacttatagcaagttcaaatatttggtgaaagagcaatgagatggaactggcgattacttgcatactaaagattttgcttatgaatatggattgaactgagtttaaccctgttgagccctatcaacagttgaaatgtgctcaagttcttatcgatgctggagcaagtgttaatgcggttgacaaaaacaagaacacacctctgcattatgctgctggttacgggaggaaagagtgtgtaagccttctcctggagaatggtgctgcagtgtaagtctcacaacacagtacttataatgaaacaactccattaaacactgtttcaggactttaattatatgtgctttggttgatgtgtgtggttgcagcactctgcaaaacctagacgagaagacgccaattgatgtagcgaagctcaacagccagctggaggtggtgaagctgcttgagaaggatgctttcctttgagctctgctggttaaaggaaagctctaagctcatattgtctttgaggcatttgtcttgtgtgtgtcctgaaccagtttcacaggctttttgtgtacactttttattagttcctctcttcttctaaatttgtctcttatgttgttttaaaagtcaataaagaaagaaatagcaatcaatgatttaatttatgattatattctttatttcgtcgacctctacagaatgattcaatttggaagaatcattctggtttggaggatatgtaagaaaaactacttgatctccaagttattccattcttctgttactgtattgcccaaattcccaagcttgacaatatttacgcaaagctcaaaacccaaaatatttgagaatcaaaacaaaatcaagggtcttgtctttttttttttttttggtgtgaatcaaaggtcttgtctttgcaagtaaattcgttcctaatgaactgtgtgagtcgtttaaagtgtttgataagcaaagcacgaagctttgcacggcttggtggtgaatccactctctctcaaccgccgtctctcgcctccgccgcgttttcttcatccgccgtcatg

SEQ ID NO: 31537 - DNA, 3003 bp, Unknown; identical to SEQ ID NO: 31536
  misc_feature (1)..( 3003): 2750-1469P.txt file - cDNA_ID_3043234; gDNA_ID_2926209; Annot_ID_141894

SEQ ID NO: 31538 - DNA, 1335 bp, Unknown; identical to SEQ ID NO: 4150
  misc_feature (1)..( 1335): 2750-1469P.txt file - cDNA_ID_3043238; gDNA_ID_1620687; Annot_ID_48467

SEQ ID NO: 31539 - DNA, 3003 bp, Unknown
  misc_feature (1)..( 3003): 2750-1469P.txt file - cDNA_ID_3043238; gDNA_ID_1971868; Annot_ID_176530
ggagaagaagaatctgatccaagttataatagagacacacacatacacatctatacttatataagacatgtccaaattgcagattaaaattaattaaatattaataagtagtgttcatttaattccatgtcatatcggcaaaaaaaggttttggatgaatagaagaaaaacttagttttacaacttttccgaagataaataatgagattgcagtatccataaagacaaacatatttgaatctttatttaaaagtaaaaaaaaattgatcactttttatttttttttgggtaattcaagtttgatgttctacaaacaacatctttatttttaggtaacccaaagtttactcgagtggtccaaatttaaatgttcaacccaagattttaaatttttaatgcatgctttgaactttggaagtttataaagttctgatttacaaattgataaatcatataagtatgtgtagttaaactaatagaatcatcaactgaatttttttaattatgccgttacaaaaatttacagaattaggtacttttgtatgcaaaactatatatatcatcattccattttgttatttttgacaaaactaatactttaatataaaaaataaacatttcctcgtgtgattcaaagactatagattgaaatactttatcatatacaaaaattattatgatttctgatttaagacagaatttatgtctcaacgaataagttatcttgtttaagaaaaatctaaagtactaatacaatctgttacgactaaattatttcttagccgcatgggagatcttgggcaacatgcctcaacatagatacgggttttaatttaaataatgttctcctccaaaatacatttagataagagatttggaaatatcgtaatcgaatacaataaagaattaaattgccgtatattattagaaaaccagacatggaaaaagatgggtaggtgtgggcgctctttttaggttctgtttgacgaactcattatcaaaaggtgtaagtgtaaattactttcttacctaaacctacttctattagactcttttattctgcattcttcaaattttttgggcatcttgaaagattcctttaaaacaaaaaaaagggtaaaagattgagatcagaagatggttttgttgacaggtggtgctgaagtttggattcaatgaatttcgaagttcttgcgatattgtcaagttttcctcttggaataccatatttgttttaatagatatactgtagttgttagtttagatatattatttttcataaccgagtttgtttacatttgtatatgttaggatagaatgatgtagccatgtaggtgggatcttgataagtgataactatcaatttacagaatctttgaaatgaatctacgtgtcctcaaaggtagcataatatatttacattatagtattaacagcaggtaccaccgtccacgtgtgcataaagttttggtgtttctagactctcttgtcatactactaactgaaatattgtaatatggttttcacactaaaaaatcgaatcaacccaatatattatcaaatcaaaccaacgacgataaattttacctaaaactttttttttaaaacgattttcagccgaaatatcacaagattatcggtcttgggctagactctagagagggatagatagatggaacttagaaaataataaatggaaaaagatattaaaagaataataactttgaagttcaaagtacaatcggaatggaatatcagtcttttgcgtgaatgcgtgtgatgtgagtcttgacgtcgtatatggaaccaaaaaggtgaaaaagcaaaccgagttattaaaccactaattaaaactataagacattcttagcacatcggattaaatagaagaaaatcaacaataattgagaacggaagcattaattatgacatgtaataaacgggaaaaacaacgacaattatggactttggaagcatcgattgtactggggtttggagcatcaataatccatattttggatacaacaacaattttgtttgttttttactcaaataaagatgctatatttgttatgttcaaaatctctatacatctttcggtctacggccaaataggcaaatacttgcaccaattacaagcaagtaagtttatatcttgacatataatcaatatatgatatagtccatgcgattccagctaaccacatataactaattcatactttagtggagctagccagatataactttattcatatagtagtgtggttatgaatccaatatataattgatagagaaatggtagtttcgaagtaacgaaggttgacaatttcaaaaagcccatacaatcagtttgagagacttaaaagagttgaataatgtacagcaacaacgagtcaaagtcatgcttgtgtgttacgtgttctatatgtgtccatgattataacgcaatagcaatatcatgtcggtgcgctaacttgttttgactttttggggtcattaaactaaaacatcagtttcaatatacatatacatgacgtcataaacgttccattcaatcgctatgccattttaatataatagaattttgcaacttttttttttcctcaaggtagaattttataactatagattaaaattggataattaaagttctttgttcgtttatttgattagtttttctgtagtatagggtcaaacaaggcaatgttaaaagtcaaccatcttctttatttatatttgttcctagttaattacacttaacactgtttgttaattcattgaaattgttttgtcatgtactaactattgattattcagtcaccgtcccatgacatgataatcccaccaaggtaccaacacgtccaaaacaacgaaataggaaattattatttagaatctaatgggctaaaaataaggcccaaataaaaagcaaaggcccaatatatactgtcacaaaaaccctcaaagaacagtgaagctctcatcacgatcgcaacaatg

SEQ ID NO: 31540 - DNA, 1335 bp, Unknown; identical to SEQ ID NO: 4150
  misc_feature (1)..( 1335): 2750-1469P.txt file - cDNA_ID_3043238; gDNA_ID_1620687; Annot_ID_164639

SEQ ID NO: 31541 - DNA, 3003 bp, Unknown
  misc_feature (1)..( 3003): 2750-1469P.txt file - cDNA_ID_3043238; gDNA_ID_2926209; Annot_ID_141898
caaatcaaaccaacgacgataaattttacctaaaactttttttttaaaacgattttcagccgaaatatcacaagattatcggtcttgggctagactctagagagggatagatagatggaacttagaaaataataaatggaaaaagatattaaaagaataataactttgaagttcaaagtacaatcggaatggaatatcagtcttttgcgtgaatgcgtgtgatgtgagtcttgacgtcgtatatggaaccaaaaaggtgaaaaagcaaaccgagttattaaaccactaattaaaactataagacattcttagcacatcggattaaatagaagaaaatcaacaataattgagaacggaagcattaattatgacatgtaataaacgggaaaaacaacgacaattatggactttggaagcatcgattgtactggggtttggagcatcaataatccatattttggatacaacaacaattttgtttgttttttactcaaataaagatgctatatttgttatgttcaaaatctctatacatctttcggtctacggccaaataggcaaatacttgcaccaattacaagcaagtaagtttatatcttgacatataatcaatatatgatatagtccatgcgattccagctaaccacatataactaattcatactttagtggagctagccagatataactttattcatatagtagtgtggttatgaatccaatatataattgatagagaaatggtagtttcgaagtaacgaaggttgacaatttcaaaaagcccatacaatcagtttgagagacttaaaagagttgaataatgtacagcaacaacgagtcaaagtcatgcttgtgtgttacgtgttctatatgtgtccatgattataacgcaatagcaatatcatgtcggtgcgctaacttgttttgactttttggggtcattaaactaaaacatcagtttcaatatacatatacatgacgtcataaacgttccattcaatcgctatgccattttaatataatagaattttgcaacttttttttttcctcaaggtagaattttataactatagattaaaattggataattaaagttctttgttcgtttatttgattagtttttctgtagtatagggtcaaacaaggcaatgttaaaagtcaaccatcttctttatttatatttgttcctagttaattacacttaacactgtttgttaattcattgaaattgttttgtcatgtactaactattgattattcagtcaccgtcccatgacatgataatcccaccaaggtaccaacacgtccaaaacaacgaaataggaaattattatttagaatctaatgggctaaaaataaggcccaaataaaaagcaaaggcccaatatatactgtcacaaaaaccctcaaagaacagtgaagctctcatcacgatcgcaacaatggcggctgctgcgaaggagatcctacggcgaccagtggcggcaacaataaggctaaccgttccggcgggaggagcgaggccagccccaccggtaggtccggcgctaggtcagtacaggcttaacctgatggctttctgcaaagacttcaacgctaggactcaaaagtacaaaccagacactccgatggccgtgacgataacggcgttcaaggacaactctttcgaattcaccgtcaagtctccgacggtgtcgtggtacatcaagaaagcagctggagtcgataaaggaagcacacgcccgggtcatttgtcggtgacgacgctatcggtgagacacgtgtacgagatcgcgaaggtgaagcagacggatccgttttgtcagtatatgccgttggaatcgatttgcaaatccatcattggtactgctaattctatgggtatcaagatcgttcaggatttggagtgattttagggtttctgatgaaagagtggaatcaatttgcttctggtaaacgtctttgctttgagtagtaaagtataaaccatgaatgaatttcacagattgttttgtgttttggtgttacttccattgtgttgtttgtttcaatggataattgagctccaaaagctttccaaaatcaaaatagatattgagtttgtttaactttgatcgtttgaataatttggacagtaaagacattgcattgttgttgttgtggatgtagaaattgttcgtatgagcaaagtattctaaagtttggtcctttaacttgataatatcagattccatggaagaagttttcctctgtaaattcgattttttcagagaattgtgtgttcatagctcagtgatttgaaggaacaatgggggtggtctgaaatggcaagacataagtaggatcttaaggaaacaacaatctcaaattaacaaaactgaaagcttttgaattgagttgcttgaatcttcttctgcaatatgttttcaagtgtcacagctttgtttgtagttgtatgtttggagaaactagaacttttcttgtgtttcattggagattagtttggagtctgtaatcgagccccaagcttatgagttatgactatcaagctcgatgaaatgtccagctcgaactagttgcttttgtgaccggatctttaaaatttgccgtctgtctatggaagtttttgaaattttggtaccatatcgaatgtttttggtcaagcaagacattgacttggcccttgggaaacaataagacagagacacctgaccggagcaaagggcaaaatagagaaatagggaaaaaaagtttaaatcgggaaaatctgaagcaacgagattgattaaaaaaatcacagaaaagagcaaaaagtggagagggtcttacgtttcagggccacacgcaatctgagtgccattcctctctttgtctttctctctctctttctctgttctaagaaagggaagctctttgtctttgtttgggtccttgccaagatccaatttttacgatcaaaatcgacccggtggaattcagacacgtcttttagatagagatatg

SEQ ID NO: 31542 - DNA, 3003 bp, Unknown; identical to SEQ ID NO: 31541
  misc_feature (1)..( 3003): 2750-1469P.txt file - cDNA_ID_3043238; gDNA_ID_2926209; Annot_ID_202481

SEQ ID NO: 31543 - DNA, 3000 bp, Unknown
  misc_feature (1)..( 3000): 2750-1469P.txt file - cDNA_ID_3043242; gDNA_ID_1971868; Annot_ID_176522
tcttgattgattcgttaagaggactttgttatatgttgttacagggttcaatgcagctgtggctggatgcttctttgcagttgaatccgttttgtggccttcttcatcaactgattcatcaacttcacttccaaacacaacttctatggttattcttagtgctgttactgcttctgtggtttccgaaatcggtctcggctctgaacctgcgtttaaggttcctgactatgacttccgctctcctggaggtaatatgcattgccattcttatgctttttacgcaagggaaccagaaaccaaacttatgagagctggtcactgattttcagaacttccactctatcttttattgggcgctctgtgtggcttggtctcgttggcattatctcgatgtacatcatccatgacatctgctgttgacagtcttaacaaggatgctgggataccaaaggctgtatttcctgtaatgggtggattaagtgttggtatcatagctttggtataccctgaagtattatactggggttttcagaatgtggatattttgttggagaaacgtccatttgtgaagggtctttcagctgatcttttgcttcagctggtagcggtcaagatagctgcaaccgcatggtgtcgggcttctggacttgtcggtggatactatgctccttctctctttattggcggggcagcaggaatggcctatggaaagtttattggacttgctttggctcagaaccctgatttcaatctctctatcttggaagtggcatctccacaagcttatggtctggtactgttcttatgtggtcaatgtttcaaaattgtcttaatttcagactttcttgattggttacctatcaatactttgaacagaatattttttcgggttaactgagaatggatgctagtttttttgtagcttcattgccaatgatcctgtttgtctcattgtttaacaggttggaatggctgctacacttgcgggggtttgtcaagttcctcttacagcagtactactgctatttgaacttacacaggattatcgtatagtgttacctctactgggagctgtaggcatgtcttcatggattacatctggacaatcaaagagacaagaaactagagaaacaaaagaaactaggaaaagaaagagccaagaagctgtacagtctctgacgtcatctgatgatgaatcatcaacgaataacctttgtgaagttgaaagttctctttgccttgatgattctctcaaccaatctgaggagctgccgaagagtatttttgtttcagaagccatgcgaacaagatttgcgacagttatgatgagcacttctttggaagaggcattaactcgtatgctgatagagaaacaatcctgcgccttgattgttgatcctgacaatatctttctcggtatacttacactttcagacattcaggaattcagcaaagcaagaaaagaaggaaataatagacccaaggtacgaaattgaatagtctgaaataactatttctttgatcattaattgaagcatttctttggcttaggatatttttgttaatgacatctgttcgaggagtggaggaaaatgtaaagtgccatggactgttacacctgatatggatcttctcgctgcccaaacaatcatgaacaagcatgaactttctcatgttgcagtcgtttcaggcagcattgatgctcccagaatacaccctgttggggtcctggatagagaatgtatcactctaacacgcaggtaaacctgcatctatttcccctcggtttaactgtttgtcccaagatcaccttttcatatggattgtttttaatgaacctaactgactaacctagtcttccatatgacaagagtgtgtagagagtctgtgtaactataacttgggctgccaggtttcccacattggatgtagtagaagttaaattagttaaaaaaaattacttgcaactttttgtttgctcatcagaggaaaggagtgagtcgcaaagtccagtttgctagatttttaattttagagctttcatctgtattagagttgataccgaaaatattgacccagcaaataaggttcctcaattcatttgaaacttttcggtgtagatgctgcattggagatgatactggtttttcttaaccttttctcttgcttgacctggcagggctctagcaaccagaatgtacctcctaaattcgctgtatctgtaaatggtcttgctttgtaactcttctgagctgaccagggtgatttcaatttgtttcttctgtgaggctccgggccaatttttgttctttgtattaagagatttggggagaatgagttggctggtgcagcgtggatgttttttgtctactccatctgttggtttaaatggtgaagcccccatttctcacttaaggtgctgagcaatccaaagggaatcgaaacatggagcgtggttctgagaaaatcttcagaaattttcctgaaaccaaagatatgtgctcaggtgattcgttaccatttacacttttttcttacagattgttactgtaccttacttagtattgtctattttgtaaagtgctttctgacttatatcatattgagaaagttttgactacttaaagactaacagtgtcaacaattgtaagggtttccttgtccactattttgtatattgaagaacattgaaatatattggaatgcccttatttctggtgtgtgtgtctctctcggtgagccgcaagggcatgttgacatctaattgtatggatatttttctctaagaaaattcctagagaaaacagtagtcaggccattgtgttggttaaacaaccctcctaaaaccttttaggtaaagaagaagcaaccccgcatgggttgaatgacctacctaacctatacttacctccatcatgatatagctagtaccctctgaacatgcatggatacacatgctatataatcattcgggtgtgattccatttataccggaaaatg

SEQ ID NO: 31544 - DNA, 3000 bp, Unknown; identical to SEQ ID NO: 3654
  misc_feature (1)..( 3000): 2750-1469P.txt file - cDNA_ID_3043246; gDNA_ID_1620655; Annot_ID_47830

SEQ ID NO: 31545 - DNA, 3000 bp, Unknown; identical to SEQ ID NO: 3654
  misc_feature (1)..( 3000): 2750-1469P.txt file - cDNA_ID_3043246; gDNA_ID_1620655; Annot_ID_163616

SEQ ID NO: 31546 - DNA, 3003 bp, Unknown
  misc_feature (1)..( 3003): 2750-1469P.txt file - cDNA_ID_3043246; gDNA_ID_2926209; Annot_ID_141890
cccaaaccacagtttcttgtttttgttatcaatgtctagttatatgcaccctcttctagggcaagaactgcatctacagagacctgaagattccagaaccccacctgatcaaaataacatggaacttaacagatctgaagcagacgaagcaaaggccgagaccactcccaccggtggagccaccagctcagccacagcctctggctcttcctccggacgtcgtccacgtggtcgtcctgcaggttccaaaaacaaacccaaacctccgacgattataactagagatagtcctaacgtccttagatcacacgttcttgaagtcacctccggttcggacatatccgaggcagtctccacctacgccactcgtcgcggctgcggcgtttgcattataagcggcacgggtgcggtcactaacgtcacgatacggcaacctgcggctccggctggtggaggtgtgattaccctgcatggtcggtttgacattttgtctttgaccggtactgcgcttccaccgcctgcaccaccgggagcaggaggtttgacggtgtatctagccggaggtcaaggacaagttgtaggagggaatgtggctggttcgttaattgcttcgggaccggtagtgttgatggctgcttcttttgcaaacgcagtttatgataggttaccgattgaagaggaagaaaccccaccgccgagaaccaccggggtgcagcagcagcagccggaggcgtctcagtcgtcggaggttacggggagtggggcccaggcgtgtgagtcaaacctccaaggtggaaatggtggaggaggtgttgctttctacaatcttggaatgaatatgaacaattttcaattctccgggggagatatttacggtatgagcggcggtagcggaggaggtggtggcggtgcgactagacccgcgttttagagttttagcgttttggtgacaccttttgttgcgtttgcgtgtttgacctcaaactactaggctactagctatagcggttgcgaaatgcgaatattaggttttatttatttattttttgtttctcttaaaacttggtgtgtgaaaaaagaaaacgaacgcttaaatttcctttttctgtttgtttttatgaatagaattggtaagtttcataaaaaaaaaatagtattaatttgtgatttaatatctaaacttacagaaaaatgtcaaatcgaccatattaatcgtgaaaaatgttattattagggaaaaatgttatttaatacctaaacttacaaaaaatggccaaattaaccgtgaactcgtgaaatggccgttttatctctcaacaaaaagttgacttctattttaacttttaagtttgcgttgactcgggctaataaaccaccgttaaaaattcttctaacagcgtaattaacagccgttacagaacatccgttaaggtgatacgatgacgttttgtgctaaagagaaatcaaaatcgagaatagaaattcccaaaacaaaatcaattaccctaaacccaaatcgaaacctaatcctgcccccaaaatcaaaatcgaaaccctaattgcttcaattcgttttctgaaatgccattagttagaaagaatggcgtcgttatgaggattggatctccaatgcttcacgaatcagagaatttggtgggagatggagtcgaagcaccaccgcgaggagaaagagatgaaattggagaagaagttgggggtgaaacgaatgtggtatctgagtcttgtggcggagaagagggagcacaagatgcagctaaaacaacgccggaaggagaagcagatcgaatttgagagagaatgatttttaggatttgggttttgatttggagatttttcagaggtttcgtcgactttgaagtctgttgatagcacaaaacgtcatcgtatcaccttaacggatgttctgtaacggctgttaattacgctgttagaaggatttttaacggtggtttattaaaccgagtcaacgcaaacttaaaggttaaaatagaagtcaactttttgttgagagataaaacggccatttcacgaattcacggttaatttggccattttttgtaagttcaggtattaaataacatttcccccctaattattaggtgagtaatacggagaaaatggactttaattatattcgtaaattgatgttcacacattaaggctctaactaaatcttccgattattgtcatataaacatgttctaatttgtgataaaactgaacttccactgtctcgcagagaagggaaagaatattttgggagaacaactaaaaccctaatatctatgatgatgtcaacttcaaaacacattgaaacttgagaaaaacaaaaatcaaagaaaataaaaataaagcctgcatgcaagagaatatgccttccctccaaggttaaataaaaacaagcttatgtgagagattaagtatgttcataacttcacaattgtgtccattagtcgctgctcacgttagtcaggagttatttctgttgggtcttatcaaaactgttgtttatgtctattttgattatggacttacctttacatttgcattttatattttcattcttagttataaaaaaattgcttatacttttctgttgtttgacccagcaccaagtataagaacaattaaaaaatttgatacctaagaaactaattctataagattaattgaagaattattttcattcaaaatcttttgacataattgctacgtttaatgtgtaatgccctggtctattcgataagattaagaagataattgcaataatggaacaaaattagctgagaatgcaatccgtttgcatggatccgacccggaatgcaatccgtttttaattatgtaaatgacaattatacccctggcactcgacatgtttgacagtttgagcaaagagaatttttttcttgttgaggatcatcgattatcagtttctggatttcgctactacagatttgtcccgtcttgagttacgaaatcatg

SEQ ID NO: 31547 - DNA, 3003 bp, Unknown; identical to SEQ ID NO: 31546
  misc_feature (1)..( 3003): 2750-1469P.txt file - cDNA_ID_3043246; gDNA_ID_2926209; Annot_ID_202472

SEQ ID NO: 31548 - DNA, 3000 bp, Unknown; identical to SEQ ID NO: 8732
  misc_feature (1)..( 3000): 2750-1469P.txt file - cDNA_ID_3043263; gDNA_ID_1971869; Annot_ID_176557

SEQ ID NO: 31549 - DNA, 3000 bp, Unknown
  misc_feature (1)..( 3000): 2750-1469P.txt file - cDNA_ID_3043267; gDNA_ID_1971869; Annot_ID_176551
aaggcggtggggaagaagaaaaagattgataacgatgagggctattgacgttaaaacggggatgaagataccttgggacgtacgctattcattaagtctatttattttcttatcatcaattctttttctttccaacggccaagattatggaatgccgggcgaggatggaggaggaggagctgagccaccgccggagatggcacattgtaacggtattttcatgagctacaactttggtagccgtgaaagagagtacccgcacgtgaagaatgtaaccgcccaatcatgggcgtttaaatcgactgcgatgattgtaaacgcgggtagggaagagcttaagggatggcaaatgttcatagggttccgtcacaaagaactgatcgtttccgcgactggtgcgactcctatggacggagattatcctctagacgcgagcaatggaaccacgttcgttggatcgccaaacatggatttaaaaacctctattgaaacagccggtgatttcactcagatatctgcgaatatcgagatcacaggaactctttttggggtttcaaaagcggtcacgcccatgccaagaactattaagctcaccaacgatggttgggaatgtcccgccgctaaaagaaaaggttagatcaatactcaaatcgtttcaaacgcaactaatttatattttttatcatcaaaatattatttatagggaaattatgaacgcaatgcaaaacgtaaaaaaaaaattgcgtttgcatttgcagtttatgaatcaatttaggttaaatcattaaatatttacactccctaatataattgtcaaacaaaaataaaaaagatgtggtgaatgtgatattcaaaacggtgtgttttgttatcttgcgcaggaggtagtatgcacgtgtgttgcaagagaaaccctaagatcaagaacaagatcggactaaagacaaagtttgcaccgagaaggtacggtgacctgaacatagtctacgatgttctgcaatcattcgacagcaactacttagcccaagtgaccatcgacaatgataatcctctcgggcggttagaccgttggaacctgacttttgaatggatgcgaggagagtttataaacactatgcgaggagcttacactcataagaaagatccatcggaatgcctttatagcaaagctggacagtattacaaagacttagatttctcccaggtcatgaattgtcagagaaaaccagccatttccgatttgcctcctgagaagaaggaagataacatgacaggaaagttacctttctgttgcaaaaacggaactctcttgccacctattatggatccttcgaaatctagatctatgtttcaattgcaggtaaatcatctctttcgtttaaaatatgttatgagatcgtagaaatcttcgggttttgaagtttttgttttctctcaatttgttaggttttcaagttgcctcctgacctaaacagaacagctctatacccacctcagcattggaaaatcgacggtgttctcaatcctcagtacaaatgcgggccaccggttcgtgttgacccgtctcaattccctgatcctagcggtctactggctgtaacctacgccatctccagctggcaagtggtctgcaacataaccaagcctaaagcccaagcctcaagatgttgtgtctctttctctgcattttacaacaactctgcagttccttgcaacacttgtgcttgcggatgcaatgacatcgataccgacacttgcaatgctaacagtaacccgctcctcctccctcctgacgctctccttgttccgttcgataaccgaaccttaaaagctaaagcttgggctaaacaaaatcacatgccagtaccaaagaaacttccttgtccagataactgcggagtcagcattaactggcacgttagcacggattacaaaaatggttggaccgcaaggttaaccgtttttaattggagagatttcgcgtttgaggattggtttgtggcgattgatatgggaaaggcaggtccaggatatgaaaacgtttactcctttaatggaacacgtgttccaccaagcaatcgaaccgttatcttccaaggcttgcctggtatgaactatcttgtaggtcaagttaatggaacaaatccattaagagaccctcccgtgcccggaaagcaacaatctgtcatctccttcaccaagaaaaacatcaaaggactgaatattcccgaaggcgacggtttcccaacaaagcttttcttcaatggagaagaatgtgcgcttccaaaacatttccctaagaagagctcagggcatagacgcggtatcagtgtctcaatgtcctttgttttcgcaacaatcgcggcttttgcactaatgatggattaattactgaggagataactatacttaccattcttgatcagtttttttgatcttcaaattcttaagattggtgttttgatgatgttgctgaacagaggaaggatcaaaaggagcagattgttatatgattgatctaagttggaaaaatattgacaatgttgtattaatacttttgtttggtctataaaagtattaaagtgtatgttgttctctagtaatcccaaaatctcagattagtgttggccttttttttggcatgaagaagatcttagtactttgatttgatgtttttgtgaaatctctcttcgttcttgaagatctttatccgaaaagtaataataaaatataacacaaagattctgaagcaaagaacaaaagccattgacagaagaagcaagtcacatgagattccaaaactgaaacacttctggcatttatgctttgcttagaatttgaaaaaagacaataaaaagcttctctgcaacatttcctcaaaatcaaaaagcatcacctttatataaacccatttgcctttcatcatctcatatcaaaccctataccacactagattcaccttcacctttctaaaatctctgttatttagcttacgaaatg

SEQ ID NO: 31550 - DNA, 3003 bp, Unknown
  misc_feature (1)..( 3003): 2750-1469P.txt file - cDNA_ID_3043271; gDNA_ID_1971869; Annot_ID_176550
aatatgcacaagtaaaacccaaaacaaaaaaaaaaacacttctgagattaagaacatatccaagctaaagaaagaagcagaaatacctcatcatgccttgaggcaatagctctttcaggtgaacgcctactactcctgtgactcctatctgacggtgaagtagacctctcatgtcttcctctagagtatctctcatcatctgttcttgtccttctccttttttcagtatcctctctccctgatcgtcttctcttatccccaacttccctatctctttctccttctccttttctctccctatccctatctcttcctatatctctatccctttccctactgtttctcttctccctttctctaccatcatcttctctctctctacttctcccaatttccttctctcctcgagctcttctcagtctcttcgtacgtggtgaaggagacctagaactaggagccattattggagtcagggtcgttttctctcttctttgcctttggaaagatcacaaattgaaaccagggtcagaaggaaaaggcatgtgagctccagataacacagtaaaccctaattcccaaatgcatagaaactagaaatggagcaaaagccctaaaccaaaaaacgtaagctacagatttcaaatactaaattcagaagttccgggcatagtctagggttgcaagaatcgttaagagaaaaaatcgctgcataacgagaaagaaaaattttacctggtggccggaactgtgactacttcggcggagagaagaggagagagtgaataataataatcgcagagataaaaagaatcagagccaaaacgagaagaatcatttatttggcctcttttgcaaataaatggaaactgaggggttcaatatcaaacaaattgtagacggtatggtaaaacttccattagttgacacgtgtcatatcttgtttggtagaaaggatatgtataattagggcagaagccgcttgtaacgtcgtacccttgtacttccttcgagatttttgtttcttcgtcctagtttgcaacaaagattttataattgatcatcaaacaaatcggtgagcctgtaacaaatcgagtgcaccagctttaccaccaactttgataggatagaagacaaatacaagatcatagatatagttgaggtggatagctaaacgacataaaccatcagaagtgacagtgatcttgttctgattgtaacagagtgcaccaggtttaccaccaactttgatcctctcatgaaggaacttgtggagagaaattttcaacttcgaggaacatatgtcctgaaatcccatctgtagttctccttactaccgatttgtagtcgcaactgttggccttgaagcttatgtggaagacagcattcatagactcgagctttagagacgggtcagtatgagtttctcgggtgatgctttggtttgtcgggtgatggctcatcgaatcccaaatcatgtctccttgtttatttgatgtatctttagtttcatgtatatactagtgtacgccaatattatagacgattaaaaactaattcttgtttacgtatgaacaaaacgatatgtactttgtcattattatattttttgtcaaagattgagaatatttatttttttcgcatcatagacacacaaacaaatgttgtctaatgatctaccagccggcttgtatatctaattcaaatatcggtcatgcatcatgcacttcattagtatcttatgttttgcaaaatactggctagactgtcacatatatcagaatcggtcaccgtcaccttcttcgttattgtcatacggtttcactatgacaaagtccaaattaggtcaaattttaagcgaacatacgtagcctcttacgtcatagattgctgatgaaaaagaggcaaattattataacaaccatcaaagattcggtactaactttacaaattcacacaattcgtatctcacaatctaaaagtgcaatatgtcgtacatgttttgtaagctagacaatagtaaaataattatcctgccggactataaaggttcgagaacgtggaccgactatatttatatatcaattagctatttgtggtgttagcctaatgttgccttcatcacgttttctgtttttttgttgaaggattttcaaatagatgaattgactatcatcaccttgtcacgttataaaccatatatattatcgttaaacacttagtagcagttccccacgaattacatgtctccatcattgacaaatttatatttttgtttgtaagaacactttttccttcctcaacaaattcttgtacttaatacagatatatacttataaatgttacatcaaacgctagataacggagaatataagctaaaatgaaattaatatatcttgtttcagcttctatcgaaattattttcattaatggacaatataaaatttgatccttatctactgtttctgtgaatttgtgattatcatcaggcaaatgtatcattaggcaaatgtttttatctaaattaacacttttattggaaaactaccaaaatacatttaggttcacccatcaaaagtactttatgttgttatgttatatattgtgtgctaactaaaaagattacaatttagcaaatctcaagttgatgtgtacatttataatctccactacaacaagaaggtgatccacttctcttgtatatctttatttgttcttgcacgtacataaagaaatcaaactgttcaactgccatttagaatattaaaaccaacaaaataatattataacaagtaaatacttaaacaataataagaacaaagggccaaaatcgtgccaaacctacaacattcctgacctctgcctcccccactatatagaggtcacatttgagagaattaggcaaataaaaatctaagaaccattttaatagcttctcacatctctctattataatatcaaactactcttcaccagccctcttaattatctaagaaagtctcaatg

SEQ ID NO: 31551 - DNA, 3003 bp, Unknown
  misc_feature (1)..( 3003): 2750-1469P.txt file - cDNA_ID_3043275; gDNA_ID_1971869; Annot_ID_176547
cccaaatttaaccatccatttatcaggaaaaaaggaaacataaaataaacaatcaaacataagggaaagattctaagtggcaaactcatttttgtttgttccttctttcttttgaggccaaaagagaccagattcatttttggtttcttcaaaggccaaaccttattttcttattttctcagacaaacccttttgccatattacaaaataaaatttattcgtctgagaattatcttgatcccttttggattcgaggttcaagaacattcatgaacttcgagtaaatcaatcatcttcttgtagtaataatccaggaagatacattatcaacacacataaaacagaatgaaaatcaattgcttgttctgttgtatgtcccacagacgatttaacagacgatcatcatcgagacaaagcatcaaagactgcattgatgcaaagaacaatataactacatttgacaacatctcttttaaaacaggtcccattttctaacctttttcattatatgcattctcaaatcccttaaaagcttttctttctaaaagaagcgaggcgtatttgcacatacctgcagatagcagtaggcgaagatacatatccgaggagatagcaaaactcggtaaagggaacatcagtgctcatatttttacattcagagagctttgcgtcgctaccaagaacttcaaccccgataatcagctcggtgaaggcgggtttggaagggtttacaaagggcagatagaaaccccggaacaagtacttataacattctctctcatacaacatcgatccatcatattctgctcagtggtttgattctgattcttgcgtgtttaggttgttgcggttaagcagctagacaggaatggttaccaagggaacagagagtttcttgtggaagtcatgatgttgagtctcttacatcatcaaaaccttgtcaatttggtcggatattgcgcagacggtgatcaacggattcttgtctatgaatacatgcaaaatggctctttagaggatcatcttctaggtaacatatatctaaacaccatcacaacatactttcacttccacacattctaaagatttaccttttttatacttcagaattggcgcggaacaagaagaagccgttggattgggacacaagaatgaaagttgcggcaggagcagctagagggcttgagtatctacacgaaacagcagatcctcctgttatctacagagacttcaaggcctcaaatatattacttgacgaagaattcaacccaaagctttcggatttcggtttagctaaggttggtccgaccggtggagagactcatgtgtcaacgagagtgatgggaacatacggctattgtgcgcctgagtatgctctcacaggacagctcactgtgaaatccgatgtatacagcttcggagtcgtgttcttggagatgatcacaggaagacgagtcattgacacaacaaaaccaactgaagaacagaacttagtcacttgggtacgcaaaagttcttcaatctgaacaaaaccatttgattggttttcttaatttggttttgctaaaatgcgcaggcgagtccattgttcaaagataggagaaagttcacgttaatggcagatccattgcttgaaggaaagtatccaataaaaggattgtatcaagcgcttgcagtagcagcaatgtgtcttcaagaagaagcagcaacgagaccaatgatgagtgatgtagtcactgcgcttgagtacttagccgtgaccaaaaccgaagaagatggacaaactgtagaaggagaagaagaagaagaagaagacgaaagatccaaactttgagcaaatttttttgtttgttttcgtttgtaattttcaaatgatcggttttaggaaatttgataactttacgaattcaccaatgaaaaaagaagattaaatgagagttttcgtgttccccatcgaacattttaaaggatttgctgagaattttgtatctgggtttcaaaaagtttcagacttgactcatcgctgaacaaaaattacagaattaaaaatcccaactttatcggaaaaatgtcttttttttttggtttatgtatttttttttaaaagtgaaatgattaattaaagaagataaaaggggaaaagggtttaagggtttgtcatagagcaatggctaccagctcagctttgtgataaaacgacaaaattggacaacgataaaccctacttttatctctggaagactcaaaattccttcaagctggggagattagcttcacttactacggccatgggggtttctcttcgtcacttgtctccttcctctttctgggtttcgcgtcgtcctcgtgtttcttcttcaattctttcttttcttgtccctcgccgtcgaatcctttgcaccaggttcacagcttttctcatcttatctgttcccttttctcatttttgttcatcgagaattagatttactcattcattagtcaattgctctgttccgtaaagttggttgttagttttatatagtgatgatgattcacgttttgaggttgttgaagaagcaggttaaaaatgtgtgtttgctcaattgctctgtttcgtaagtttgttgttagttatatagtgatgattcgcgttttaagtttgttgaagaagcaggttaaaaatgtgttttgctgcaatttggtttcagtttctcacttagtctaaattgttcctgtgttaaagttatttaggagtctgcttttgattaagcagaagaatgtattttagttgaggtttggttattattctgagtttgaaggtgtttttctttgtgttgatatcattttttggtggttatgatttgcaggaaagtagcaatcataaagggaaatgcgggatattcgactgctactgattgtggtggttctcatgggtttcatcattcaggtcatcaaaggtcatcctctgttgagtttagtggagagtggaaacttaatttgggatctaagacggcgagaatg

SEQ ID NO: 31552 - DNA, 3003 bp, Unknown
  misc_feature (1)..( 3003): 2750-1469P.txt file - cDNA_ID_3043281; gDNA_ID_1971869; Annot_ID_176545
aaactatgaacaagaattctctgatgtgtccatgccaaacctctgcatcttagtgtctgagattcttgagctaattcaacatattatctacatgaaactaatcacacttacggtgcagttgttatatgatgaaagtagttgatacttatcatgaagggatcgtgtttttttcactttcaggtacaaagatccgtcaccagagtggtcagtcttcagggaagcaagctttggacatggggagcttcagatggtgaattcaacacatgcgctatggacctggcataggaacgatgatgacgaaccaacaaggtctgatgaagtttggttaaactctcttgtgaactccggatgcttgaagaaaaggcctcaagaactcaggaaaatgctcttggaaccttaattatatccataaagtgagaatttcagtaaaatagtccattaaatatagaaatctacaagcttgtaatgttgttagcaatgggactcttaatcacaccattgaagaagattttcaccaactctatagaaatcatagttccaactttaaaattttgtaaacttgcactttgctttgtgttgtttttcccactatttataatcttaaaaaaaaaaatctagaagctaaagtgacatacgttagattttgtcaatgtagatggttcaacgaatgtgacatacaaaacaatgttgaaaactatttccttttgaacattactcacattaggtacaacaactgtcactatcttaaaatgcaatactaaaaaacattcttcatcacattaatataaagttgagatacatataaaattacaaattaattacaattaggccacaaaaatgatggaccgtaagtggaggattagttgtctgaagaccgttgacgaaaaaaggcggaccttttccacgcgctcaccacacaacactttcataaaatcaattcatcgatccatcgtctctatcagatcaattcatcgattgcgatcgctctttcaattttcttcatcaccggtgaaaataatcgaaacccagcacgagaaaaatgcatgatttttgcttcactatcccgtacgggatgcttctcatcggcggaggatttatcgggtacatgaagaaaggaagtataacatctttcgccggaggtgcaggcactggattattactcattctcgctggttatatcagtctcaaagcttttgagaagaagaagaattccactattgctatggttcttcagacaggtttttttcttgcaaatttctttcctttttagcgatctgggtttatatgtctttaacagatatttatgtttaggaagatttattcgtatgattccgttagatgtccatagggaagactttcaattacaagatgtgaatagcttttagtgacttatcacttgagccaaggaattgtttcattttgttttcaatttgttatggttcaatgtgttggatcatgaacttagcttgagagttgatgataggttatgttataaggttaaggatcttattggaccactaacgatctggatctgaataagtgatttgtgtgatgatgctaaacttgctattcaaagataaaaaaaaattaatattttggttgtgtttggatcttcaattgcagcagtatttgaattggtttgctaattttttccactaatgtaatagtgtctctcttggacaagatgctgttttactgcagatgaacattcaatttgagttgttagatgttgtagttgagtagctgtttttaattagtgttcttgccattgattgacaatagaaccaacctcaaagatataacaagcttgcaaaatcgattttcattatctatggtgactgaaactcatctgaatgtttctttttttttcgatacagtcatcgcagctgctctcacactagtcatgggacagcgttacttgctgactggaaagattatgccggctggtttggttgctgggatcaggtaaaaatccttcaacactggctggctagtatctttgtttgcatcaagatttggtatttttaagtttttacaccattgacttaactctagaaccatatctgtattgcagtgctctcatgacctgtttttacgtatacaagatcgctactggtggcaataaatttccagcaaaagctgaatgatggttctgctacatgcagatgatactatccgttgttgaatttgtcgattagaattctttttggtgtacacaatgcggttgtcataacgccttaatagcttgtattagtcaaagaactgcatatggtcttgtgttttcttgtcatcgtgtttttgtaaccacaaactgttttgagctatactactatatatattgagatatatctgccgtttcgatacacacttgggatctggggatgagcacatcgtaaaacaaaatagaagttgatcctcaaaacttctttgtaaccttgtgtcatcacaacaaaaaatcttcaatgtgtttgttctctccttaaagtatatcttgattcatgcagtaacaaaggcaaaactcttttgcaagagtatagaaaccagactcaagctgtgcgatggtgattcttttggagaagttggatttgtgctctgatgtaaagggaaacttaagctaaaaggtccatcaatggaggtgacacatagttttagaaaatgtgcttttctcatgctagaaatgttatggagacccaaaaatgcttttcggaaaaaattctcatgctagtagctaggctctacttaacgaggtgacagctaaaataagttctttttattccattttcagaatagtgacattcttctcacaaatatagaaaaactacaattaatgctactgcagagtctgattacgttttaagctaatttttccatttttaggacgtggtagattgtgtagattattgctaaacagctcatgagttcaataattcacttattcttcactccatcttcagcaaaaaaaaaaaaagtaagaagaaacactgaaagctctccactaccatg

SEQ ID NO: 31553 - DNA, 3003 bp, Unknown
  misc_feature (1)..( 3003): 2750-1469P.txt file - cDNA_ID_3043333; gDNA_ID_1971871; Annot_ID_176600
agtaggggctaaaactcttaactaacattacaaatataattgggaaaacatataacctatttatttccttagtggattagtcctaaaagatcattaaacctaacccaagtcgttggtgctagttatagtttggtaactactttctgtattcaatctgaagagagtattaaaatgcactgtcgaaaccgaccagtctagtccaataagacttgaccaggagggttttcttccttgtcgggtctaactcatgtaacaaaacttttacaaattctgaacttaaaatgatccttcacatttaaaccaacaataactgaagttactcttaaacatttagcatgacccttcccctttgtgttggtaaaatcgctataaaaaatcttgtgatgtatagaccaaaactactagttagtgaaaaatgacaagaatagaattgcacttgtcatgtgcttaagaatttgccgtttccttaaagaaacttgcagacaaacaaatgacttagctgtaagaattaatctcatacgtacccttaagccccacaaaagggtaacacaaaagtcaatagaactgatcaataaagatgtataaatgcatgggtaaaatagtaaacttaccgactaatttctgtaaataacgcttacccgttaccaccaatcgtggtcctcttctgctcgtacacactctttttatataatctctttctttcacataaagagaaagcggaataaaaagtgttcaagagctcataacatcaagaaaaagtatatacattcttctgtatatctctgagaaatattatgattgttgtctgacattgaactttttaaaaagaaaaaaatcataaacttctctctgttttgccagaatcttatattataaagtatattctattcattacagatctgctcttggatttcggattctcctgcaaacgtaaagacgaaggtgttttatctcttcactgcaaaaaaaactcttgaattttatggttttctatagagctgaaatagtaaacgagtcttgacaaaaaaaaaagttcgttttcttttctaatgtttttgtggtagcggaattttagtctttagcctctatattaaataagttttaatctaggcgattttttttttttttttcagttcacattctcattgtttgtgctttgaatcggtgaaagatgattcaaatggatggtggagataggctgagagtgactttattagatcgtatgtcaacggttgagagtagccggagctgtttaactcttgaagctattctaatggctgataaaaacagaacctcgccgcagattctctcaccaccgccgtcgaggagccaatctaaccggtcacttgttgaagtcatgcaaagagagcaccgacacagtagagataaaaccgcttggaaaagtctccgtgaaaagctccgtcttaaacgtaacggttctgtttggatctcgtctaattctatcccgagtttggatacgcctattcctaaccgggataacgttagccaccaacttggtttcctcctttctaactctggaaatgtaacagaggaagcttcgtcggtggagggaaggattcggttaggagctgtgttggcagaggagagagcattatcggctagagaagaggaaacgccggcggagagggaagtggagccggcgaggatgtcattgatggagttgttggaagagaatgaagggcaaatgagttttgtaagtgtcgacggagaggcggaggaggaggtggcggcagtgacggcggcggagataagttgttgtgtgtgtatggttagaagcaaaggagctgcgtttattccgtgtggtcatacgttttgtaggttgtgttctagagagctttgggttcaaagaggaaactgtcctctctgtaataccacaattttagaagttcttgatcttttttagacttttcagtttaattatcttaatttatcataatcaggttgtttcctttgttgttgtaatgtgtcgttgaatatttgatgagtaatccttttgtagaaaattagtttccctcttagctccatggaatcctagtttgtttatgttatttggagtaaacacataaattagatcaatcaaactattatcattaatcagcaacacacaatgttcgaatggttgaaactgttgaggtgacaaatccgtttgtgaattgcaccgtttttatttaccattcataaattataatttatagcgataaggaccgaacaaaataattttttcatcgcggaccaagtataaactatttttacttaagattaaatttatcattgtccgtttcaaaattagagtgatctaatctgctaaatggtaatgatttaatccggttcgctcgcaacatgcattcaaaacttaagtggttagtacttgttgtatgatttgaatggaaaacttgaccaaacccatctatattgcgtataaaatatgtcaaatcaaattaaaatgaaaaaaaagttggcatagtaaaacaaaaggttgatggttgaaccataaattcttaatttaatttggcttgtcactgatgtgtttgatttgaacaagaacaataagtggtcgggctagaggtgaacaatcctccaactacacttatggttacggcaaacacctaactggtggaaagcgtcactggttaactaactcttacctatcttttcaatttgtactttgctttggttaatttagataaccaccggtgttaaaccaaaccgattagcatccggttggctagcccaaaactaggcccataacgagaagtcatgggcttgctttcattagtcaagttttcatttatcttcttaccatttattttccaagaaaataaaaaacagaaaaaattcgtggaaacgccattaacgagatctagcacaaactcgtagtgtggtgtagaagaagacaaaagcaaggagcttcataataaaaccctagagatatttgtttctccaatttcaaaagacgagacgtgaagaagacgatcgaagatg

SEQ ID NO: 31554 - DNA, 3000 bp, Unknown
  misc_feature (1)..( 3000): 2750-1469P.txt file - cDNA_ID_3043345; gDNA_ID_1971872; Annot_ID_176612
ggtagccaagtgattcaaacgtgtgcctcatccgaagaacaaagtgcagatcttcaggtatctgagtaagtttagagaacataaccgcaaagatcccaagtaagagaagacttacaatcttttaaccatgaaccaaaataaaaaagacttacaatcttgcaagaaccaagttgtaaaaggccatgtccggcttgaataacagctatggtctgtaggtacaataagaaaagattacaaaggtgacttgagaaacaagaaagtcaagaacattctcatatatgattagtgttctttattttacccgaatcccagattcgaactgatcattccactctgaaggaatctgcatttttttttagagatagatctcagccggcttacaaatttgcagattaaaatcttattatacgtaaatgcttcattatattataaacaaacttacagcatcgaatgagctttgccagtaactagaggcattagattcagattcagtttgttccttgaaaacccatttatggcatttgtcagaagcaaccttccccattaacctgttggccagaaatatattttgcaaacttaaaaagaggaagataaatagtttctattttgggctaatttgcagtgaatattgaataaggtcaggagctgcatatattcatgcagacatatatgataataaaaagtaattaaggacctaccaagtacccacccttcgccataattatataactgaatagacatcttgctgaaagatttacgaacaggatcttctccttccatgtctccatagcaaccttctgttcctcctcttcctctgcagtatccatcttcccacatcaacatcctgtagccccaaacatcaatatatcaatacgtagcgcatatttgtaaatctactcatcataaatcattcattttcattttcattaatttatttattaattaaaggaagcaatggttattagacaagatcatctaaaagagatgacttgatgtgtttttttccagcaaatcatgattcacaacttaaacgaatggtagatacagtctcatcgcatatatatagatgcatagagctacgtgatcatgatcatgtctaggatctccatgcaacattttttggatttttgttttgttttgttaattcaagcctagagtactaatactagtctgtctagttagtttctttccggggaaagtttccggtgactataatacgataaaccataagggaaaatgttgactttttaatcatgtttcataaagactaactatagtacgctaagtctcttgactatacgggtaacctaatttttttttgtaagaagtgtaacttacaagcttccattgtcgtcgccaactttgcagccgttgccaccgcctcgaactctcctgaagaacaaaaaagacatcgttttgaggagagatagatagatcatgtcaataaaaaaaaaagagaggagctgaggagagagatacgtacggacggggacggatggaccagaagacagagtaagtccagtcggtgttgagacaaacagttctcagggcgtcgtggagagccaccatccctaaagcttctttgctcctttgttgctgctgctgatggttttgatgatgatgttgttgatgatggtgatgatgttccgagcccaccatctatatgaatatgtcggtgtgtgttatatgggtttctcctctagttttggccttctaggttttctttgctgccttccttgctcaagcttctcatggactcttttatgttctaaatttcttttattttcaatgtttataatttttttttctaatttagactaattatatgattaccaaaccaacatttactgtttgtctacacaataatatgctattttagttcttattacttttttgataaaatcttacaatcttgtggcaaggatacgaatttcttggggtttggtatagttaacaataagtaatatataattaattatcagagaaccaattgaacacaaggttaaagttttttgcatgtaaaagttttttatctcttaggccaagaaagtcaaagatacttgaaaatcttcctgaaaaaatcattttagttcgctttatatttgtttgaatggaatccaattatcaaccattgattttctatacttcatattgcttttctgaaagagaaataatcatatggtttcgagtggataaactgttgttgttatgattaaagatacaattacaatgacataattagtcagtcgacatttttatccactaaaaaacacagtcttttagttttagtattatatataactctagtgatacaattaaaaccatgaaatgtgaaagtgttttttcttaagaagaaaaaggcttttatttagttgtcgtcaaacttgggattcggtttaggaccaagattcatattactacgggtgtgacacgcacgcaaattaagggggcacgacaaagagaatatataggaagaagagatttaggagtcacgtgtgcacgtgccgtgtgtaagactcgagtggctttgtcatcaaccatgacccagcgtctggttttgacctcgtggcgcgtataaactacgcatagaaacacagagacaaaccaggaagaagaaacaaaatcgtctgatgaatacaccaaagggtggcgagtgagaagtgtgagtgacgtaaacttaaaaaaataggacaggagtaacagagagttggtctggattgcatcagtctgaaaccctgacgagtcttagctccgcattgaccggctctgttctttacttacaatttttcttttgcgggacccaccgtttattaggaaaaagaaaaacaatttgtgggtaaagaaagtcgaatatgagatcatgttaattgctgcaaaggccgaaacaatggttggtttctagttctacttcctagtatatgggccgttaaatgagcttcaaagcttattgggcttttagtgcttttaacagttgggttgggttgttcttcgtaacaaatg

SEQ ID NO: 31555 - DNA, 3003 bp, Unknown
  misc_feature (1)..( 3003): 2750-1469P.txt file - cDNA_ID_3043367; gDNA_ID_1971873; Annot_ID_176650
aagcttccgaaacatttgaccaaacaagaatatataactccgtaatatatatttttatttatgtatacaactgccaaaaaataccaaacttccattttttaccaaaaaaatatcaatttttttattttataagtatctaactttctaacaaaacttataaaatactttacgtccataccacatattttgacgtacgcagtttgaactagctaggtgtgagcatcgatttttgggtatagtatgtttcagatttttggaaaaattaaagttccttaataaaaaggaagattgaaaaatgtgttagaatagtcgatgttaagcgagagagaaattgtaggttaaaacaaaagtgaaaagtctaactccacttattattaacattgtcattttcaaaataacaaaatatctctttgacaattttgtagaacaattggtatctattttagacaaagtttggtttggacaaaaaacgaaaatttggtattttgttttgtattttttcccatacatgtaaacaaacgtacgtatcttgatatttatccgaccactttcgctttcgatttagtgtttatttattttatttttatagaagaaaattattattgaaaaaaaaatagctcggttttggcaaatcttaacgttataacaggttttaggaatgtgatggtgatataatgtgcaacagatttgcagcgatgtgctgatgatacccgcttttcaagtgatttggtcgatttatagtttattattatactcatcaaggttaaaactagaccaatatcattaattggagaaagttaccataaacaagttcttgttaattatttccctagaggcttgattttcacaatttcacatcattattccatttgatgatgattatcagatcttaacttcttcttcttcttttaacagatatgtatattaatttgggttgatgaggtcgcataaatacagtagcaaacacattatctctataagtaaagaatgatcagaattaagtaaatttcttgtttttgacagttcctcttgggattttactaagaacattcgtatcgactttcttgtacagcttcttcatcttcctcatcaacttacccgccgctgtatccacgtcgtcctcgtacatctcatacataaccggtaaggtttgcatgcttacaaaccctgaacgacacgacgtccattaattccgttaattaataaaagggaattaaatctacatatatagttgagtatcatgacttaattcttcttacctatgaagagaagattcacaaagttgaaatatgtcccgatgatggatacgatataaagcgagatcgttgtctggaaatatagtaaccaatttaagcaaaataataatgaatccaaagttatatatatatatatatataagtggaaaattattattctatataatatcttacgagaaaaaagagaggaggatctcttccacaagcaacgtcaagaagctttgtgaggatttggttgaatctaacatggaagcttcttgctaattgtttgaaagaagattcgtctagtacaacttctggtattagtggtctttccctgcaattttgtttatttaattgtcgttttattggtaaggaaatcttgtaatttgtatatttttaaccaattgatcatgagaaattgaaaaaagattaatcaagtaaagatataaacataccaattgagaaaatcagaagcagtagaccaaatgaagaaaaaaagcatggaggtcatggaagcatgacaaattagggttatgaaattgtattccactacttccattaagaaccataagatgctcactcctatcaccaatgttgctgctattttcggctctctccataacagaatatccgcaactgttaatcacgaatgcaagttgttaaaatttagtgtttgtctacattataattttggtgataattttggataatagcaaaataaaatgtgatatttgaagagaattgatggatataaacatgtactttcacacacgcataccgattgaaccgatataaagtttgaaagagagtgagacaaatacctttaccacctccaaatatagagtgaatagatcgttgacgagtgaagagcttagttgttttatggatcgttctttcgtcttcagaatcggaggacgatcccgtaaatattggcatggttggatcaaatttattaagataaaagttactgcggtaagaaacaacaatgaaatgaatgtaatcactatgtaaaatagttgatttggattaggagaaaatgtgaaaagcaacaaatataagaagaaagaagaagagataggttctaggcttgggaacaaaggtaacaaaaacatattcaagaagcaaagaatgggaatggttttgaccttgttccttctcccatttatttcttcatcttcatgtctcaataaactattcaaacccctcacgtacgttgcatatattttaactgagtgttatcttcccggtataagtgaagacccgaagatctggtctaaaccgtagcaatttgaaccgaaccggtttataacaagacgccgatttaaccggagttgctggagttaagatgattccgttcggaattggccgtgggatttgcccgaggcttggaacgacaaattggtgttcgcggtggtgatgaagaatccgctgagatcaaaaaatgttttcgattttatcatcatcttcttcttcacaactcgtcaattcaactctcaatttccaaaattcgccgaaatctccgatcaccgttatgtcgaagacgtctaaattcaaaaccctgacggagaatttcaccgtgagagtgcttaaagcagagaatcgcgaactgaacgtggctctgctctcacctttcactatcgcttcttcacggcttgattctgtcagtaatgttgcgattcggattgagctcaacgatggatttgtgggttggggagaagctccgattttgccgtcggtaacggcggaggatcagataatggctatg

SEQ ID NO: 31556 - DNA, 539 bp, Unknown
  misc_feature (1)..( 539): 2750-1469P.txt file - cDNA_ID_3043375; gDNA_ID_1971873; Annot_ID_176643
caagtcaataagaaaaaacccaaaaatatagtaactgctaaaaaaaaaacttaattttgcgatacagaaatattttctcaccccaccccagattcaccccattaaccgtttcaaaaggaaattaaggagttgttcatagtttcgtttgtaaattgcaattgtaagtttgtaactgtaatagaattagattatttagggtttgcttgatcctcgatctgtgatcgattgatctcgcttcgcacccagcaggtatcatttttattccattatctctccggccgtgtagttaatttgttaatgcattttatgtttgcatggtgaatctaacgattttttggaattgttttatatcaatccgaaacaaaaatgattaatatttttcgagacaaatctttgcgttgatttatgatatacgaacaaaaagaagaaacaaaccctattacagattttatcggagaaagtttgcataacaaaccatatgtatacagatgttacaatgaaagtgatatttcaggtttatttaatgagcgtgaaagatg

SEQ ID NO: 31557 - DNA, 3003 bp, Unknown
  misc_feature (1)..( 3003): 2750-1469P.txt file - cDNA_ID_3043420; gDNA_ID_1971875; Annot_ID_176702
tcagccttcttagaaggtccaacatattttacacgatctcctgcaaaaagcgtaaacacaaatagaaatgaggaaaagtgaaaaaattgaccacacaaagagaacttagcagtctgacaagtagaagaggaaagagtgaaaggctaagatagaaagacaataccaggaaaattatgactagatagaatacaaaattactaaatcaaacttatttagcaaactgatacattcaagtgtacctagcacttgtaatgatgaagatgccttccagagccttgatattgatgattacctttctttgccggtcgcctggctttatcagaatgctcaacagctgctgcttcgcaagcttcaccatgtagttcttctgctactagctgccacaatttagaggaggtaagcaaatttcagcaatttctgaaactcaatttaattggaagttcaaaaaaggaacaatgcaaagagtcgcatgtagaaccaagaaacagcattcaaacggcaggaatggtgaaaccttctaattcatgcatagtaactctaataacaagttcatacaaataagataaatcaagaatcagaaaacttatatgacagggtcccaagatcacattgtccacggggtatcgcaaaaagaaaaagaaataccatggtattaccaactaaattaggaaaagaacaatcagtacagactaaaatttctgaatctcaattaatgcaatcataccttttcgaactcttcaagttttggcacaattttcttgatagcttcctcagaaacctcgagacaagcttcctcactgtcactcccatctgctttcgcttcagaatcctcttcgctctgagcactagaatcttcctcagcatcagactctgtcgtggattcatctgcttccgcttctgcgttctcaccatcagattcagattcttcattgtagtcatcagcaaaatcctgatccagaattaaaaaatattacataaacaccaaaaagaacgaaagaaaaatggtggcatgttataggcaaattactcataagaatctcacatatggggcaagaacgctgctgtcaagaaccaacaggggaacttgtacatctcgagcaagtgctcgtaccaacctctcccggtaaagctcagtacctgaataaaattcaaatttcttattggtcatctaacatttcctcaatatttttacttgataacagaagagcaacatcaaatcctggtctgccatttttattctatagtcaataacaaacctggaacactctggagcaatattcttccacttgaagaatctaaacgggcaccatatatggaagcggcattcttttgtcttatatgtgaggtaacacattccaccaaaatatctttcgtgtggtcgctgtgaaaagataatgagcagaatccataagcagaaatggagaaagaaacacaacaagcgagaaaaaaaaacatgttgtagattattactggatgtagtaagggaaggtctcccaagaaagctgtattttttcccaaggttggattctccgtaagaactcgtttttgaatctttctcgtctattaacgaaaggtgactccttctttttgcattcactagcaagcttctcattattgagccattctatttggtcttgttctccaagttgagcatgagaatccaaatgcccaacaccgttattacttttctccttcccggtttttccatcatctacaccattctctttgttcaaagagatatgtttatcctcactagcattccttccatcaccctcagaactaaaactacgcaactggctattcttcaaaatacttaaatgatttcccgaggcaatagtaccaccgcggggagaaaatgaaccaagtagagactttcttgtcaaattttcactattggttaatttatttgtgaatccacaatatctggaaaccgtatagtcacgaacgactggcctaactaagtacttggcttgctgcaataccaaaccccatctctggttcctctttaatgcccttgtatacatcacaaagtcccttctcttccaatataactacaaaaaaaaaaacagagatcattgatttagaatcactttcagggtccatttcttgtactatccaacctaaatgcattgcaacatgtaattgcaccattaaaaaaaaaaaaaaacgagatcaatatcaacgcaaaacatactatagtaactcggaaagaaacatagattctatacaatttatttcgactagaggaataacaacacacttcagggaattaattgattaagaacagacatcaattaaaatgaacgattatgacgcataacggaaaatccaatgtaacaacgaatatgaggcatcgatatagaaatgatgatatattcagcttttgtcatccataactattacaaaacacgaaccgtttaacagagatggacaacaaaactggttctattcatcccccaagctctaagaatcaggcttggtgcaaagaggagatgtaattaggaacgagatagggtgaagaagagagagaaaatcccgacagaggagagagagataaagaccgatctaaagtctgtaggttcttcttctgaagctgaagctgggttcgaagttcagcttcgttgatgcagtgttgtcgttttgacgcaaaattgctacttgccttcctatggatatgggcctaactataaaggcccactaaacatataagagtcggtattttcctgacaaaaaagccctaacaagttgtcggatttacaatcgtacccctatttttaagccgcgcttatctcgaacctatacctgtagagaggaaataagcatttgggggaaatcaatcgaaaaccctaggagagataaaaacaaaaatctagacggagatttatggcgacagcgaatcctggccgtggaggtggtagaagaggcggtggagctatggatgacgataagttggtcttcgagactaccgatggaattgagcccatcacgagcttcaatgatatg

SEQ ID NO: 31558 - DNA, 3000 bp, Unknown; identical to SEQ ID NO: 8752
  misc_feature (1)..( 3000): 2750-1469P.txt file - cDNA_ID_3043431; gDNA_ID_1971875; Annot_ID_176687

SEQ ID NO: 31559 - DNA, 3000 bp, Unknown
  misc_feature (1)..( 3000): 2750-1469P.txt file - cDNA_ID_3043439; gDNA_ID_1971876; Annot_ID_176729
atcctttcattaacaaaggaacagttttgttggttacttgtcgatttattggtgtctcattttgtttttaatctttgtcagaggatagctctttggcttttgagtactggttctgctccgattaaattgaatgatgctgctactcgggcaaaaatcgtcaaatgcaaagagtccttgtggaaattgttgtattatgctgcttgtgactttttcgttctacaagtcatttatcacgagccgtgggctagagatatcaaactctacttccacggttggcctaatcaagagttgaagtgagtattcacttttgctagctgccttgagtttcttggtttagaattatgcccgtagagttcattttcatggcatagtacccaggacatgtgatacattagaatgttgttttctttttttttgtaggctttcaataaagctttactatatgtgccagtgcggtttttatgtgtatggtgtggctgcgttgcttgcatgggagacaagaagaaaggattttgctgtcatgatgtctcaccatgtaattacaatcatcctgcttagctactcctacttaaccaggtaattacaccttgattcatcattttgcatcagaacatcctttgttgaaaagagttaatcaattagcacctagatttaatcagttcatatcttaagtagcacctagattttgaaaggatttgctaagtttaacaaatcaattcaatctaaaagagcttttactgtaaaaaagttctttgcatttgttttcttgttaaaaagattctgttgactgatgttttgttgtttagtgagctatagagcaacctagaaagattaaaagactactgggaattgttttgttttcttctgcagttttttccggattggagcaatcatcctagcccttcatgatgcaagtgatgtctttatggaaactgctaaaattttcaagtactctgaaaaagaatttggagcaagtgtatgttttgcattatttgctgtctcctggctattgctacggttgatatacttcccattttggatcatcagggccacgaggtagacatactatatttgaactctatttagttttaatgtcttttacttgatgtcaatgtttgatctgagattcacatttttgtttgttgaagcattgaactcctggattatttggatatgacatcagctgaaggcacattgatgtactattctttcaacactatgttactaatgctgcttgttttccacatatattggtggtatctcatttgtgccatgattgtaagactacttaaaaacagaggaaaagttggagaagacataagatccggtaagacttgtttatatctttcatatgagtccgggtcatctttctctattgctaaactggctagctttaaggggaaatgactttcttacttacttgcaaagccacaagctattatagtcttcttcattgttgtatgttgtgttgggtatgtaatgtgatctattgaagtttttgtgtaaccatagtttggttcttttgtgaatggcagattcagaggatgatgatgattagtcttgtaagatacggaacatgtttccacttctccaaccaaaccatttagctgctgaagaatttgttttcagcttcattaccttactgactagcgttggaggtaaacaaaaaaaagaagaaaaggttatagattttttttcagttttgtattggtctgagtccatttcgacattagactgcatattctctttgacatataagaaaaaaaaaacagaaactctgggtttcttgtgttgttcggtgatgtataaaacaatattggaagtctctctgtaaatgcaattcctcattgtatggttttcaacaccatagccttttgttatggagctcactcttgaaaattttatctgttcagtggttgcttatattcattagttttattttttgttttccaattaaatcagttttttgatagctgttcacaaaatgtatatgttttgagtaaaagccaaatgtcattcaacatagggctgggcacaagtcaaatacttgccaatttggaggtacttgtgactcgacttgccttgtccaagtaattggatttttggcttgttacttgccttgttaaaacgactacttggtctagcaagtacttgtctaaattttgattacttgcaagttacttgacccgccttgttacttgccaaaattaaatacttttacttagaacctaaaatatttggaataaaaaaccctatttcatacataatatttaaggtcaatgagttttgttacaataaattttaaatttttagcttttataggccaaaccaaaattttaaatctattataataatttaagcattagtatgttagtaacaagtatacaatgttcaacaattaacaaggtaagtaatagaaatttatttatatccagacctaattattagtgatcccacaagtcacatgtacaaataacgagtaacagagcaagtaaaaggacaaacatcaaaatgaggcaagtaacgaggcaagtaacgggacaagtatcaaaacgaggcaagtaacgaggcaagtatcaaaaaaaaattatgatacttgatacttggcttgcacttgcaagtaataaaataaaccgacttgttacttgacttgcctatgacgagtaacttgaattttcaaggtgagtacgagccgagtagcgagtacttgtgccccggcctaattcaacacattcacacggtaacaaaaagccaaacactacaagatcttgtaacagtaattgtgcatgaatcggctctcaacaattgactcatgacactcatccttcaacaagatcttgtagcagtaacagctctttgagactttgagtccttgttttggttttactaatatgactagacgaaaaagacaataattaagtctttcaattgattaccatttaaagtcaacgttatgagtcagtagctttccattgatgaatcaagttcagcttttcgatg

SEQ ID NO: 31560 - DNA, 3003 bp, Unknown
  misc_feature (1)..( 3003): 2750-1469P.txt file - cDNA_ID_3043463; gDNA_ID_1971876; Annot_ID_176728
aaaactttagtttctcttataactatagtgaacacttttggtcaggctatcagattcgcatgtctaggcttgctgttaaatgcagagaggaggggaaagacaagtttacagtgtgcggagactagggagctttgcaagtgactcaggaattgctccagtgaactgattgtcctctaaatgtctgcctcatcccacaaaacaaaacggtaagtccaataatctaaatctcttgcacaacacttagaagtttggttgcaaaaaggcatacagagtttccaatctcgtcattggactcaaatctgggatcggtcctgtgagcttgttcttccccaaccatctgcaaatccggaagttgcagctgagtcttatttaacaaaaagaaaaaatctcagacaaaattttaggatgtgaagtccttacagatctttaagggcagtcatcttgtttatgcttggtggtagagacccagatagtccaagatttgtcaaatttctagcaagagaaccaggttcttggagatttagacttagtaattgacgacagctgcataaaaagcttcactagagtattgagttttgacttacagagaaatcactctggcgattttgtctttggagcaagttaggccagtccacgagttagcacgagggaggcatgggtcgccggaccaatccactggaggcttcatgatgctctctaacagatcttccatagcaattgctgcagaagagaatgtttttgttccagtggcttcagttattacaaaatagacaaaaacatgaagaagaaggaaacatttacagtaccatctttaatattagtggttccaccaagaggaagaatttgaaacacttctccggcgttaatgaaaggtccaaccggcgcatccttggccggagtcaatgtgatctgagtctgacccgataatggccactggccagagtaaaccataaccccattagtgctcacattgagcttccttaaaaaggaaagtccattgactgagacatcaaaagccctccagctcatggggcctggactccgattgtcctgaaaatacaaagctacatagtactttgtggccggaagaggaaaaggtggccattgaagctctagaggcttccctttacttgctgtgaaaccttccacaaaggcttcagcaggtggaatgttccagaagtttgacgggttaattctgcttcgagaagtcaccgtcagatgcttctggtccgaaaacggttgccataaacggttgtatttgtcatctggatagctaggtttccaacatgtaacataccatcaaaagtcaggcaagaaaaagtgcttttcagatcaccaaactatggaatcaaaaagggcacctgatgatctccccatctcctccaaagctgttcctggctatgaggctgagcttgtaggacccgaggtctgtggaattgtacattgtatcttcaagagattggacatctaaagacgatataaaaggagaggaagaaagggtatgtgcattcttggctagacaaacacttagtctgttcccaggaacaccaacaatgatctcgtaataagaactctgacccttggcgtaatcctctgacgtattcacgacgctccattttgtgcctccaatgatctgatcaaacacaggtgggttgtttttaccgtcaaagttaccgtagtagtaagtggttcgaataaggtacttggaggtctttgcgacagggaaattataacagtgttttcgcgatgacttgtcgggaaagtaacgtagtgtggagaggatcggaacgaggtctttttgcttaatggtcgtcgtatttcccacggaaatgaatccttcgtccggtgtgtattctatctcgttgaggtttgttgaagaagatgatccacaatttaagaagaaacctttcacatggaatgaaactcgacgttttagggtagtctataacaattgtaagcatggattcaagagtgtttttggaaattctgtaaatggattatcaagattcgatcgaaaatgtaaaaaaaaaaatcagaaaaataataaataagaatcgcaaaaacgaaatttacctcgaggaggagggagagcgtgagagatggagaagcataataagagaaagaagaacagagacattattgtgacgtattttgttgaagaaacagacaaagaagaagaagaagaagatcagattctttccattgtcgttaatggagatcatacaaagattgaaagtagagaaaatgtctgaaaaatgttaatttcttttttttgcaataaagttaagagttaatttaataagacatacaatatagaataagaaagcgcctgtagctcagtggatagagcgtctgtttcctaagcagaaggtcgtaggttcgacccctacctggcgcgtttttattttggccttatctattatttttcatgtaaccttttctctgtgtttcatactactttcaattatctcgattatcatctttttatacgtgaataatgcaaaaatatttgtattttcataggagagtttacaaccttttctctttgtattttcaaatgtatgaatttaaaaatattttaaatgtacaacctttgtaacaattaaatatataaagtgaaagattattgtgagttctaataagttttaacaatagtaaatggttttttttagaacgactctgtctgcaacagagtgactcggagtgaccaacgcgtcctaaaagcgttgcgtcatgttgaagcaaacccaactttattccgacgctaaccaacagattcacgaaaccctataaatacttagaaatccctaatcctcctctaaatccctaacttcttcccctacactctctcacacaattttctcgagaaattttccaatttcctttcgatttcgcccagaaatttcggtaactttcagattctgttcagaacgaagaaacttgttatttttggctacttctctccgattctgttcttcttgtagtagctgatcgcattccatg

SEQ ID NO: 31561 - DNA, 3003 bp, Unknown
  misc_feature (1)..( 3003): 2750-1469P.txt file - cDNA_ID_3043477; gDNA_ID_1971877; Annot_ID_176770
agtagcttggcaaagcatatgcttgtagtcatcaacaagcttaagagtacacttctccacaatggtggtggtatgcagaggtgacggttctgcattagaaaacatcagattcagatacaacaaactagcaattgtgcagacctcaagcacaacaacagtagtatttatggagatacaaatacagtgactcaaggaaccaatgtatcgtctaaccatcagatttcaaatccacttaataagatgaacaacatttctaataacatgatttccaaatgcctaaaacccagaaacctaaacgcaatgaagcaaaattcaaagtcaaatcatcaaaattcgtattacaacaactgagtcaaaatttgagacaatcagggatcatcataacgcaccgttttggagataagagccgtatttggtggcagagagatgcatcttgatatcgtctaggttctcacactgacatagattattgtaatcggcggtggtgagaagcccagcacggtggcctctaacgatcgcctccaaatatccgccatggatgttgaaggtaagcgcctcgaatccgtacatctttctctccttaacgtaagatattcagatctcaatgattgtcgccggagatctgaagaagaaatcgatacagagatcaacgcgaagaagaagatagcttcgaattgattggatttgtttgcaaactcgtgttggcacgtttaattacggttgtgtcctttaaaccggtgtgttaaaccgaagaatgtacgctgcaaaattattttcgtctctcaattttgctttgatttgttttggtttatcgatataatataataaataaatataaagacagaatttcagaaatccagtactttaataaaattctgatactttaaaatccagatgcaacaaatatcttgatatccaaatggtatctttaataaataaataaaaaactaatatgtgaaaaacaacaaacttttatttatatggaatatttacattttttaaatatttttattcgtagcaaaaaaatatgtgaaataaatccaacacaaaacacaaaatgcttgggatattttttggataagcaaattcgaatttatatgttttgagagaacaccaaaattgtgttagattaccggtaatatagattatgtgattcaactcatagaaaagtgaatttatctacattttttcttttatctggacctctagaaaatcgtagattgtattaagatggtgttgaaaaactaaaaatggtttgtcattattttttatttactttaagtagaaatgaataataaattagttgaagattagttttatgaaagaagcggtaatactttattgagaaactcccacaaatagcacacttttaagttttttggacaaaaatagcatgaaaaagttttttagacataaatagcacttaaataattatttgagaaattcctaaaagtagcactaaaataagttttatggacaataataatactacaattttatataaaatctattcaaccaaaataaattagaaataaatttaaaatattatatttgggttctctatttccaatttagagaatatatttcaattatttaaaagaaattttgattcattttaatattagtttatggtattatatttgggtttcctatttccaatttagggtatatattttcaccatttaaaagagatttttcattttaaaattagtttgtaatattatatttgggtttttttatttccaatttagagtatatatttctactatttaaaagttttttgattcaatttaatattagattagtatttgctctcatttttatttggaggattgatacaaatggtaataaaaaaacttttattatttaattaatttatagaggattaaaactttatatgctatttttggaagtttcaaaagaatatgctatttttggaataataaagtttttagtgctatttgtcttaattcccctagtttattcaggggcatagtaaaagaggtttcatagctcaatcgtttatttaaacgtagtttgaacttttcaggtaacatattcgatcaaagatattttattttagaatttggaaaaatttaagaaaaatttattgaatataatgatatagaaaattctacaaattgaaatagttcattagagttttactgtgcaaaaatgtaaagagatgaaagaacttaggttgccaccaagaacataatgattcaagattaatacttttataaaaatgaaaggaaaatgcattatattgatgttctaaacacatatttttagaaatctctactagctaaaatcctaattatatgggcaaatgtatttaatcgtaagattctatcttagacctcttatggactctttaattgatacttcttgcaaacttaccgtaatatcactcaggtacattaaaatgagaagctagatatgaagagatgaaagaagtcgagtcgaccaaagcaaggcgtttgtacatggaaagatatttctctagatatcatactttagatcatattatcaaaagataggtacgtagagttgtactgtccgataacactatcttttgtttaattttaaagtcgataacaatctcaacatttaaatgatattttggaagttctaaagttcacaattgaaacatatttttttgcatatttttaactttttttcgattcctcatttatttttttcattggtgagaaatgggaactgagatcttcaataaattaaaatttaaactttaaagagaaaattaatgaattaaagttggacagagaaatatttaaccgggtgtgcgtgtcttcgatttagcagaccggtttagggatactggtttaaagcttgcaaacaaatccagtcaatttcaaagttatcttcttcttcgcgatcacaatctctgcttcgatttcttcttcttcttcagaattcagatcagatctccggcgataatctttgagatctgaaatttcttacaatcaggagagaaagatg

SEQ ID NO: 31562 - DNA, 3000 bp, Unknown; identical to SEQ ID NO: 8768
  misc_feature (1)..( 3000): 2750-1469P.txt file - cDNA_ID_3043481; gDNA_ID_1971877; Annot_ID_176769

SEQ ID NO: 31563 - DNA, 3003 bp, Unknown
  misc_feature (1)..( 3003): 2750-1469P.txt file - cDNA_ID_3043496; gDNA_ID_1971877; Annot_ID_176765
gaataaattaatatcaaaaggggatgtagctcagatggtagagcgctcgcttagcatgcgagaggtacggggatcgataccccgcatctccacttttctttttcttattttatatttataccacctcaatgtttcaataattgtatagtttgaactgtttatttgttggaatactaatgttaaaagttttaaaaaaaaatcttgttagtaaaacttgaaataaaaattacgtgttctatattttgttgtactttattagttactttacatcttcgattaattaataattcttttgtaataataaaatgtatttttgtatattatttttttaaccaggcctttcccaaaatctccttcaattttaaaacaaccatattaaataagttgaactttgaaccaaaaacataagagaactaaactcttaattttatttcactagaccaatatcttattaataaaatgtatatttgttacaaaaacaataaaaattaaaaagataattgtcctaactcctaacatcacaagtttcaacatattgaaaaaaaactcaaattcatctcttttaaaataaagctctccctttttttctacaaaagtttatgtcgccacctactaagattatcggtttcaatggctttttcagccggggtttctttgttttagtctctctaattttgatttcttatgagtttgatgttatctgaatcttattttcttccaactatttcagatctaactctataaagtctaaatcctttattcttctggatttgctgtttattttgtctccttcatccttcatctgcagctttagttccgactgttccaaccataaaggcaggttttgtcgatccttcaacgcttcaaatacatatttttcactattaaagatctcgatttccttcctttcttcataagactttggggtaagaagagccttggttttattttctttagatagatctctagtctcagatatgtttttattttttaatttaattcggacttacacttatactttagttttgaaatctttagttatgagtttgagaaatttgggttcagtatcaatgttgttgtttttttatatataattttggatttttcctcctttggatctatctttattcgagagatatcgtttgctcgtcgacttagtttttggaatgattgttttttttgctgacatatgtatttcaccatttgtattccatctctctatcaatgaaactagtgaaaaaataaataaattaactcctcacatcttgttgagtataagagatagtcatttagttggtaaggttccatttccactagaaatattcatggtatcgttataacgttattcaacaacacatattctagatgttagatttgtcttatattaaaatccataaacaaaacaccttatacatgttaccatcggtccttgtacgttcgccgcatatctccgacttctctccgccgtccactggtgactctacgctcactctaaaaatctgtttactatataaaaaaaactaaacaaaagagaggattagattcattggtctaagtctagagtcaagaacaccaccaccacctgtaatcccaacaagtttagttgcctaccgtttatcgttatctaaaacaccttaatgtttccacgtgtcatcatctcacaagaatgtcacaaaaaagcttatattcttctagatgtaacattagcataactatatcccaaaaaagtctaccctttcgtcttgtttattttaacctcaattattacctttttatacatataattatgggactatatatgaactgattaatactattttcgaatcttaaaatgagttaataaagttatcaacatacactcatactcgcttaaactaagatatcttaacatttctaagatctaaagaataatttggtgaaagagaacaccaaaatatatcatcaaattttacttagattatgttacaataaaaaaaaattaaacatgtcaattgtaaaaataacattaccaattattcttatttttcatagaaaaattttatgtaccaaaataatctattttaaaccacaaacaaaatacatattaaattattattccaactcttttttaatggtaagaaattcaaatacttgtagaagacaaccttgttttgtcatgtgttataatatctatatattaattggaaattaatttctgttaattaaataatattttttaaagagctaataaataatattcttacattcaatttattgcattgaattattaacatatggtaaaaagttcttacaaataaatatataattttttcgaaaattgttataaaaaaaactttatataattggccaaagattatattgaccaaatcaatcatcattaaatttctattcttgtacgcgtattttataacaatttaagtaagattagtgtaaacattatacaagattataagttttcataaaaataagatttgtaggcgtactttatttgttgcccaagctgaccaaattacttatctctcttactcaagctgcccaatctgcccgttgctgaccactttcactctctctctctctgaagatgccctttcgtagctctctagctctcacgcacgcaaaaaaaatctccccttttgactaaaactttctccaccaatttgttttcttttgttcttccttctcttctttgtccccaattaaggagctcaaattcacttctactgaactgggttttaccatttgcttttgatctttggtttctgttcgattttggaggaaaaaaggatcaaactttatattaagagagaattgggtttcgttgatcttcatctttctattgatttcattatctgggtttgatcaaagttttgttttttggtacataaatatgtgatcagagagagtgatctactctagggttgattcgcttgactttttttggtttttgaattattggtgtttgtgtgttggctatggtgatttgatttggaattagggttcatg

SEQ ID NO: 31564 - DNA, 3000 bp, Unknown; identical to SEQ ID NO: 8787
  misc_feature (1)..( 3000): 2750-1469P.txt file - cDNA_ID_3043556; gDNA_ID_1971889; Annot_ID_176827

SEQ ID NO: 31565 - DNA, 3003 bp, Unknown
  misc_feature (1)..( 3003): 2750-1469P.txt file - cDNA_ID_3043560; gDNA_ID_1971889; Annot_ID_58474
gagagcgaaaatcaccggagccgacgatcatatgtggcactggcaagtggcaacggtcatctttatacatggagaggaggagacacacttgtacacgtcttctggtggtctactgccacgtggcagtattcaaatggtggattttatacatccgtgaatcttggagttgattttccttaatttaaatggtcgtactaccgacagccaaaaacttgtctttcaccaacaaatatgttttggaaggctgaatatcatcacacaaacaaaataaaaaactaacatttattttgtatgaaactacatcttttatttctgttcagaattttcgaaaccgttgaatttgtttgtcgattggaaataactagtgaacgtacgtaactcgaggattaattattaaacaaattcaagtattaaaaaaaatggacaatgcatgtttttctttacttttgaattttattttttatgatcacgattttacgtttgattcaatttctcatattacatgctactattgacaatatttatatttttcttattataacaatatcttttttcttttctttttttaacaatatctttttttttaacaatatcttattttaaacatctttaatttgtatgaacacaaatagatacatgaatatttctacgcgtgtgttaatttcctatttttgtgaaacaatatcaacgtctccgcgaatgcgttgaatataagtcatgattttatatatttttttatggttttgaacccacatctgatatctaagtgaagtatagcattctataaaatgtaactaaactttagatcatcgagtgttatcatgagtaacgtaaatgaaatacttaagttagataattacatacacaagggtggtagatcatctcattttgaaaaacaaaaaggaattacaagaattgaataataaaaccattaagtgagataaatacatgcacatgggtggtagatcgcataataaacgccgtacgatggatgagtattaaaaaaacaatgaaaatgcagctttggagttagaactcgagattcaaaatccaactattggtaaatctcaagtgattaatgcattattttgaagttatgatcgttgtcagtactattgattatgtagcctttaatgtatgcttaagaatatgaaggtttttcttagcttgtttcttaattttgaatacgtaacaaccattgttgtctccgcgagtccttgtctgcgtttagcaacatgttgatcaaggggatcttgattgtgagcgtataacaaccatcgttgttttgttctcttctataaatgatcttctaatctcacttttctttttccgttcgtttttctataacaaaaaattaacgtcaaggactcaaggggatttgaacgtttgacttttgatatttagatgaggaatggggagagactggtgactttcaaagttgttacgtggctaattaactcccctaggatttgtgggagaatccaaatcacgatcgatttttgctcaaaggagctgaatataagatggatagcaaagatacaaaataaaataactcagtaagagctttatttagtgcaaggggaaataaagaacgctaagcttaatcagtaaatcttagattgatgtcttgaaatgatgaagaaggagagttgtggatagtggctggcaacttccaaaattagctacattgatgcttataagttataacaacatatttctgtgaatctaaacttgctagaaatttctaattacatggttttgcgggcttctaattgaatcataattgggcttcttgtgaattctctaaatgcttcaaaatgaatttggatttaacaactctatccaaacaaacctcagcaaagccgtacgttctagctttttaaggtatcttcagtgcagattgtgtatatactgactgtaagaacaagaaatttataatgtagtatgtaataactccaaaaacattcatcaagctaaggaaaataatcaataatgggatgtcttgtctacttcttcaagcccattgaagaaggcacggatgggcccatacgaaaagatttttaacaagtctagccttcaaatttcctaatggctaattaaatagtttttattagataatgaccatgttctttgattgatcgctacgtcagctacctgcgatctaaaaaaagctctcatctctctttcacttttatttttcctctctttcatctttgccgcagcgactgtaattcggctattccgtagacgctggaattttcaacgtctcaaattccctttctcctatctcttcagatctatcgctgcgactctttcattcatctcaccttcatctttccttcttttttcttttatattttgtgccgccggtgcttgtcgcagcgatcaacaaaagaataaggtaaatattcattttgggtagtataatatacagtagtgagacatgggcttatgtcacatacactcacatgtgtcacacatacacctatttttgattattttagtcttgtttgtgtccattggaccttgagagaatcataattcattatctgtatcatgaagatttcaattcaagaatttatattcttacaggtccattactcaaaaacaaaaaagtaaagaaaaagagagcgagataaaatgatttcaatgaaaaataatttgaaaaagaaataattaataataaatatattgtactaacatacgcccaaaaattccactatagcgtatctcaagattcaagatctccttcttcttcagctctcgtcatcatcattctctgcttcttttcatttgctcctgttaacaaatttgccaactttcttccattttcgaatccctcttaacgcaaagttaggttttttgttaattcatttcattgcttggatcctaaggaaaaaaaaaacagaaatgaaaaaacccaaattgtcgaaagtggaaaaaatcgacaagattgatctgttctcttcactatggaagcagagatcggttcgtgtaataatg

SEQ ID NO: 31566 - DNA, 3003 bp, Unknown
  misc_feature (1)..( 3003): 2750-1469P.txt file - cDNA_ID_3043560; gDNA_ID_1971889; Annot_ID_176826
aaaatcagagaaagaaagaatgaaacatgcaatatactaagtgatgttaaagtattacaaagagaccaagcaaacaagtgtggccgcagagagagcgaaaatcaccggagccgacgatcatatgtggcactggcaagtggcaacggtcatctttatacatggagaggaggagacacacttgtacacgtcttctggtggtctactgccacgtggcagtattcaaatggtggattttatacatccgtgaatcttggagttgattttccttaatttaaatggtcgtactaccgacagccaaaaacttgtctttcaccaacaaatatgttttggaaggctgaatatcatcacacaaacaaaataaaaaactaacatttattttgtatgaaactacatcttttatttctgttcagaattttcgaaaccgttgaatttgtttgtcgattggaaataactagtgaacgtacgtaactcgaggattaattattaaacaaattcaagtattaaaaaaaatggacaatgcatgtttttctttacttttgaattttattttttatgatcacgattttacgtttgattcaatttctcatattacatgctactattgacaatatttatatttttcttattataacaatatcttttttcttttctttttttaacaatatctttttttttaacaatatcttattttaaacatctttaatttgtatgaacacaaatagatacatgaatatttctacgcgtgtgttaatttcctatttttgtgaaacaatatcaacgtctccgcgaatgcgttgaatataagtcatgattttatatatttttttatggttttgaacccacatctgatatctaagtgaagtatagcattctataaaatgtaactaaactttagatcatcgagtgttatcatgagtaacgtaaatgaaatacttaagttagataattacatacacaagggtggtagatcatctcattttgaaaaacaaaaaggaattacaagaattgaataataaaaccattaagtgagataaatacatgcacatgggtggtagatcgcataataaacgccgtacgatggatgagtattaaaaaaacaatgaaaatgcagctttggagttagaactcgagattcaaaatccaactattggtaaatctcaagtgattaatgcattattttgaagttatgatcgttgtcagtactattgattatgtagcctttaatgtatgcttaagaatatgaaggtttttcttagcttgtttcttaattttgaatacgtaacaaccattgttgtctccgcgagtccttgtctgcgtttagcaacatgttgatcaaggggatcttgattgtgagcgtataacaaccatcgttgttttgttctcttctataaatgatcttctaatctcacttttctttttccgttcgtttttctataacaaaaaattaacgtcaaggactcaaggggatttgaacgtttgacttttgatatttagatgaggaatggggagagactggtgactttcaaagttgttacgtggctaattaactcccctaggatttgtgggagaatccaaatcacgatcgatttttgctcaaaggagctgaatataagatggatagcaaagatacaaaataaaataactcagtaagagctttatttagtgcaaggggaaataaagaacgctaagcttaatcagtaaatcttagattgatgtcttgaaatgatgaagaaggagagttgtggatagtggctggcaacttccaaaattagctacattgatgcttataagttataacaacatatttctgtgaatctaaacttgctagaaatttctaattacatggttttgcgggcttctaattgaatcataattgggcttcttgtgaattctctaaatgcttcaaaatgaatttggatttaacaactctatccaaacaaacctcagcaaagccgtacgttctagctttttaaggtatcttcagtgcagattgtgtatatactgactgtaagaacaagaaatttataatgtagtatgtaataactccaaaaacattcatcaagctaaggaaaataatcaataatgggatgtcttgtctacttcttcaagcccattgaagaaggcacggatgggcccatacgaaaagatttttaacaagtctagccttcaaatttcctaatggctaattaaatagtttttattagataatgaccatgttctttgattgatcgctacgtcagctacctgcgatctaaaaaaagctctcatctctctttcacttttatttttcctctctttcatctttgccgcagcgactgtaattcggctattccgtagacgctggaattttcaacgtctcaaattccctttctcctatctcttcagatctatcgctgcgactctttcattcatctcaccttcatctttccttcttttttcttttatattttgtgccgccggtgcttgtcgcagcgatcaacaaaagaataaggtaaatattcattttgggtagtataatatacagtagtgagacatgggcttatgtcacatacactcacatgtgtcacacatacacctatttttgattattttagtcttgtttgtgtccattggaccttgagagaatcataattcattatctgtatcatgaagatttcaattcaagaatttatattcttacaggtccattactcaaaaacaaaaaagtaaagaaaaagagagcgagataaaatgatttcaatgaaaaataatttgaaaaagaaataattaataataaatatattgtactaacatacgcccaaaaattccactatagcgtatctcaagattcaagatctccttcttcttcagctctcgtcatcatcattctctgcttcttttcatttgctcctgttaacaaatttgccaactttcttccattttcgaatccctcttaacgcaaagttaggttttttgttaattcatttcattgcttggatcctaaggaaaaaaaaaacagaaatg

SEQ ID NO: 31567 - DNA, 3000 bp, Unknown; identical to SEQ ID NO: 8796
  misc_feature (1)..( 3000): 2750-1469P.txt file - cDNA_ID_3043564; gDNA_ID_1971889; Annot_ID_176823

SEQ ID NO: 31568 - DNA, 3003 bp, Unknown; identical to SEQ ID NO: 21414
  misc_feature (1)..( 3003): 2750-1469P.txt file - cDNA_ID_3043568; gDNA_ID_2684202; Annot_ID_191259

SEQ ID NO: 31569 - DNA, 3003 bp, Unknown; identical to SEQ ID NO: 21414
  misc_feature (1)..( 3003): 2750-1469P.txt file - cDNA_ID_3043568; gDNA_ID_1971889; Annot_ID_176819

SEQ ID NO: 31570 - DNA, 3003 bp, Unknown
  misc_feature (1)..( 3003): 2750-1469P.txt file - cDNA_ID_3043598; gDNA_ID_1971893; Annot_ID_176881
aaagagtatatcctacctattttactaccaaaacaagtttagttccaaaattaacacaattaatccaaaaaataccataaactaggtttaacagtttagcaaatattagataaattttaacaacttttaataacactaccatgacatttgttaaaaaaaagcatcgaaatttgaacaatacttgtgacagtttaagacagattattaaataaattaatcaaacacgagaaaaaacagagtgagagtgaaagaaagaaacgaacttgagcaatgcggaaccattcataggagtcgaatgaagcagcggtcaagatgacttgaggaaagctggtagcagctttaaccgttccgttaaaccggattcctggaccggcgtaggctacgccgtgtaaagcttctgaccaccattcgtacgccggaactccaagacgcggtatccctggagctgtattcaccagctgcgagatcttctcgtctatggttagcctcgagacgagatcacgcgctcgcttgccaattgggaggtcagtgcggcagaactggtagagtttcgtggttggatttgaagggtcacaggagtgcggcggaggagctgattcaacgccgtggacgatgaagagaaggagaagaagaagcagttgtttagccatggcttcgaaatgcggaaaagagatgagaaagtgatgagtgtaagagagtgacagagtctctgttcttcttattcgttccccaattatgtctgtaataaattgacttaaataaccttcttgattcaacagggtaacctaaaaatttattatattgttgtttttcaataactctttttttttgcaattaatggacatcttaaattttttattcaatagttgaataagtataatgaagttgttaaattttggtgttgtgaagtttttgtgtctttttctgatttgctattttcattattattttcagatttttatctaatcctatatccttgagatcaattagtttatagaaaatgttttaaaaacagttatatcaaaactcatcattttttaactatataaatagagatttggttcctttaatttggacacatagaaaatcgtattagattgcatattatctcaaataaaataaacaaaaagtatttgatttttatctatttctgtttaatttaatttgctaataaactatttaattcttaatcatttaatttaataaaaatcaggatagactgttgaattttattaaataaaataattgtagaatagaaaaaaatagtatatatatatatatgtttaattattagatggaaaagataacaaaaataatgtgaaaaagaaggaaaaaaaatgttgaattatattataccattataaatggtcttacgggccaaagcccaataatattttttccaaatagcttttaaggtctttgcgttaagtcatttagcatatatttttttcccagtgtacagcccaataagtctttcaaaacgttttggtatcaaaacatgtaatagcgtttttatatatcaagaattgtttaagaaatgtactgaaccgtccaaccaaccatataagtgataatggatagcaatattattataaccttatcaggtcaggccatatgtcacaatcaacctaattgtgatctataaaagttcacctggtcacgtatctaggtttgactggataaaaattgtcggtttcaaacaattaatacaacaatattactagtagataatttgtttctgtctcagctaaatgtttggtggaaggagctttgtagagaaattcatttgaagtaaaaaaatctaacacaaattcaacatgttcagaataataattcacagctgggtaaattttaatttacaattattgagtttttttttttttttgtttatgtcaaactcaaaactagtgccacgtggaggaagctaagcctataaacgattatgaccgacagttgtcactctagaagtagcggtccttgtgacggcataagctggtcataaccgcttagtggtgatgatttgacgaaattgcccattaagcgactgtgagatgtcggtagactacgatggccacgttccacagagagtgacactaacaaccaaaacctattttattactattttttcttttgtcattagtattttattactaattgtttgaatatttcctcgtggtctattattattaaacactctagtcctcttattgttcattaaaattgtctgacgcttgtctcttcctttcgttttctactagaaaattcagctattttcttaatgttttatatctcgtaaactcttaagttgtaacagtgtttcaatataatttgaacacatattgaagtttagtccaaaattcttcttctccagaatatatccaaatcgagtcacaatggaaaacaaattctcctttgtaggtaaatagaaacaaacaataattgtggcattaaagtgttttaaaacgagatcccaataatttacatcagtaagatttcaaaagtgtgtaattagaataaacaataaacctccacaatttggaagatattttgtttccatatttgtcgcgtataatttattatattgtcaattctcgagaatttttaacgttttgttttgaccaggtaacgactgttccggtaaatatgtaggtccaaaaacttcccgcggacttaactcgttttgaaatccgctgtttggttttctttttttattaccggctctaaccggtcctacccaaaaccttgtcatgtcctctcattcctccaccgtttataagtaggcccttaactccaattcccaccgtttcttcgctaaccacacaaagcttgttcttctccttccttctccaatttcgtaagctcaaagatttcgatttcgattttgattattgccaaaggtacaaacttttgaacacaggtttgtttattttgtttcactctgttcgattttatggggttttatttatattttgttcttgatcgattttaccaggtttaaagatg

SEQ ID NO: 31571 - DNA, 3003 bp, Unknown
  misc_feature (1)..( 3003): 2750-1469P.txt file - cDNA_ID_3043606; gDNA_ID_1971893; Annot_ID_176876
tctcctttatttgaaacagcctatgattctggtgatgaacaaaattgactgtgctcctcctggtagctgtgatcaactagaagatcagaggaaaaaggaagaagttttccataagtctgtcttcacttctgctgtaactggtcaaggaattgaagagcttgaagatgcaatattggagattcttggtcttgatcgtgtccccactggaggacatcaatggactgtgaatcaggtctgtctcaattctacctgttattctgtttctgtccattaacttttgactgttgcatttatatcctctttgtgtgtttatcagagacaatgcgagcaattggtgcggacgaaagaagcgctagtgaggctgagagaagctatcgaagacgagattccgattgatttctggacgatcgagcttagagaagctgctttatctcttgctcaaatcagtggtcaagatgtctctgaagaggttttatcttccatttttgctaagttttgcattggtaaataaacagttgccacttaattaaaccccaaacaaatcataagtgtcttattaaccctttttcacatacattgaagtttgtttttgtgtgtttattgtatcatcgacgtacatacataaatgattagattcaacatacacatacctgattatatgtatcaatgcactttgtatatgacaagaaggtattttttggtccttgtaaatttataacaaaaaatgtcaaaaaggcaataatgaaagcgaataatgaaaaagaacctctcccgaccaaaaaataataatgaagtgtgtggaccagatgttgaagcccactagtgggaaaatgggcccgctagtgaaagagaaaagggcccactatcaatttccgaagttgatatttggaagttgggaccaattacgtttggttactgtagaataatatataaccttttttgttattgtgtccaaaacatgaacgaatcagagagtcgagaaaattaaataaattttaacgtctcttcacttttttgactcacctgtgtccacttgtcttctcaatcataccaaatcatctactacataccaaattccacgtcagcttcagttttcattgtcatatttgtcatttaattcaaaaagaaaattgacacaataatttaacggttccaaaagttatatgtgatgttttcaaattctagtcactaaatttatcctccaagcataatcaaatgaaatttgttaaaaaataaaaaaaagcataatcaaatgaatactaacgtatttgtgtgtttgtgtattgttgatgcttggatcgaataatttatataaaaaagaattcagggaaaaacgaaaagttttttattaaacgagtttagagttcagagttcggcgattgcaagaagataattacaaagacgaacagaatgttcgaacaagatgtaaaccgatacgtttgagctgaactaaagatgccgagcaaaagtgatcggtcaaaatgctcggttacgaagctttgtgaagaaggtgaagtaaaaatttcatgttgcattcaataatttaactcttacttcagttttcaattaattctgttcaaagttcccaccgtcacattgtaaggaaaagaagtaaaagaaacttatactagtatttatttaatgaggaaatgtcttggagacctacgatgttgagacttgagaccgaccattttggtataatgtgccactctgtaaaatctttaatttttctgtgttaaagaggtcacaatgcaccaatcagcataagcttttgttgtgattttcaatcagaaaaaaaaaatataaggaaccaagagcttttggcccaagtatcttccccatgacaaaaatatactcttaatttgttggcattaaattcataaggttaaaatgttgaaatttggtgagagatgatgtgaagaggagaaacgagagaagggctctataaaattgcaaaggccaaattgaagtacaaattgttgtcatttgtgaagaaggtggtccattcttttggtagcccagacgttaggaaccaaataacaacataattttctatttattttcatctatttttattttggaaaatgagttttcttgtaataataattattgttttatttttggactttactttcatgaaagaaaacgactgggtggagaaatggacaattaattcttgggggcaactatcgtatgatgtggaaagttaattattgttaatttagtgggtccattgggcctaacgggcccttcttgaatgattttatgagaattttctactgtaagatattgtaagacactgtaactttaatgaatgggggatatacgatgttttttttttattttaacaatccatcgttttatacacatgtttcgaagttcacaaacttcgcagacaaactaggtttgaaattttttaactaatattccaagtttttgtttgttttattaacctttccgtctataaaagaattaagagaaaagaaccataaaattaatgaatctacttagcaatattctaagatttgctgtctttaaataatgaaacaaagcttaagaaaataagattcttaatatttaaaaaaatactatgaaatttggacagaattgctgagttttcttatttatgtacaaacaccactaagtaatatgtatcattagcttatgtatttttaccaagtttgagaggaccatacaactaatattatcacgaattctattattgcatattgcaaagtacaaacagaattaatgcaaaaatgttctttttaaaataaatgtcaagaatcatgacgtggcataatcgtgacgataacataactttgatcagaaatactcaacggtctagattgagtcctgagtttatggttcttctttatcttccatgtctcttctccttcctcactcccctcttccctctctttatctctctcaagatttgctctgtccagagctccaaatttcaagaacataaacactacacacaaaacactgaatacgatg

SEQ ID NO: 31572 - DNA, 3003 bp, Unknown
  misc_feature (1)..( 3003): 2750-1469P.txt file - cDNA_ID_3043609; gDNA_ID_1971893; Annot_ID_176874
tgacccaaaattgtatatcgtttaatgcaataaacgtaattaagctctcgtatacttcaaatgcccaaatatcatttcaagtcagcctaaaactataccaaattttgaagttcgaccctaaacgtatatatttaaaaactcaatttcaatttttcacatcgtagaaagtttgtgtagctagagaaacatgttaatatatatagtttcgaattcatcggatatatatttaagtgtagttggtcctacatcccaatatcccatgatgtttttttggtagttcggtttctcaagttggttggtacttggttcggtttctcaacttggcccatgatatgaagcatataatatgcatacatacatctacattttcttttttaaagtgttacattcacaaatttacaaatcgaaacttgttataatatgcatacatatgcaaaacataatgtgttaccgacttcaatcgtgggtacgtatttttgagattgatgataacgtataatacatatctaaacagattataacagctgtttaggacattcagtttaatacccaaaaaaaaaaaaaagaaacaacgacaaaatagttgacgaatatacatttaaaaaaaaaaaattatagtaagatagtgtgtggctggccgtgaaccaacatggagaacaaatagctcgtagccaccaaagcactatctagcgcgtagcgaacacgtagtcaatggctaattgtaccaaagacgaacctagccacattatagtccacgttcaaacgaggcccaccagtttctataaaagtcaacttcaccccccaaaaaaaacgctcctaacttttgaccttttcgcttttcttgatttggagccagtggcattgtcgtaaaatcatttgatctaaccgctttgatgttcttgcttagtttccattacttctgtcattatcacctttatatttttttctcctaaaaaagccaaatattcgtaatcacgatctttatctcttataatttaatgtttattccaatttaaaacattaaatttataaaagctcagatctatatttctttttcccctcacttttgttaaataattttttttatctcttgtttatctttcttgaatttttttccagtttgaagcaaaatctattttctctgtaaattttgtacttttctcacaaaatactagggttttcgttttgtattttgatgagagagtgattcagtgaaccgggacatgattcaggtttactgattttactgttttaaaactttagaaaagaatagtgaacatgaacaatctggtgttctaaaatctaaaaaggggaggcttttaactaatatctctcgtgtactttttctctaattcttaaatcgttctctcttttctgtttctactttttaagatcccttttcgctttaataaattaaaataaatcacgtaaaaggtctaatttggaggaaaaaggctaaaaagcgagatcgaattcttcttcttctttttccaggtaagtgggtgtttcaccttccaactatcaatggctatgcataacaccaattaatttattttgaaacctctcatttatagaatacacgtgcatataatgtttaatcatcttcttcttttttggtgaaaatagtataatactagttgattcctttttcaattgtgtttttgtctatgtgtatagatatcagattaatcacccaattttataactggcaattatacaataatgaatagaactaggaaaatgttgaagaggtatcgtctggtgtaggagtttacgattacagcgtctcttcgatcggtagaatattaattaactcactatcaatcatgcatacttgtctacattacaaagtcaacacatgtggtgctcactttggctccagcaaaaactgattacaatatttgtgttttaaagtatataaaaattagtcagaaaagagaatcgtattattttttatagctttttgtgatcgaaattggcttatgtgacagaaaaacgccggttaattccttagaaaaacttaggttgaaaatgaattgcggctagtttttataataatcatgtcattgtccatcaacttgcacaagttaaagcttttgtctaaaaaatgggtgatttaaaatgttggtttaatgcattctaatgaacaagtcaatatgctggtattgacagaacatctacatagagtttggacaagagatcaagtcccaattagaaccaccaaaaaagaacatatgaattaggttttatataatagccttttaggtattctttccaaatttctgttcagttaggtttgttttctaagttttcttaagtccttttctaaagtttatgtccaacccaaaacgatgataaaaaaatccagaaatcaaatgttaattaataaggttctcttcgtctactcttagctaaaattaaattattttataaaaaaaaaaacgaaaggatatgattaacgttagttcttcctcgtttattgagggataactgttgcatttttaaaaaatctcactatgtgccacgtggctattctggtcaactatctctccttatagcaaaaaagtaaacgagatcattgaattgagattgttttcagtattgcacacaaagtttgccacagaaaccattgacttaatttgtttaaactttaatgtcgatcaacgccaattaaaaattgcatcttttctagttagacttttttcaatgttcttaatgtacttggtctcttagtaatccagattcatcaaattgtatatgaccaccactctcttatcattaaattaaaacaaaactatcctaaactttcgttataaataagcttcatcaatgttgctccaaaattcacacttaaaagtcatctttcaacccaattatctctatcctttctcctggttcgataccattactccatccacacaatttatataatctcaaaaacttgcaaagtaaagtactaatctaagtagtctcctgttctgtttgcagagttacatagctatg

SEQ ID NO: 31573 - DNA, 3003 bp, Unknown
  misc_feature (1)..( 3003): 2750-1469P.txt file - cDNA_ID_3043617; gDNA_ID_1971893; Annot_ID_176866
atctaaaatcaagtgtgtatgcgctttcaaaatctctaagacaaagtgtagttgtttttaaagaaactatttttacgtcgattgctgattgttgtgccccttttcacaattttgattatcccttcgagattagtttgcatctttttagtagataattttggattgatctgtagacaaaaggaaatattgatcggtcatcggtccattaagaaaataaaagtttttagagaagtcataacagctacagcatgcgagcataagatacagtaaaaaaagactaaagtataatcaaaatttcatcattaacttttctgtcgtttagtatgtgaatattttgttttcactttttaataatttgatggatactgagaatttcagtttcaaattagtaaacgataaagtagatgataattaaattcatgtcatagccatgaacgaatgttatgttaaaaaaatttcatgtaagtaaattctttggagttcgattcttcttttgtccttacacaatcaaagatttttctttcaactttttttacttaacagcattaactctttctcagatcttcaattgttttcctaaacgaaattatcattaaattgtttaaaaaatacacatttaatataacatatatcataacaagatatattatatttatgaaaaagagatgtagtactacagcatatggtggcaaacaaacccactaaattcagtaaaatggaacccaccaaatttatctataaataagtccccaaacctctcccccaaaaatgcaacaacactcatctttcccaatataagtttttaccaaacaacaacttttgttttgcctttcctcaaaacataattttgtcttattttctaaaccggtaaaagatgtcgctagctatcgcagaagtttacacggtgaggaagtttcacagagagagtatgaagaaaccggccaaacagacggttaccggcgagggagatgaaaagattggcggaggaagtttcaaggaggcgccggtgaagtcaggtgggtgtagaagattcggacggtggttttttgggaagccgggaatgaagaaaagctctgctaaagtttcggatcccatggcgattgagtgatgaagaagaaattaaaacttttctcttctttgccttttttttttttctttctttattttgttttattttcattggtctttttttaatggctttttctagtgtcttctctttttctttattgggtgattttataaatagtcggtaaacattgtacaatatgaactacaaaaatatgagaaaatctatatatgtatgtagaatggatgtattccctaaataccacagctagtttgataagttttatgccaaaccaactaaacttgtatgccacgatatttcgtatttcagaaaatcgaaaattgttattttttagtgttttttaaaccatatatatatatatatatatatatacaaaaatacaaacatatgaaaataaacatatctagatttagtttttagttggttaaccatttggcacttttgacatagttttagtttaataatctatcactaactgtactaatcttcttcttctttttttaactgcaactcacataaaagaatatctagatttaaaccatgatattgcataaaccattaaattcggttgtagcaatatttatccaaatatgaattcggcgctatacaaatataaaaacaaactattttggcgctcttattatatgtcacgacaaatcacacacattaaatatatacaaagacacaaaaacaagataaaatatataggaaaatacttttaaaagaaaaagtagtggggttttaagaatataaagaaaattagtggatgttcaaaatattgagtagtgaaaaataaaccaaaacaaaaataatctatgagggtgattaggagaaggttctgctcgtgacggtttgttttttcagccaatcaaaaagcttttaagtggatctcactagatttcatagcatacgctaacgacctaacgttaaagtcaggcaaaatctatgtttaaaatttgcgtcgttcaaaaaccattccacaaaaaatacaagctaaactggcggcagagtctcagttcaatgaatccattacgagctttgtttgaagaaatatttaacccactgactcattaataaagcaaccaaaacaaaatcctttaactataaaataattaaacgaaagtaaagaacacacgaaaacaacaataaaagaagaaaaagcaaaagtaaacgacaacaaaattaccttaaatatatattctctcgtaacaagttggcatatctaatctagttatattgagatagtgtcatgcatcatgatattagatgttttatcttataacattgcttttatttttaccgatttaacaaaatcgtatattgtatgcaggtagtcaaaattgatacagacttgttttatatcagccaaacatatcaattcagtcaagtgagttaacaatgtatgtcaacaagggggaattgagcaatttaaagagttaaaagaccattaactaaacagacaaagagtttaggagcaaaaagtaataaagtaataataaaaggtcaaaaagtgtaagaaaaaaagaaaagaagaggaaggttctgtgcacgtaacttgaattcgtaaaagtccattgctccttcttccttaagctctttgctaaatcttcacgcaatgactctctccttcaaattcaatcctccttcttctcttctattctcttcccgcttcatcctcctcctacgtcatccggacgctacgtttccccggcgccggcggattctaccggtcagttctctccgatcaaactcttatgctcattgtctcctggaatttcaacaatcttttgattagaacttttagattggtgttctgatgggagaatattgttgaattgacagattcattgcgttagatttgtcactgagccctaagaatttggggaattttggtctgcttcggcgaaggatcgatg

SEQ ID NO: 31574 - DNA, 3003 bp, Unknown
  misc_feature (1)..( 3003): 2750-1469P.txt file - cDNA_ID_3043625; gDNA_ID_1971893; Annot_ID_176859
ccggagactgagattattattacgaagacgcagatggtgaatctcaagtgtgctgcttgtgggtttatctctgaggtcgacatgagggataagttgactaatttcattctcaagaacccacctgagcagaagaaggtgtcaaaggataagaaagcaatgaggaaagctgagaaggagaggcttaaagaaggcgagctagctgatgaggagcagagaaagctgaaagctaagaagaaagcattgtctaacggcaaggattctaagacgtctaagaaccattcttctgatgaggatataagcccgaagcatgatgagaatgctctagaggtggatgaggatgaagatgatgatgatggtgtcgagtggcaaactgatacttcccgagaagctgctgagaaaagaatgatggaacagttgagtgctaaaactgccgaaatggtgatgctctctgcaatggaagtagaagagaaaaaggcgcccaaaagcaaatctaacgggaacgttgtgaaaactgagaatcctcctccgcaagagaagaatctcgtgcaggatatgaaagagtatctgaagaaagggtcaccaataagcgcgctcaaaagtttcatctcgtctctctctgaacctcctcaagacatcatggacgcactcttcaatgctctctttgatggtgtgggaaagggattcgccaaagaagtgactaagaagaagaattacttagcggctgctgcaacaatgcaagaggatggatcacagatgcatctgctcaattcgattgggacattctgtggaaagaatggaaacgaagaagctttgaaagaggtggctctggttcttaaagcattgtacgaccaagacatcattgaggaagaggtagtgttggattggtacgaaaagggtctcaccggagctgacaaaagctcgccggtttggaagaatgttaagccttttgtggagtggcttcagagcgctgagtctgagtccgaagaggaggattgagtcacttttttcttccctcctaacttttctttgcggcatttcttataatacttcgtcagttttcagaattcttaaatctttttgctgtgttcttataaagaaacatcatctattaaagttgtcttcgtttggatttggttttgacgactttgggaaatatttatgtttaagaaggtttcattggtcattgacttttatatattatatcgtaaccatgatgtgatagtgggccttagatcaacaaacatgcgaaaaacagaagcagaggcccgtttcaacggagcataataaattgcattctctgtcttttgtttttaggttttttttttaactgatagatgtgccgtcgaaaataatattgatatttaaaaattcacaacaaacattcttaactgacccacccatctatctgctattcccacgcgccaaggaaaataataataatagcgaaattgatttttacatttatttattgatagataatttgtgtattgttaagattaacagattttaagggattaaagtggaaaaggtaaaccgaagacaacttgccatttactgatttacaacaatccaaatttaaaaacaaatggtcccagtttttagggttgtcacttaaatttatcgaaatatttacactttaattgggtaaaacataatggacagaaaaacaaatattgtgacaaacaaaaaaacatgttttcaccaagaaaaacaaaaacaaaaaagatgtaaagcttttcttacatctgtacaaaataaaagcagacgaaattgtactttattttccttattaaattgtcggtatgttttatatgttgtgaaaagtagaatggataaccaaataaaaattactgacatcttaataaagttggttcaaccggtttaaaatgtatttttttagtgttaacaacttaaagcttttttcgattatcgaattgcaacaaacaaatatattaacagaaaaaaggaatcatgtatctatttcaatatcctgttttttttcttccatttggatatttagatctttttctgaatttatcttgttcttaaattaaaacagaaaaaaagattaaaagtaagacagcttgctaatggcaaccgcaacaaacaagataattttgaaacggatccacttggattttctttgattttgtagaaaaattgacaaattgcttttgtataaaaacaaaaaatgtaccgtaaaaacacacacataaaaaataaaaagtgataatgacaaacaaataaagtggtatttttcttttatctactaatgtgattataaaaaaatcgacattgaaaatttcaacacatctttttcgccaaaacctgaaaatggtcttattataacataaattagtttttttgtctttctattatatattcaataactcatcccaacttgaacaaacctatttcaaatttttttgtcttgaataatgataagttccgtagtgttcttttctgttgtgacaaaaaatactagctaacgagggataagcacaaaaacatgattaatgtttctctaatcattctaaaaatctacaggaatattcccttttcagttttttctttcttaaatgcatttcttagttcttcataattcagtgagttttaataacaataataaaaaaaagagcatcattaattgaacctaaaaataatgagaagaaaaaccaaaaagatagagagtaagatgcacgcgctaaagatcgaacggttaatagaatcaggttagtgaagagagatattaaaagtttgttgtcgtgtggcaaaaactataatttccttctcacaaacaaaaaaaataaaatcaaacacaaaatcccgtagcatcgtaacagtaattcgctattatctcctcaccctccgctttcgcttcccttctctgcccgtttcaattccttctaagacatcacggtctctctctataaaaacagtacctacctcttcttcttcttcttcattcgctgacttcgtttacactgaaaacaaatacctatg

SEQ ID NO: 31575 - DNA, 3003 bp, Unknown; identical to SEQ ID NO: 21425
  misc_feature (1)..( 3003): 2750-1469P.txt file - cDNA_ID_3043669; gDNA_ID_1971898; Annot_ID_176931

SEQ ID NO: 31576 - DNA, 3000 bp, Unknown
  misc_feature (1)..( 3000): 2750-1469P.txt file - cDNA_ID_3043697; gDNA_ID_2684104; Annot_ID_190340
acagagatacaaaagcttatgcctataaagacaaaacaggattaaagtatttcagtagataattccaattcttttagcctaccatcttacaaaaccccagttgaccaaatcgagaatctatatggagagagtaaataggttgaacgaacctctgagaaggcgcatgctcggacaatatgcttgtgctcaaaagaatgcagcacatcccctgttaacgcatcccaaagtttgctgaacaaaacaagataacaaaaaattggataaatgtgctgtatctaagaacataaaacatacgcaaataatgacttaatgaaccaaaaaaaattaaacacatacgctgaaaaatcggcagaagcagatgcagcacgtaatgcattgttatccagacaagaactccaaactgcacctttatgcccttcaaatgtaccaatccagtctccagtttccccatttctcaacattggatgcgaatctaaaccatcaagacatgagtattctcaaaactctatgaactacgaaataagtattactcagagaaaactcaaagacttttgtaagttctcaattcgatcaacatgaatttttgcacagttctagtaactaaattgaccaaaaaaatccaaacttttgtaagaaaccaaaagtattatcacctttgctagcgctgatgaggaagaaaccgtcaggagtaattggactgtagaacaaatcaacaacaggtcttgaatggccatgacacacttgtggaatcgtcaccttcttcttctccatctatcctaaaccctaattaagcgactctttgaaattaaaggaaagggttttcgatttcaaacgattcaaggtagactcagagtagctgaaaatctaattttttttgtagtaatttctacagaaatattgggagaaacaatcccgaatctataaaagttcgatcgatctacagttaattagagaaaccagtagcttacagtggaatgctgattcctgggaattctacagaaccaaagatgaattgaaagtataaaagttaaaaaaaaaaggggacaatttgtagaggaaagcgtaggaattgggtggtttttatttgtacaagccccgtatgcaaaacagtagcaagttttagggatttctacatctagacgggaaggagaagacctttatttgtattttttaatttagttcctatacgtttcatatgttgcaataagcgaccctatattttcgtaattgacaaaacaattcacaataccatttgtaaataatttatttagaaaaaaaaatcgtaaatcagtagtgtattttactgtacgttttttttttgtcagcatgattttgaaaataaagtaaaacaaagtatgattcttaaataaataaattaaaatttcgtttggtggtttaatgttttgttttttaaagtttataatgttatattcaataattggccaaatcccaaattggcccagggcttttactaaaggaaaatcggaaaggcattgccgtcaccggaggagcgcatctgatactggtgactaccggaggcagagaaccagtttggaggtttaatgttttaacatctaatttgaggtttgattctagaaaatgtgaattgtggagagaaaaacttacaagaatgaataatagatcacagacactttacattttgtggttcttcattgaacattataaaaagatcttaatagagaggaaagatgtatcaccactacattgaaacaacgagacgactatattaaaagattcgacacaaccaaattcacgatcatcgttaagaataagatctggagtggttttaattagtgttggcttttcagtgagaaatgtcacaaaatattatagttcgtctatgtggaatttgtaaaacaagaccgaattcaagttgtgaagtagaaaagctgtccgaattcaagttctgaagtagataaccgttgagaaaatgttatatttagacattttcagaccaaagtcaagttctgatgtagatttagagaacacaatgtcttaaatttgagataagataaaagagctaactagggaacacatgtctaaaaataacaagtggaaatccaacggttgattacagaagaaacagaaagggaactagagtttacaacacacaaagaccaaacacaagccaacggttcaaatgaaaaaggagcaccgatagaagatggtctgcatcctacaagaacactgaattaagaaaaaaaagattaattattcattaattgattcgtctccagatctgacccgaatccgtttcaatcctcgactcggccggtgatatcagacgcaagtcgagaagcaatggcggagtgatacattacgtcatggaacgtggaagcttctgcggttttcctcctcaactgcttagctttctcctccgtaaaacaaccgcgacgaaacttttgacccgacccggaaatatcggttttatccggattcacggtggagcatgagctttcgatgttgaggtaatctggatcggagggtaaaccgaagagaggagcccaccaagcagcagatttcttacggttttgatccgggttaagggatccggatccggaagatgctcggatcgtgggtagagcggagcaggtgataatcaaagccattgaaagtgaaaatgtagatagaaaagtaacgtgaagatttagggatttaaaggaagaagattgatgagagaatgagatagattttagggtcaaatttatatgattaacaaattgaaagtggatatggttcgttggatatgtaatcaacgtacaagctttttactgaattttgcttgtgtagggagatttaaaggtggacacgcatgcattggattgttaacctagggagatagataagtctacacgcttttttttctttgtcagattgcaatgtcttgatatgcactttctccgaaatacaattattttaaacgtgaaagagccatttgatttatgcaatttgcatacaaaacaatgatattttagaatg

SEQ ID NO: 31577 - DNA, 3003 bp, Unknown
  misc_feature (1)..( 3003): 2750-1469P.txt file - cDNA_ID_3043697; gDNA_ID_1971898; Annot_ID_176901
aacacagagatacaaaagcttatgcctataaagacaaaacaggattaaagtatttcagtagataattccaattcttttagcctaccatcttacaaaaccccagttgaccaaatcgagaatctatatggagagagtaaataggttgaacgaacctctgagaaggcgcatgctcggacaatatgcttgtgctcaaaagaatgcagcacatcccctgttaacgcatcccaaagtttgctgaacaaaacaagataacaaaaaattggataaatgtgctgtatctaagaacataaaacatacgcaaataatgacttaatgaaccaaaaaaaattaaacacatacgctgaaaaatcggcagaagcagatgcagcacgtaatgcattgttatccagacaagaactccaaactgcacctttatgcccttcaaatgtaccaatccagtctccagtttccccatttctcaacattggatgcgaatctaaaccatcaagacatgagtattctcaaaactctatgaactacgaaataagtattactcagagaaaactcaaagacttttgtaagttctcaattcgatcaacatgaatttttgcacagttctagtaactaaattgaccaaaaaaatccaaacttttgtaagaaaccaaaagtattatcacctttgctagcgctgatgaggaagaaaccgtcaggagtaattggactgtagaacaaatcaacaacaggtcttgaatggccatgacacacttgtggaatcgtcaccttcttcttctccatctatcctaaaccctaattaagcgactctttgaaattaaaggaaagggttttcgatttcaaacgattcaaggtagactcagagtagctgaaaatctaattttttttgtagtaatttctacagaaatattgggagaaacaatcccgaatctataaaagttcgatcgatctacagttaattagagaaaccagtagcttacagtggaatgctgattcctgggaattctacagaaccaaagatgaattgaaagtataaaagttaaaaaaaaaaggggacaatttgtagaggaaagcgtaggaattgggtggtttttatttgtacaagccccgtatgcaaaacagtagcaagttttagggatttctacatctagacgggaaggagaagacctttatttgtattttttaatttagttcctatacgtttcatatgttgcaataagcgaccctatattttcgtaattgacaaaacaattcacaataccatttgtaaataatttatttagaaaaaaaaatcgtaaatcagtagtgtattttactgtacgttttttttttgtcagcatgattttgaaaataaagtaaaacaaagtatgattcttaaataaataaattaaaatttcgtttggtggtttaatgttttgttttttaaagtttataatgttatattcaataattggccaaatcccaaattggcccagggcttttactaaaggaaaatcggaaaggcattgccgtcaccggaggagcgcatctgatactggtgactaccggaggcagagaaccagtttggaggtttaatgttttaacatctaatttgaggtttgattctagaaaatgtgaattgtggagagaaaaacttacaagaatgaataatagatcacagacactttacattttgtggttcttcattgaacattataaaaagatcttaatagagaggaaagatgtatcaccactacattgaaacaacgagacgactatattaaaagattcgacacaaccaaattcacgatcatcgttaagaataagatctggagtggttttaattagtgttggcttttcagtgagaaatgtcacaaaatattatagttcgtctatgtggaatttgtaaaacaagaccgaattcaagttgtgaagtagaaaagctgtccgaattcaagttctgaagtagataaccgttgagaaaatgttatatttagacattttcagaccaaagtcaagttctgatgtagatttagagaacacaatgtcttaaatttgagataagataaaagagctaactagggaacacatgtctaaaaataacaagtggaaatccaacggttgattacagaagaaacagaaagggaactagagtttacaacacacaaagaccaaacacaagccaacggttcaaatgaaaaaggagcaccgatagaagatggtctgcatcctacaagaacactgaattaagaaaaaaaagattaattattcattaattgattcgtctccagatctgacccgaatccgtttcaatcctcgactcggccggtgatatcagacgcaagtcgagaagcaatggcggagtgatacattacgtcatggaacgtggaagcttctgcggttttcctcctcaactgcttagctttctcctccgtaaaacaaccgcgacgaaacttttgacccgacccggaaatatcggttttatccggattcacggtggagcatgagctttcgatgttgaggtaatctggatcggagggtaaaccgaagagaggagcccaccaagcagcagatttcttacggttttgatccgggttaagggatccggatccggaagatgctcggatcgtgggtagagcggagcaggtgataatcaaagccattgaaagtgaaaatgtagatagaaaagtaacgtgaagatttagggatttaaaggaagaagattgatgagagaatgagatagattttagggtcaaatttatatgattaacaaattgaaagtggatatggttcgttggatatgtaatcaacgtacaagctttttactgaattttgcttgtgtagggagatttaaaggtggacacgcatgcattggattgttaacctagggagatagataagtctacacgcttttttttctttgtcagattgcaatgtcttgatatgcactttctccgaaatacaattattttaaacgtgaaagagccatttgatttatgcaatttgcatacaaaacaatgatattttagaatg

SEQ ID NO: 31578 - DNA, 3003 bp, Unknown
  misc_feature (1)..( 3003): 2750-1469P.txt file - cDNA_ID_3043733; gDNA_ID_2936560; Annot_ID_194391
cactgtaataccaatacttttctataaggaatcaaatctataaatagcatactaactagcactataaaaacattatgaatcctcctatgagcaaatcacttttaaatttgttaacactcttttaaaagaacaaaaaaagcaaaaaaaaaataaagatattatcaccatggctaacgcaagaagtttggtcgccaaggcaaacaatattaacgtaggttcattgattctaatggccttggtgtttggttcttgcgtggctaatggtgaatatctcggcggccgccgtggtctcgctgctaattccggtaaccccacggtctatgatattactaagtttggagccgtaggagatggttccaccaatacttttaaggtaaagtttagtttcattttcgatccataacctttttgagtattttatagtaaaatgcatgtgacattctaacgattgatccaataacattcatgcaggcgtttttgaacacatggatacaagtgtgtgacagtccagtaccagcaacgctactagttcctaagggaacatttttggctggtccagtcattttcgccggtccatgcaagagcaaagtgaccgtcaatgttataggcacaatcatcgctacgaccagcgggtacgcaactcccgagtggttcttgttcgagcgtgttgacaatctcgtcctcaccggaaccggcacattccacgggaaaggtgaagctgtctggaaagcagatggttgtggtaaaaaggtccaatgcaatcttcctccaacggtaagaccaaataactatatattatttcaaatcatgtatatatagatacttgcaataactaatcacacatttgtacgcatacatgcagtctctcaaattcaggaacatgaaaaatgttgaaatcaatggcataagctcggtgaacgcaaaggccttccacatgttcttagtcaaaactgagaatgttaacatccaaaacattaagcttaccgcaccagctgaaagccccaacaccgatggtatccatttgagcaatgcagacaacgttagcatcctcgacagtaccatagcgactggagacgattgtgtttcagtcggtcgtggctccaacaacgtaaccgtcgaacgtgtgatttgtggtccaggacacggtctaagtgtcggtagtcttggtaagtacaagaacgaggaagacgttagcggaatccacgttaacaactgcacgatgattgagaccgacaatggtcttaggatcaagacatggggtgggtcagacccaagcaaggctgtggacattaagtttgaaaacatcatcatgcagagtgtcaagaacccaatcatcattgatcaaaactacggttcaagaggcggagtaagtatatacatcactgaaaatgtctcaaaccaactattcttttgaatatatgcgttaacaattccttttttttggcatgttttgtaggattcacaagttgctataagtgatattttgttcaagaacattagaggaacaacaattacaaaagatgttgttcagattatgtgtagcaaatcggtgccgtgccaaggagtaaacgttgttgacgtgaacttggactatgtaggcaagacaggaggagagaagaagtcgtcatcaggcggtttggtcggagctctttgcgataacgccaatgttatcttcggtggaaaacttagtttccctatgtgtcccaaataagctttttggtataaataatttaatattaaaaaaaaaaatcaaaagtttcacaaacattgttttgtttgtgagttagtttgggaatttatcaacaagaaataatcagtggaatatttgacttttgataatgttttttttcccgattttttttgattttttttttggttttatgtataaataaacagatccttcagctggttgcttaatagtttctggttagaaaatttggtctgtgggtattagtgtgtacaatcattttattgctctatctaaagtcatcgatttctttctttctaagtggcaaaatatctctttcataaaaaaaaaaggaaagaataataaataaaaatatctctttcattctaacttggcattaaaatttagcaaaaactatttgtggaacttgaaaaaaatattactagctcagacttaaacttaaatagtaacaagcatattaaaagtcatgctaactgagatattgatttcctcatctcaagaaactatcttatgaatctgtttccgattattttagtttcccatcaatcatctttaatttctaggaagtttgattttttgaaaatttctccacctgcttaaatttcattacaatttttaatcttagataaacaactgtaatttatgcaaaatgaactgattatataagtcgttatgaatatttatattttttaaaaacatttcagcaaaactgatatactttttttttttttttttttgcaagcaaataaacaaacttccttgaataaaacgtgaaaaataataagagtctttaaagataaacgttgttcatatacattacgtcatataatatatataacaattaagacaatacaaacatatatacaattctcattgggttgaaacattataaagataagataaacatctgtatatatacattggtatacaatatttttcataaatttttttttctctaatcgacagttatatatatacagaaccataatttttaaagcatgctttccaaagcggtttttttttttttttttttttttgtaaaccaaagccgtgtttctaaacctcaatttataaatttggtgtagcttttcaaccttgatgaaattattacatagaatcattcgttaaaagacttataattgggtttagaaaagcccattttaaatttaaagcccaatatactgctcgaaaaggaggaaaccctagaaacattgtggtatataaattcttttcgtctcgttcgctaatcagttctccgccacaccaatctccagaaaaggggagaagcaaaaatg

SEQ ID NO: 31579 - DNA, 3003 bp, Unknown
  misc_feature (1)..( 3003): 2750-1469P.txt file - cDNA_ID_3043733; gDNA_ID_1971906; Annot_ID_177006
cactgtaataccaatacttttctataaggaatcaaatctataaatagcatactaactagcactataaaaacattatgaatcctcctatgagcaaatcacttttaaatttgttaacactcttttaaaagaacaaaaaaagcaaaaaaaaaataaagatattatcaccatggctaacgcaagaagtttggtcgccaaggcaaacaatattaacgtaggttcattgattctaatggccttggtgtttggttcttgcgtggctaatggtgaatatctcggcggccgccgtggtctcgctgctaattccggtaaccccacggtctatgatattactaagtttggagccgtaggagatggttccaccaatacttttaaggtaaagtttagtttcattttcgatccataacctttttgagtattttatagtaaaatgcatgtgacattctaacgattgatccaataacattcatgcaggcgtttttgaacacatggatacaagtgtgtgacagtccagtaccagcaacgctactagttcctaagggaacatttttggctggtccagtcattttcgccggtccatgcaagagcaaagtgaccgtcaatgttataggcacaatcatcgctacgaccagcgggtacgcaactcccgagtggttcttgttcgagcgtgttgacaatctcgtcctcaccggaaccggcacattccacgggaaaggtgaagctgtctggaaagcagatggttgtggtaaaaaggtccaatgcaatcttcctccaacggtaagaccaaataactatatattatttcaaatcatgtatatatagatacttgcaataactaatcacacatttgtacgcatacatgcagtctctcaaattcaggaacatgaaaaatgttgaaatcaatggcataagctcggtgaacgcaaaggccttccacatgttcttagtcaaaactgagaatgttaacatccaaaacattaagcttaccgcaccagctgaaagccccaacaccgatggtatccatttgagcaatgcagacaacgttagcatcctcgacagtaccatagcgactggagacgattgtgtttcagtcggtcgtggctccaacaacgtaaccgtcgaacgtgtgatttgtggtccaggacacggtctaagtgtcggtagtcttggtaagtacaagaacgaggaagacgttagcggaatccacgttaacaactgcacgatgattgagaccgacaatggtcttaggatcaagacatggggtgggtcagacccaagcaaggctgtggacattaagtttgaaaacatcatcatgcagagtgtcaagaacccaatcatcattgatcaaaactacggttcaagaggcggagtaagtatatacatcactgaaaatgtctcaaaccaactattcttttgaatatatgcgttaacaattccttttttttggcatgttttgtaggattcacaagttgctataagtgatattttgttcaagaacattagaggaacaacaattacaaaagatgttgttcagattatgtgtagcaaatcggtgccgtgccaaggagtaaacgttgttgacgtgaacttggactatgtaggcaagacaggaggagagaagaagtcgtcatcaggcggtttggtcggagctctttgcgataacgccaatgttatcttcggtggaaaacttagtttccctatgtgtcccaaataagctttttggtataaataatttaatattaaaaaaaaaaatcaaaagtttcacaaacattgttttgtttgtgagttagtttgggaatttatcaacaagaaataatcagtggaatatttgacttttgataatgttttttttcccgattttttttgattttttttttggttttatgtataaataaacagatccttcagctggttgcttaatagtttctggttagaaaatttggtctgtgggtattagtgtgtacaatcattttattgctctatctaaagtcatcgatttctttctttctaagtggcaaaatatctctttcataaaaaaaaaaggaaagaataataaataaaaatatctctttcattctaacttggcattaaaatttagcaaaaactatttgtggaacttgaaaaaaatattactagctcagacttaaacttaaatagtaacaagcatattaaaagtcatgctaactgagatattgatttcctcatctcaagaaactatcttatgaatctgtttccgattattttagtttcccatcaatcatctttaatttctaggaagtttgattttttgaaaatttctccacctgcttaaatttcattacaatttttaatcttagataaacaactgtaatttatgcaaaatgaactgattatataagtcgttatgaatatttatattttttaaaaacatttcagcaaaactgatatactttttttttttttttttttgcaagcaaataaacaaacttccttgaataaaacgtgaaaaataataagagtctttaaagataaacgttgttcatatacattacgtcatataatatatataacaattaagacaatacaaacatatatacaattctcattgggttgaaacattataaagataagataaacatctgtatatatacattggtatacaatatttttcataaatttttttttctctaatcgacagttatatatatacagaaccataatttttaaagcatgctttccaatgcgttttttttttttttttttttttttgtaaaccaaagccgtgtttctaaacctcaatttataaatttggtgtagcttttcaaccttgatgaaattattacatagaatcattcgttaaaagacttataattgggtttagaaaagcccattttaaatttaaagcccaatatactgctcgaaaaggaggaaaccctagaaacattgtggtatataaattcttttcgtctcgttcgctaatcagttctccgccacaccaatctccagaaaaggggagaagcaaaaatg

SEQ ID NO: 31580 - DNA, 3000 bp, Unknown; identical to SEQ ID NO: 8856
  misc_feature (1)..( 3000): 2750-1469P.txt file - cDNA_ID_3043737; gDNA_ID_1971906; Annot_ID_176995

SEQ ID NO: 31581 - DNA, 3003 bp, Unknown
  misc_feature (1)..( 3003): 2750-1469P.txt file - cDNA_ID_3043744; gDNA_ID_1971906; Annot_ID_176992
gtttccttatgtctttgttaatggttcttggcaggtccttagcaaaaatcagctagtctgccctgacattgaaatcttgtgcatcaaagatcaaacccttccttctgatagtgggcatctttaacttttccttctttctttctttctttcttgagcatctggttatttgtctaatcgaaaaccatatgattaataggtgtggagaaagtggttggctttgctttcaatcaccatcttatgaactgctcagaacctacagtcaaggacaacaagcttatcatctcggcagaaaggtgagctgaaaatattgatcatgtggattcggagtgtgatattttcttgcgaataactgtttggtgtgtgttgcagcatcacatatggcctgcagctgttgcatgagattcaaaacgaaaacaagagcacaaagaaatctctgaaagtaattatatagaaatcttatgctattttgactccaaattaacttctggattttaacaattattatgctatattatttcaggatgttgttacagagaatgaattcgagaaaaaactactatcagacgtcattcctccaagtgatatcggtgtttctttcagtgatattggggctttggaaaatgtgaaagataccttgaaggagttggtgatgcttcctcttcaaagacccgaattgtttggcaaaggtcaacttacaaaggtacctttcttgctttttaaaatcaaatcgttgtttcattcaatattctatggaaactgaattataactgttttttttttcatgcagcctacaaagggtatactattgtttggaccgcctggtacggggaagacaatgctggcaaaagctgtagcaaccgaggctggggcaaactttatcaatatttcaatgtccagcattacttcaaaggtattgatcacttaaaacggttacctgactctatagtgttttctttgagattagacttgacttgagatttcgtgtagtggtttggtgagggagagaagtacgttaaagctgttttctctttagcaagtaagatagctccaagcgtcatttttgttgatgaggtatgttgctagacgttaagaacagctctcatacctgtttattacagttcctttttctttctgaatatcttttgaacgggatcaaaattatgtaggttgatagcatgctgggaagacgtgagaatccaggagaacatgaagctatgcgtaagatgaagaacgaattcatgataaactgggacggcttacgcacaaaggataaagaaagggttttagtattggctgctaccaacagaccatttgaccttgacgaagcagtaattagacggcttccccgaaggtaatgaatgataaactgtcaattattctctgatttctgtatctttgtcatctttgaagcgttgcttaagagaagatcttctgtgcaggttgatggttaatctgccggattcagcaaacagatcgaagatcttgagcgtgattttggcgaaagaagagatggcagaagacgtagacttagaagcaatagcaaatatgacagatgggtactcagggagtgacttaaaggtctgtaacttcctccatccaaagcacaaactgaaaacccatttcataaaaatccacattctaatcaaattgtctggtttgcagaatctttgcgtgaccgcggcacatcttcctatccgagagattcttgaaaaagaaaagaaggtttgtctctgttttaaaaatcataataatggttatgattgtggtttttgaaaccatggttttgttgactcgcaggagagaagtgtggctcaagccgaaaaccgagcaatgccacagctatatagcagtacagacgttagacccttgaacatgaatgatttcaaaaccgcacatgatcaggtttgagaaactgaaacatacaaattagtttcaccatttggtctagttttgggatataacggagtgtttttttttattattgttggaaggtatgtgcgagtgtggcgtctgattcatcgaacatgaatgagctccagcaatggaacgagctctatggagaaggaggctcgaggaagaagacatcactgagttacttcatgtaaagagaaaacagagaggttgtgttttgttagtttatatatatatatatatatatatataaatctctctctaatttatatgttgtacagagagattgagagagaagagagtcagtcccctcttgaattgtctaaaaaatgttttgctcggagctgcctcaattcttttctttctttctccaaaaaaatattctaatatcagatgtacaatcaatttaaatgcttgatgtgatatgttactatatatatatatataatgtatataaagtttagatatttttatactcctaattttatttactttcttctttagtttttggtggtgaaattcattattgtttttataaaatgtcttcaactggatactaatggttgattaataggttgagcgaaacagacagatctgaaatcaacggtccacgcaggaataaattctattttaaacttaaatattttgtgatattttgaagtcttttacaattgaaaatattttgtaataccatctctaaatctccctcttttgatctccaagtcctccatggttttagggcttttgctttgccgattgatacctaggctctgatttgatttttcctttagaaaactttcaaaaagtttcagtagattggcttaattggctctgttggtccttgtaaagaggataccttttcgtggttggaaaaaaagtcacgttttggcgaaacgctagtttaatgagatagagacgtggccatctttgaaaagtcaacgtttggtcgcaatcggtgacgtacactgtctatatttaatttttcagcaaccacagtgatttattgaatgaatcaatacataacaacaaaattatcagaaacacaattccttcttcttcttcttcttcttcttgtctccgatgtcagccatg

SEQ ID NO: 31582 - DNA, 3003 bp, Unknown
  misc_feature (1)..( 3003): 2750-1469P.txt file - cDNA_ID_3043748; gDNA_ID_1971906; Annot_ID_176991
cactcccaacaattctccaattaataataattaactaatttgcataatcattttttttcatttcactgtcaagtggcatttctgttaataccgaaataacacaagtaaaatttcgaaactataatgtaagttcaaaaaattctattgtaactacagaaatcaaaaattctaaacagaagctcgttaaattttcaaaattttaatataacaaagagaaaatgttactagtattcgaatcaacaagttattgtcatgctatgtctcatattcttctaaataaatactgaaacttttaataaaaacacaaaatagaatttgaaaaacaaaacaaaaaaagagaaaaaaaaatcttcaacaactacaaaattaaaaaatcgagtccacgcactcaccatgtatatataaacattaacttaagcaataataaccaaacaaaagaacccaaagaaaggcaagaaaatggacaagtcctttactctgttcttaactcttacgattctcgtcgtcttcatcatctcttcacctccggtccaagccggcttcgccaacgacctcggtggtgtagcatgggctacgactggagacaatggttcaggctgccacggttcaatagcagagtgtatcggggcggaggaagaagaaatggactcagagatcaatagaagaatattggcgaccacaaaatacataagctatcagtctttgaaacggaacagtgtgccttgttcaagaagaggtgcgtcttattacaattgtcagaacggagctcaggctaatccttatagtcgtggttgcagcaaaattgctcgttgcaggagttagacctacaaacaagaaagctatcttcttgatcttgacttatgttttctttgatccatcaagcgttttcattttaattaaatctttaaatattcatcatgtctctgcacaatagtaaagacctatgttttgatcaaattgggttgatttgtaatattttatgtgaataatcatggtcttaatgatccatgaagttgtttggtttttaattattacaaagagacgagtattcaaagagttattacctacgtttgatcaaaccgggtttggtttgtacctcagccgctttcacagtcggattgaataaccggtctcaagttgcaacacacaagtgaccaactctcaacctaacccttaccaactctcggcgcgtttacgggaattagtttgttttgaaaattaatattttatatatattggtcgatttgaaccaaaccggatcgtaagaaattggttttatccatgataccactttttctcttcgaagggtttgagaaactgaaacatgggcttggaaacatagaaggaaattcactacaaaacaaaacatacttgaattagtaacaaaaagcgtgaaacatgcagacattattataacaaactaacatttttggttcttgtctaatcaattaggggttgtctcaataaaacatgtcgcccatcagcttgacaacatggttctaacacggtttcttttaggttaaattggccaagttgctaatcaggagaacactatcttaataattaaatcaagtagttgaaccatccgtaacaacatcaattttataaatcattttcatgtaatttgcaaaattttatagttaaaacttaaaaacgttccatcgttgaaagaaaatagaggtactacaaataacaataatataggtagaagatccatgataatggatttttgattttttttggtttgttaaaaggtattcattaatcatggcaaaaattcgcaacatgtttgcttgcatacgctagaaaagaaagaacatgatgagttacaattttttttaatcttctccctagctatcccaaatatccgaaaataaagaagaagataatattcaggattgagtttctctttttataaacaatagaaaacatcttcttctttggttgatccttatcccaaaaaatgattggccacaaaattttgaaatattttcttatacattttccattccaccattaaatgtctcgtctttctctttttccctctttcaataagtgatggatttgaaccaaccgacttaaaatgggccggtcttaaagccgcaccacactaatgggcctttacctatttacaatttttctgtctattgaacagtagacttactgctcatataattggcgggatcaatacacgtgcttaatactagaacattcggttcgttcctaactgcaaacgagtttggtaatttagttaccccataattatcaccacagttgaccttagttttaagtttgaaattcatctaaaacaccatatatttgaatacattacaaatacaatgaaacatatgacacacttgtgtgatggtttagataaaatacgtattgaaatagctgtaagaatgttacttgaaatgcaataaaacgcatgtcaagttgtcaacatgtaaacccaacaaattaaacgattaaaaaaatcagccacaaaaacaggtagagcatgcagcaaaatattccaatgcttgggtctctatgttaagttctgtaattcgtctttattatatatatatttggcaaaatttaaatattgaccgttggatgtttttggttttaaatctgtaccaataagcgaatgagagaatctacttcttcaatataattccctcaaaatctacttgtgatcattttataatgctttggtcaaaagtgctgattttgtaattaattaatttttgtcgtttctaatacgagggtgaaatttgtttcttaaagtaaaaaaatggaaacttgttaaatgttttagaaatatgacaaagaaaaaggaaaaaaaaaaaaaaaaaagagtggagatacgaacttttatataagaagaagagaaagttgcagcacttgtctgaatattattatttaagataaaaccgacttttgcagtgaaaatctcttctttgaatcaagcggcggagacggcggcggtgaagaagaagaattagagagagagatatg

SEQ ID NO: 31583 - DNA, 3003 bp, Unknown
  misc_feature (1)..( 3003): 2750-1469P.txt file - cDNA_ID_3043752; gDNA_ID_1971906; Annot_ID_176985
ctcctgagaagttgtctttgagaaagaacttggcaacttctgatttgccgaattgattgttgttggcttgagtagttttttttgaggagctatagggaatttgattgtggtttgaccatagttggcttcaatattgtagagaggattactacttcaaacaaagctcgaaaaactcataggtacatataatatatccattttgcggtcaagccttttctacgactatttaacttcagtcaagtttcacaaagagcttctgtgttgtttccaggttgtggtgagctaaattatgctagggaaaccggtgatgtaactctggaagcaactgtgagtctttttcgttgcaaattcttttgtgcagcttcttttttggaggaatattggaatcaaatggtgatgagagaaatttcctttttagctacggaagatatcatcctctcttgaagatgtggtcgaagttcctgactcccccgaggagagttatatttcttcttccagaagaactggattagcatgcatatctgctcaggaaaatgggtcagatgatgaggttaccttctaatcttggagtccatttcactcatgcatcttgataagttcttcaaattggtgacagtatcctctacttatgttttgaatggtgattgttgttgccttcagattacacatgatgaacaagtggcaacttggtctgctataagtaaagaaaccaagtcactaatccatttgaatggtgttgcttcagtcgcatcatcccatctatctggcttcagagccaagaaaagtagtaatggtactgttttatccaaaactcttcttggtatttttttaccgtacaagttaaagaacgttgcaccacgtatgaaaactcaaagaaacagatcatgtatgcacgattttctgaaatctctgagttgggtttctaatgtatatgcaggtctcaaagatcatgggaggccaaaattttcatttaactcacatactcatggagaaacgtcatccaagataagtgacatggctgaaatctttgagcctgatgtggaggatcaggctatagaagaggatccaattattgaatgccccaacagttttgatgaaagatcagaaaacaggcagggtgtttctgttgctgagtcgagagaagttttgcacgagtgcactaaagatgcggtacccaagcttcaagaaattcctctagataaaattagactgataaaaagaagctctgaactggtattattgattatacagtggattagcatttgatttgctgctttgctctcagacatctgtttcattcgtttggcctcctttctgctccaggacagcagacatgaagcaaaaagtcggaaatttactcataagggaaattcatctaacttccaagatagtgatactgatgatgaacttcctggacctatggatagtggatcatcaagcgatgatgaggttttattcttttcctttcttgtgatttgggtaatctccttctcctcagtttacagtcaaattcaaattatattgttctgtgacatagcctagttatcaaagctcagtgccaaacatttccaaccagaagaaacaatttgttggggaccggtttgatgaagcaataaaagcttcctctttgagcaaagaaggtctcttgttcggttcacctaaattatctgggtaatcaaactctcaacatcttttatgcaccacactcttaaaatcacacatcagttaacatgaaaacccatttttggttgcatcaatttgcagtggctctagcctgtatggcaagctgcaacagatcatgaaacaagaaaaagagacggaaatggaaatcatgaggaaattgcaaagcggaatcggagaagcaggtaactctttttgtaactcccatataaacaaaatctagttcatacctctgttactcgttccaatttcccaactcagattcatcgggctatgttgatgttaaagtcatgtcaagacacttggagggaaagcttgtcgtctgcaaatgctctgtcattgacctctctggggtttatctctccatctctttgacgcatctgataaacctgctcctttaattagacccttaagcaattgatttagtcacattcgattttgtaggactccctattactcaagaacacacaagctcttgcggcaaaagaaacagaaacaacaattatttttagtccgaaagtttgtgcggatgttgatatcgaaatagggaactttatccgagtatatgcgccatggtcagttttgattccactctttagactcttatcccatgtcactaaactcttttgtgatatttagcttttcaattttcaacaggaaggagttggaagtgcagaaaaccaatgatgtgattattttgtcttcatatttctcaagtttgtaatataactcacacaaatgtcaagatgtggaaaaaacttgcaaatgattttatcagtgtgtataaaaacgataattaaagctctctgattgataacaatcatactgatcagagcttaaagtgttttttgatttatcgtgttttcttctttgggtttactactgattaaaggcgttaatcagttctcacaaatgattcaactcgttttagttatttatacatgaactgtttgttggtttgattcctgtcgtgtgctttggtaaacctcaaagtaaagcataatcatagtattcgtcttgtttattaattagcacttaaaataatggaacaaaaaggataataaaagaaccagaaaggataaataatgaaataaaacggtagatccctagtttacattgtatcattggaacaattcatctctcaatacacaagaaaggtggactctttacgtggatgtcaaggaaaaacaaaatgttcctcagcttttgtattgcaaagaaaaagcatataactaagttggtatatataatagggtttatggaggatacatgcagaaattaaacaagtgtatctatatcgtatatatggactgcttacagatg

SEQ ID NO: 31584 - DNA, 3003 bp, Unknown
  misc_feature (1)..( 3003): 2750-1469P.txt file - cDNA_ID_3043756; gDNA_ID_1971906; Annot_ID_176984
atataagggaaaccatctcaaatctaaagtcagatcttgaaatcgtaatactaactaatcccaaaattcaactacctagaagataacgatagatctcgaattagatatacacagctaagaaatgccagagttaacgaagatttaccagaagaagtcttggctaagaataaagtccttctctccgcaattggcatctgaatcagcggaacccaactgatttcggagttccgaagaatccgaatccaggagaccctgaaacgccgatgaagcaacattcgacgacggacgattttcgaaagaaatcttcgacaattgaccgaattgaagcagagagtgacgctccaatgtcccttccatcttccgaatcttcttcgatgccctggttttgattgtcccttgggttttcctcttcgccaacagtgttcttccgttcttctcgaacatgacgatgaatattattactttgggtggtgattcaactaaggaaaaataattgaaataaattaataaattcaaaatttgcgcgctctcgtcttttagagtttcgagctaaaatttgggaatagtcatctgcatgactgactacggtgcacttcctatataatcaattctggaccgttcaatcttcaggattgaaatattttgctacagataaagtaaaggtgcagcggatcttctgtagagcgtatcatgtacgctttgatgggtctttaataaataatatttttttctataatagcactagcattttttttgttacgattcactaatttaaatattcaactttcttaagaaatataatattttttgttacgattcactaattaaaattttgaattagtattttttgttaattaatttaacaatttgtatttttattggtcaaacaactaaaaagtttctcatttttttttttccaaacatgaattaactctccttaatccttataactaaagaccagtaatttgtactagaatgtgaaattaaggaattgccagattaatgtttgattaattctaaaatgtgggatataaaacatgggaattgggcctattaaagcccaattactaatactaaaagaaagtaaactcagagaagggcccatatccaagcatactaacggcaaggacggtataaaggtgcacgccggcgagatcgatttgaacggtgacggcgaatgtgacggcgaagaaaccttccggtgactgttctacatctctgagaattgtttgcttttgcgatttcttttattgttggattaatttgattttgagttttgcttttgttcttgttggattttcaggggaatccagattccgatcagagcatctctggtgagaactgatgattgcttttatcatctgaaatttcgattttagatcttagtgtttaggtcgctcattgtctaacaagtgattcgcaagctgttgtttggtcttttagaggaggaggaagagatcatcaatgttagtttgggagaaaatgatatgtggccaagcgagaatgcaaaggaagaagaggtaatgtttaatctcaacttgagcttgcataaagctctctgggaactcctgagaatttgtctttgagaaagaacatgggaacttttgattttgcccaattcctgattgttgttggcttgactagttttgaggagctatagggtgaatttgattgtggtttgaccatagttggcttgaatattgtagggaggattaatacttcaaacaaagctcgaaaaactcataggtatatattttgcgatcaagccttttctatgactatcttaacttcagtcaggtttcccgtaccttcttgcagttcatagattaactgattaaggaaagtgttttcataaggagcttatgtgttgttttcaggttgtggtgcgctaaattatgctagggatcccggtgatgtaacggtggaagcaactgtgagtcgttttcgttttcaaattcttttgcgcagcttcttgttctgaggaatattggaatcaaatggtgatgagagaaatttcctttttagctacggaagatatcagaataactaaaccagaattgtgttacagatacttacaagtactgatttgatgccgaagatttaccagaattgtgttacaggaaatgccgaagatttaccagaagaagtcttggctaagaataaagtccttatctccgcaattggcacctgaatcagcggagcccaactgattccggagctccgacgagtccgaatcgagaagaccctgaaactccgatgaagcaacattcgacgatggacgattctcaaaagaaagcttcgaaaattgaccgaattgaagcagaatagtgtcgctccaatgtcccttccatctttcgaatcttcttcgttcttctcggttgatggttcctagggttttcctcttagccaacagtgttctttcgttcttcaaaatttgatggaaagtaaagacaataaataaatatattcaaaatttgcgcgctctagtcttttctcgtttcgagcttgggaataatcagctgtatcaatgactacggtggatttcctatttaaccgttagatgaaaggatagtaatattttgttacagataaagtagaggtgcagtggatcttctggaaggcgtgtcatgtaatttaataaataatactaaaattaaaattaaaattttaatatttatttaaagttaaattattttctgttttatagtataattttaatcattttatacataatacaaatttttacttgttattatggatagatacatcaattttagaaaattaaattaaagtatttataattttttaattcttttattggttttaaaagttaaaaaaaattaaactaaaagaaatattgataaacaagttattcttattgtcaaccttcttgagactcaaaattattcggacagcgaaccttatacttgtttttttatatattctaacataaagaggatatgatatgaagagaaaatcggaaaaagtgttatagcgatgatg

SEQ ID NO: 31585 - DNA, 3003 bp, Unknown
  misc_feature (1)..( 3003): 2750-1469P.txt file - cDNA_ID_3043774; gDNA_ID_1971909; Annot_ID_177044
ggacagaataccaatcctgcacttgtacagagcaacactttcagtacaccttccactggctttgggaacacgttttcaagctcttcatccttaactacaagcatctccccctttggtcaaataacggttagtttttctgtaactaatttaaatgccagttcacttcagagttgatgtctctttcacttccgtttgagttatgtagggatttctaatatgagtttatttttgcagcctgctgttacgccctttcaatcagctcagccaactcaaccattaggtgcttttggtttcaacaactttggtcaaacccaaataggtatgtgaatcagtcaaaggcaccctgaatattatcatcttgaatactcgaagccaagtcttgtatgtttatgtttctgaagctaatacaactgacattgcaggtgcaatgggaacttttagccaaggaaactttaagcaacagtatggtctctctgacctcagtgtttccgactcttatttccgactagataccactagtttaattgtactttggaagttgcgtctctggagcttaattcttttctttttgttttgttttgttgacaggcctgcattgggtaactctgctgttatgcaaccaactcctgttacaaacccatttggaacacttcctgctttgcctcagatttcaattgctcaaggtggaaattcaccttcgattcagtatggtatctccagcatgcctgtaagtttttctgcctttttcaacacccacacacaccaccctttttcttcataacttctttccaaatttgaagcaaataaaatatagatattctcaaagatacaatgttacagaaacaaatgactactccatgttattaccctgaatattttcctttcttctcaggtcgttgataagcctgctcctgttagagtatcaccactcctaacttctcgacaccttttacaaaggcgggtcaggctaccaacaagaaagtaccgtcctagtgatgatggtccaaaggtatgtttttctattttctgaattttggctttgtcttgaatatttcagtctttagtgatgtttactgaaggtctttctacctgtttgtttcaccaatgtttgtccaggttccattcttcagcgatgaagaggagaattccagtacaccaaaggctgatgcgtttttcattccaagggagaaccctagagctttatttatacgcccagttgaaagggtaaaatcagaacatccaaaggatagcccgaccccactgcaggagaacggtaagcttcccttttttttttcattcattggcttatttattgcaagatttagagctttgtttcaattgcaaaaagaagcttttcattgtcccaatagctcggaagatgatctgcttgcatattaatatagtggctgaatttgatcatatctgaccccttattacatttgaaattcaggtaagaggtcgaatggggttactaatggagccaaccatgagagtgagtattttaaatatgcatttgtaacaaaattgtgattaaagtttgtgcattggtgaggccattcactgactctactgttaatatgtgcagctaaggataacggtgcaattcgtgaagctcccccggtaaaagtcaatcagaaacagaacgggacacatgaaaatcacggaggcgacaaaaacggttcacacagttcaccaagtggagcagatattgagtcattaatgccgaagttgcatcactctgaatatttcacagagcctcggatccaagaactggctgcaaaagaaagggttgaacagggttattgcaagcgggtaaaggactttgttgttgggagacacggttacgggagcataaagtttctaggagagacggatgtgtgtagactcgacctggaaatggtggttcagttcaaaaaccgggaagtgaatgtgtacatggacgagagcaaaaaaccgccggtgggtcaaggattgaataagcctgcggtggtaactttgctgaacataaaatgtatggacaagaagaccggcacgcaagtgatggaaggcgagagattggacaagtacaaggaaatgctcaagaggaaagctggggaacaaggagctcagtttgtgtcttatgatcctgtgaatggcgagtggactttcaaggtcgaacatttcagttcctacaagcttggagatgaatatgatgtgtagaaaaggaccaaagtcgttgtcatatgtagactagtgtctcgattattttttattttttttaccttgtggggttttgtctattggtcttttgcaatataatgtcaaaatgatacgtcttttacctcattggctcaacctggaaaaattcaatattcattttgttgttttcgccaattaatataataatatctcactaagaagcagaaaaaaaaaatagagtcgtggaggacacaaaactggtctcaccagttgtttcgtggtttcttctaaagatattattagttcctaatttataaaaaattttgatgactttaatcacatcctaaaaagtaaataaaagaaagattataaactatttagagaattttttataattttattgattagcttttataattttgtaaaatttctcaaataatttttctattttaataatatttttcatgactttctatgactttattttgtgaaaaaaatgtagaaagttatgaaccaataacataataattcaaatcattaacaatcagaaattattatattttaattgaataacacaaaacttttactgattttataagagtatgaatctaataactccaaatttatgaagattttagattactttttacaaatcttatttgaataacataaactttaacatatttttaaaaagtcttgattgaatatcaacagattctacataacactttaaatcactaactttttttttgaaatcatatataaaccaataacaccccctaattgtatacctaaactaaaaataatttagacaaaacaaagatg

SEQ ID NO: 31586 - DNA, 3003 bp, Unknown
  misc_feature (1)..( 3003): 2750-1469P.txt file - cDNA_ID_3043803; gDNA_ID_1971909; Annot_ID_177043
agcttcctgttgttactaccaccccgactaagctcccatcaatccttgttgtaaatgttcaggtatattgtctagttccatggttaaactgttcctcttttgcatcgtctttggtgtttcggtttaatgatgatgttgctatcggaatcatagattccattgtatccagctgcaatttttcatggtgaaactgatggagaaggaatgaatttcgttttatactttaaactttcggataactatttaaaggagcttccaccacattttcaagaaagcattcaggtagtttaatcttccacgtcgtgattctgtttttttgtgctgtactcttgtgttgaaaacgcatttttgaatcgctttgtctttggatatatgcagagattactagatgatgaggttgagaaagttagaggctacactactgacacgaatgtaccctttagagaacggttaaagatattgggtcgtgttgcgaatgtagacgatcttcagttgaatggtgcagagaaaaaactcatgaatgcttataacgaaaaacctgtgctttcacgtccacagcacgagttctactcggtatgtcacaattatcataacaaatgcaaatcctattgaaacttgcaatataatgctgaactaacttaactttgaaatttgatcttgtagggtgaaaattactttgagattgatattgatatgcatagattcagttatatatcgcggaaaggatttgaagcatttttagacaggctaaagaactgtgttcttgatgttggactcacaattcaggtaatgtgtttcaatttgttacttctttgatgaatttttgggtctaattgctgtggttatttaactgtataatctcattttcaggggaataaaccggaggagttaccggagcagattttgtgttgcatccggttaaatgggattgattacatgaattatcatcagttagctcttagtcaagaagtcctatgatactaaacaaaagatatgacctttttttttgttgttgttctttatcttcttttcttttgttcctcaagaacacaaaatctaagagatacatcgttttgaagaagaagtcaataatggaagcatgagtatatacatgatacatcattccgaaacctgatcatttctcggagattgcctacgactctgtacagtggccaatattgctcatcataaatatcataattcaatgagaaatcaccaacaacagtaggatttaatgatgtcttcggaaaaccgttttctgatattataatgatgtatccgtaagaatatacatattttctctaaccaaatcatatcaaagctggtacgactataagtttcagtttgcttttactggttataaggggatggttttgacttttgagcaatgatcttgacccggggttttgagagaggagcaaggcaaagggctttcatatgtttcctctctagtctctacatgatgaacaaggcatttgggtttagacttcgtttaacctagtgtcgtcactaagtttctgttgtctctttataagttttagcttcttggttttggttttggcttttctatttgtgacttttgtccctctaactagttttggattcggtctctttcttttgggattagttttccaaagattttaccatattccgcatatcttttataattctcgtaacttagaaccaaattcacatcaaaaagaaccaaagattttgtctctctacctagttttggactagtctatattaaccgcgaacggaaatataatgtctaaaccaacctcactaaacccataaagtagcaggttgacaaatgtgcttaaaatttttcttctacaaataattgaaaaattaatcttcaaatattattatactaacaatttttaggtttaaaataactttagtatcactctttttgtaaatattataattcttctacattacattttttttaacacattaaatatccttatcaaatttgtaccttttgttttaacattaaatttttatttactcattttagaaaaagaaaaaaaatgttgtatttaatagaagaggataaaaattggaaaaaaagaagtaaaaaacagtaacaataaagaaacagaacagtgtttaaaaaaaaaaaagaacaaaaacaaattcacgtgggcgaaccgggaggaaatgaaccataattcgagtcggtccaatcaatcccatttcacaaaccgagctttggaaagacgctagattgacttattaaatacaacgcgagtcggtcgaaccgaataatcaatcctggttaacaaaccgagcgtcggagagacgctacactgacttgaatacaacgcagaaactcactgtttatatataaactcagcctcctcctccacttttcattctacgtacaaaaatactcttttaggctttttgattccggcgaggtctctgcttctttctcctccttctccgtcgtctccatatcgtgatacttcaggttacattcctcaaatcctcttttttgattctacgacgaacgacatcgctttccttaacagtttcggcgggtttatcacgcctgaatcctaatttttccaacatctgacgaacgagtacagaaatttctggttatttatcttgtgtgacattcgtgagacgtagtttagtttagttagattgatttccatcggattcatcataggtaatatttgttgaagtttatgtcatcgatttggttttgattttttgtactctgttttctaatttgatgattcctggttatgaaatacacaacttgtgatgttgccttgttcaatgtcgatcctatatacgactaattgtgttgttaattggtgtaaattggttcgttttggggttcttggtgtatatgattcatgatttggaacttgaaaagttccattacagtgtttgctaatgtacatgtttttttgttgttgtaccaggctagaagaaacaattcctttggctgagccgagagacgtgaatatatagacgaagatg

SEQ ID NO: 31587 - DNA, 3003 bp, Unknown
  misc_feature (1)..( 3003): 2750-1469P.txt file - cDNA_ID_3043807; gDNA_ID_1971909; Annot_ID_177042
atacgaatttgactttcacagtgtagaaataaatatatatttaaccagtaaaattagtttgcatattatacactcacgtaataagtttttttccattgacttcacaaattagtttgctcctcctacgaacatgtcatttgataatttcccgtaacaagtttttttttgttttatgattttttttgtcaaaaatctcaagcacatctaattatcaagatattgtctatttgtatagtttaataaaaagggcaagacaacaagtcgacgtgtgaaaacaacatcagacgctagtaaagatttgacgcgtgtaatttagatggccatactttgcctaacaaatgaaataaacaaatacaatatactagaaaatgatacatgataatactttttgttacctaaagtttctttgtaaagtatatataagttttatggttttatggttggaacgaagaagtcaaaagataatgaatgcactaatgcaccacatatacgtttgaagacactttttgacgcatgtttcagtcgaagtcaatcttttgcttctctagtctagaaataacttgtgtttattgtttaatgctcatctcttcacaaattatacttgttttgttgttgttaatacaaattatatatattttggacgatcgatgttaatttatgttaataaatattttctttgtagtaaattgtttagtaactcaccttcacccattttctaaccattgtcttggttcaagttccatatctacttacatataattgtactcttagggcgtgtttttttagtgtcgatgtaacacacattggtgacacaaaattcaaaggaaaaagagagtttaccttattttggactaatcggcagcttatttttttttttaccaaaacttgtatctccatcgagagtgtctttaaaaagccttcaagaatcggatcagagattgtagatctcgtaactagcattaacagattcgtttctcaaaaaattttggtaatgttttttttggctatcattgtatccaaaaacatagacacctaagttagagaatctttgaacaagagacggcgtttaatcctcatagtttgtcccaaatacatgttacacaccatgagcgtcttgcagctggtgttattcaagacgcaaagaatatatacataatcgatagtcatgtttctgaaaaaataagaaactaaaacataaatcgacaaatgttatgttttttgggtttttcttaattatatattttagtttaaattataaattgaaattgtttttctttttcttgggaataattttaaaaaataacaatcaaggttaattagtctttttacacaaatatctatatatacatttttgcagccattttgtgaaataaatcctgtagttgggacttatttacaatggctgccactgaattttaatgtttgtttttgataattaaaaaaaaatcttcgaaataaatatttgacatttaacaatcttccctaaatctctccacatcagttactaaaataaaactttcaaaatatttactatcatttaattacttcaaaattatcatttttgatattgcttttctccatgactataacaattcgattataatcatcaaatcgcagagatatttgatagcatttaattactacaaaattacaaaatatttagataataattcataaacatatcataaataagatcaacattaataaaataaatattttttttacgggacgggttggcgggacgggtttggcaggatgttacttaataacaattgtaaactataaaataaaaatattttatacatagatacaatttgcaaacttttatgtatactaacttcaaaaaataaattgtttccgcggtgtaccgcgagttaaaatctagtgagttagtatagttctagactgcgacgagagtcattttagttaattatgctaagatttaagtcataataggtaaatctcagtatatatatacgtgtatttttggataaactcttacctgtcgtaacgacacaaaaagaatacgcgccattaaatataaagatgtatatttcaaagaaattatatatatcttttttattgttaaaaagttatatgaaaaatgtattactataacattaaactaaacaaagaaactacaaaactacaaccgcgtattttaatgatcctaaatatttgttttgatattcaatattcagtgataattattgtatagttttcaattgtacatttgtgctgtcatcatatattcatttgatcaatatacatttttttaaaaaaaggaaaaatatattctgtgaactgaacaatctcttacctatactaaacaaatccaaattagattctaataactaaaagatattgatctttcacctacatgtcattaaaagaaaattatttgccatcctaatccacacaaataagcatatcgtatgtaatttactaattagagattagtacaaaacgttaaacaagataaaaccaaatgtgttgttgcttcaatcgtaaatctctaaaataagtgaccataattgctttttggacgatgccgttaactcaccgataactattgcaaaatttaacaacttgtcatttcataattacccaaaattttcattgacttcacatatctcaagaaaaatattttaaccaatcaaaaaattacttcttctttttttttttacttatttgtgaaaaaaagcttcttcttcaccaaacagtttgtctagttgtctgtgtctcatttaccatattttctctctaaatttttcccattactggatttgaagatcgtgtctggcagattttatctgattttctgatcagagagaagtaaaaggaaacaacttttttgttagctttctctctctacaagttttgggtttttaagagaaagagataaaggagacagctttctctctctgtctctctctaaaagttctgggtttagaaagagatctttcttatatgttgaatttgtgatcagaggtgagagagatg

SEQ ID NO: 31588 - DNA, 3000 bp, Unknown
  misc_feature (1)..( 3000): 2750-1469P.txt file - cDNA_ID_3043814; gDNA_ID_1971909; Annot_ID_177040
attccgtgacgtagacaattagttcattttcacataagttacgtattttccacgtgcataatatatttgtatgtgaaaatgaactacatggtgttaatagtgaatttgtaccgtaatgggttgctgatgggccacttttgcaaaatgggatgctatttgattatcgatcatgggatataagcgaaatacaactctgccaaccgggtcagccatattcaaagtcatccaacatgatttctagatttgcatcccttccttggatttagagaagatcattataagcattgcagtcacctgtcaccttccatgattatcagcatatcacaaacaagagaaacaccttcttcttctaaatcaatacttgcttgtttaagttttgaactagcaaagataatgatgcattttgttaagcaatgctgctcatgttgtgagctagattagctatagctgtcattatatttacaattaaccatcccaaaacttcttagcatcattgtaaggacgccgttaaagattgaatcatttaacgacttctaattggtctctatataaacaaacaaaaaacatgtcatagatgatagatgttaactatgattttcatatttctttcttgatcattactcggatgttaatcatcgagaatgtgttggagtgtatttgattcacatatagatgtacttatataatacaattatgtttactttaaatggaaactaattctttttcttaacaagaattgagaaattaaaaagataaagataaaagaaaaaacgttgttccgtcgcactttaatccatctgaaaagagttgagttaggcggaacatggtacggcgatgattgcgtgatgctcacttactcacgtagttgtcgggaatcatcaaggacacgtgtcgaaatgtgataggagagagacatgggcggtactgagttacggaatagaagaaggaaggagaaacaaagagctttataggtgaaagggaagcctaacgaatatttaacataagaaatggtcacaagcaagagtttggcacaaactactattccttttcctctcaaccataaagctgaacacttaaataaatttatatgttatattttcaaccaagcaacatttatcatataaattatcaacgacttaaagtatttatcataaatacagaattattttttttttcttataaaattatacaaaacatattaacgaaacgcctataacgacagattaatatgtatacttaggagtttattagaaaagttatacaattaaatttagattctaacactattgatgttctttagatatccaagtggtttttttaaaagtctttagcccattgatcatattcgaataattttttagttctcaaagtatgttttatagccaaagtttagactaaacattaacaagatattcatgtggtttactgcaatttataatttgttttaagccattttagggtttagttcaacgatactaaaataatacttttctattttagactatatgttatttaactaattaagttttgaaaagaaacaaataaaatttccaccttactctcattaatatattccatcatttcttagattggttaaatatattaaagtaatagattataaaacgagatatttcgttaaaaacaattgcactaaaataactataacgatattctgaaacaaatataagcttataattatgtcaaaaaaatttgtaagacctaaaaggttaagtaaattgaaaaatccaaaataggattatccatcatccttagagcaactccaaccattgacaccaaaacaccaaattttaacaccaaatttagtgttttggtattcatattttttttctatctccaaccataaacaccaaatcccacaccaaaaacaaaatttttattattatattattaaatataaatatttaatttaataatagttattttaataatttgataaaaactaattcaatttagaactgcttaattttaatttaattaatataagattacaatcgataaatattaaataataaaaaatacattacattgtactaaatttcagaattaatatattcggaccacaagtgctcaattaatgtgatatttatttcaaaaatttgtgcactttatcattttctattaatttaattaaaatttgatattacaaaaacaaaagcattcaaaaaaatattgatagtatacttgtcttttatttgaaaatcaacaatttaaatataaaactaaatcaaaaacataaatagaataatatatattttttagtgttttgtgaacaatgttacatcaaatatggcatccattatgatgttaggttggagaagaattatcaccaaatttagtgatttggcgtctccttggagatgatcttagtccttacttacacatcattaaaatccacaaccccatcattgcccatcactaatcaataaagggcattactaaacccaaaaacagattatcgaaacatacgtgggtccccacttcccccaagtcattttccattttcataaagtatgtttctttcccattatcacacatagccttacgtgtttcacttaaccaccatcgattcagatcttaaataatcaaacagtaagcataagagcagcgtaggtacactcgcgtcgcagaagatcaaaagtcaacgataggtcagagtaaggaaacctcgccatgaagtgaaagttaataaacaccgtagctcccgaggtacaagaaacagaaaaacaaatatatttatgtctgaaaacttgaataaaataataatatttatatatttaaatatgttgggaatattattaatttattaacaagaacacagtaacgcaatcacagactccacagtccaaggagttttgcatactcaccaagccacaatcatttctctcttctctatctctctggttttgaatcggcgacgactgagtcaactcggtgttgttactggtttcgtcgtatgtgttgtaactgattaagttgatg

SEQ ID NO: 31589 - DNA, 3000 bp, Unknown
  misc_feature (1)..( 3000): 2750-1469P.txt file - cDNA_ID_3043833; gDNA_ID_2936559; Annot_ID_194359
gacaaatctcattcctcgtgtgatcgaaagtaataatatagcttttggcactcacaggaatcgattcgaaatctgttggtactacttccaaaactttattttcacaagcatacacaaagatgctctagtattgttgaagattactactctagcaatgttgtggatagtggaccaaaagttaatggaccaatattcagatatttggttttatttttttgttttctatattgaaggttaattaataagtatgattatcacggttattcagggccggtccagaggtcacataaaccaatcaacgattagggctcaaaaaattataggttattgaaagttaaactttgttttgtttttgttctgattttttgacttaaattttatgaaactttctcacgttcttttcacttataagcttattacattcaaaaatgattacaaaaattataattttgacttttgagtaaggcctgccataaatttgtaaccggttctgggattattattagcatgagtaattcatgtataatgtattcgactcatttagaataaacattataaaaaatataaatatgcacctaaactagaaatctttaatagtttgatctaaatgattatacacgttgtagagaagtaatataatatttacgcatatatagttttaaataccttaaaatgttttcgaataaaaatattaactagccatataatccatgcaaatcttgatgatatatgtcttgaacaaattctattaactggctagttgtatattataacccatgcaaatcttgatacgtggcaaaacataaatttgacaaaattgatcactgagctcgacaaatcatataatttggattctaaaaccaaaggcatcttaaaaaaaaaatcaatggaggtgtgtagctacggacaaggtcctacggatagttacgtccgttttgtttgctaacgtaaaaagagcgacgcgggggaacgaagtaagtaaatgcagaatatgaataaaggaaagaatccaacatttgtaaaagttttaatgcgaacaaattagtatcatccataatactcttatcactcagattgaaagatttttttttatataaaaaaaactgtttttaatatatattcttcttctcgtggatcatatacatatgtaaagtttccaggtcacaatttggaatcaccttttttgttagatagtccaaaacttgaatatcaaccttttacttgagatgattccaagagtaccacttttatttacactaacaaaaactttcaagttccaacatattataacattccaagaagtgaatcattgttatcacttgtttttacccataggttatgtaagttacttatgacacaaattttacaattgcacatatataagagagatgtgacacatggacagtcacaactcacaaacagaaaacaaaggaaacaattgtaaatcgaaaccgaattgttataatgtttaatgaatatagaaatgtgtgatttaatttgtttattacatctcaatctaattctggtttgaaaatcaacctaaataaatctttcaggaacaacccaaaccggaaactcatagggacaaagtttattcagttatgcaaaaaaaaaaaaaaaggcagcttttggctttggaaaagctaagttgcgtcaggcaaggtaaggcaaggtaaggcaaggcagaaagtcagagagagtacaatgtcgcatgtgaaacctttgtgtcttgtctctttcactacccactaattctagtacttcagaaacaataagacaacaacactgtaaaatgtttaaggaaaattacacacttgagtaaatcagtgaacttatctgtttcctgctttgttggttctttttacctattcaactcaaagattcaaagttactttcatttgtttcactgactattcacagagagttaattatgatgatgccagtggaatctgtcagtgattgcttctccacacaacacactgtaaaaaagaaaggaaggtaaaagtgagaggcttttattactttcatggtgataacaagtaaaagaaaaacatgcattagaactcacaacaaatctctgtcttaaaatggttccagatatctattgcatcaacactttaattaaagtaagtgatctcatttgttctatttccatctttcaatctgtaattcctccacttctacatagaatctttatataagcaatagtgataataataaatgttaacacaagaaagaaatcaaaagggttagatcgtatataagcatctactctattcgtttgtttgtcctggtccatacacgtgataattatccatgtctaaaaaacaatatatatcaaacaaaaaaacagtgatcagatcctaagttacggtaaatgcatttccaataagagtctaccaaaagaagacctcaaggttgcaagcaaacgaattcaatagtcacatcaatttattaggagtactttttgttttgttcctaaacaacaaaaagattgttatgagtttaagcctatgtgtaaattatggaccttgatgtactattgcacacagtggcaggccaataaagacttcctcttaaaggcaaccaatgatatcatcatggtaaaaaagatcttaaatttgaaacaaattttcagattgaacttcaaacactaaactaggaaaactgatctttagttttcatattactatcaattatttcttgaatctaaatcaaacaaactaatgaaaatgtttttaatacttatctatgtaaatctctttttctttctttcccaaactttaatttttatttttctgagctagcacatcaacgtaatcatgcacttattccaccagagaaacgtacaagaacacagtggtccatctcccgactttacttcaccttttaaacccttcaatttcgtcaacaatatcatcaagtcccattcctcaaacattgcttaacctattagagtttccttcctccaacaaaccatctttataagactccaaaatg

SEQ ID NO: 31590 - DNA, 3000 bp, Unknown; identical to SEQ ID NO: 31589
  misc_feature (1)..( 3000): 2750-1469P.txt file - cDNA_ID_3043833; gDNA_ID_1971910; Annot_ID_177102

SEQ ID NO: 31591 - DNA, 3000 bp, Unknown; identical to SEQ ID NO: 8878
  misc_feature (1)..( 3000): 2750-1469P.txt file - cDNA_ID_3043857; gDNA_ID_1971910; Annot_ID_177094

SEQ ID NO: 31592 - DNA, 3000 bp, Unknown
  misc_feature (1)..( 3000): 2750-1469P.txt file - cDNA_ID_3043861; gDNA_ID_1971910; Annot_ID_177092
aacagtgggatcaaattcaacaattccatctcccaaagaggcttcgttttcttcagagatcgcatagagttgtggtggaggtgtaacatagggagtactcatcacttttaccttcgtatccatccttgtctccgagtcactgatagacaaatgggaaacttttttatttttcatgacggaagtctctgaatcttttctcgcagaaacctctgacgccaaagagcacaccgactcatccctgcctgaacactcaaccagactaccagatcctgattccgatatgttggatacgcttccattgtcatctgcatcttcaggctgcaactccttcaagaatttattacaccacatcttgtagaatgagattcctataaacagattggcccgtggaagcattgcgaaatcacggttctgcattaagctaccaaaagataaagagaatcatcaaaaccaattcacacaagaacgtagcaaaccaccctcaggaaggtggaattacacattggtggataaaagactgactatctccagataattagctgaacatacaaaactatcatacacattacaatataacatatgcattaaaaatgaaatcctaacatccaatttaaaactagttcaagaagatatcaattgtacctgattacagtactataggcctcattgttcatctcatgctcaataaaatgacaaatttgctcgtaccaaaccaagagcctctcctgtccaaatgatcaagtaaaccaatgttatcatccagccatagagcaatattcaatcaaaatgctatattgtccaataactacaagttaaagaattacaaatctaaaaaagggacctctttatgttgtttaccaatctgcccaatccaagtatcatatattcttccaatctcatcagctttgtttttattagtttccgagtgactcacaatttgtatatgagcctgccaaacaaaaaagaacacaataagaaacagagagcaacaaacactgtttcgatctttgagagataaaagcaaacctcgtatttgaggcgattcatcttcggacaaggatcgttaattgtccctttcatcagaacagaaagcacacggcttgcatcattccagtgtctattacgaagtagctcacgaagtaatcctggtaatctattgaggtactcacttcggcttgactttggcccaatacatagaagataagatggtttcgctctgcagcgttgaattctcttgtacttttgtgtatcagagtcgatttctgagctactcacgcgacgacgcttagctttaatcttctcaagcttatcagttttctcttcggtttccactttaatcttctcaagcttatcagttttctcttcggtttccaccattacccttaatccctaaatcttggtgtgaatcaatatacacccacaagttgcagaactgtgagctcggaggttacgatttcggcgagaattgctgaacccaggaggaggatgacgaagaagacttgtaagagaagtttaaaagtcacaaaaggatgaagcttttctcaggtgagattaggggttttccaaaaccctaataccaccaccatagaaacagcaagagagaagaaaggtgcaaggagatgtcttctgacttttcagatttcgctcctttctttatgggctttaggccaatactaaactaggcccaattattgatctcattcgaaaatacccaaacatgcgtgttgttttttttaaagacaaaactacgtgacgttttgattctttgacattactcaaacgcagctcagcgtcagcgtcttcaccgctcttttggtcaacactttcgtttgatatttttctataaatacagaattcagacaaatcatattttaaatagttatgatttttgtatggtatctaatctaactataatgtcggcaaaattgacaaatatttgatttttgccctctcttaagctttattattacaagtgtggccgcgtaatcaaatctggtaataatgactaacgaacgtttctaagcaaataaaacgtacggttcccgaatcgcccttacctacttttatttcattttttcagcttctgcctattatattgttgcgattgaccccgaaagttttttaagttgagactaaggtcaaataattttttaactataaataaatattgcaagaaaattaatttatgctgtatatatagaaaaaaatcagcctctcataaataaccgaaattttgaaaaaagtagacatatctaccccacaaaaaaaaatcatcataaatccggatgaattgatgactaccttatctgtttttgaacttttatactagtggagtatttaaatttatatagtatttaaatatcaaaatgctaaaaaagaaaataaataaatgctgaacaaatccattgttgaatttgaggaatcccattaatgtagggaagaagtacttgtagtacccaatacgtttacttttactttttgtagtgggcaaattttatattgttaatttattaataacacaccctaataagtaacaactaattttggcatctttcttctagatgtaaccaaattttgtattattaataacttacactaacaaatttatattcccccttttcttatacacccaaattttgtattattggtatattcctaaattgactaattaaacataaacagaagaaaatcttggaaaaaatcaaacgatttggtacttactacataaataatggtgtagtgccaaattaacagggctaaaatggtaattagtcactgccttcttcgtcttccttattagctttatcatcttctccaaacaaaaaaaactgccccacacgaattacacacacacaactttattatctgtacacgtatatgtgtgtgtgtatatatatacatactcatccacaaaaactcgactgattgatttctccatgaacaacgtcctcctttgatttcacctttttttgttgtcttcttctttcgaaatcaatcatg

SEQ ID NO: 31593 - DNA, 3003 bp, Unknown
  misc_feature (1)..( 3003): 2750-1469P.txt file - cDNA_ID_3043873; gDNA_ID_1971910; Annot_ID_177086
ttttaaaattagacatttcattattaaagtaggattatttggaaatataataaataaaacgataataaagtaggattatttggaaatataataaataaaactacttataaaagtaaacacttcattaataaaattaaataacataagatttaccagtgcatgattcttacctatatatatatatatatatatacaaagtttgtagtgaacatatatataattatttatacaagaaaaaatgagtatgaaaaaatgtgttgtattgatggtggtggtgttggtagttatggtggctatggtagatgacgttgaagggcggctttcatatgctacatgcatggatctttgcgagaccaagtgtaactttttttttacacatccagaaaaatactgtaaagataaatgtaaccgcaaatgtcgtagacttcaatcatctcagtaataatctcttcatttattttattgaatttctttttttttctttttatgttgtgtgtataaaatttttgacataaattatatgaaaaaattgcagggtggagactataggaatgagaaacataaatggataaataagttgacaaaatagttgatatatttgtaaacttgatgaagctttcatattaataacaatttttttttagaaatttaactctttttttgcaactatatatgtgacgtttcaaaattaaaatacatatcaattcttcatccattagtaaaaccgtaatataactctcatgtatattataaaagattgcagaatgacatagttttctatagttacattttaatctaagaaattgtaaaataagaggttcgaaccctgttttagttttaaaactaatggtataatgatgtaactaagtacatattttagctataaaacttataagtacttcccgattaatagtatcagattttgcattaggtgagttatcattttaagccaagacatctgtaatgaaatgttcttgaaaatccgacaacttgtatgtctctttcattatctttaaatcataaaaagttgcttcaatgttaagagttaagacacaaaagcaatcgtgttatatcattgtctcttgattccacacaaagccaactctcatatttattatcttcatctcctttcaaaattaaaaagaaaatatcaaaagaagatagaggagtacaaaccaattttttagggttaaattttgtattataaattatcggactcaaaatgttcatcaatacaaagcaatatatcatcaatgcaaatctttactttgcatcattttcaacatgcaaatctcatcttcacttgaaaaccttcctttggttcttctccttcatgtctttgtatgcaatatgggacattatacacatattttttcatcgattgagtaatctattttaaaaatatttgaatcacattatatgcataaaaaatctaatattttattaactataagtattttatagaaatttaaaataaattaaataaataaagtcaaataaaagtgaaagaagaatcatatatttatgtttaaattagatagataggttttaaaaaattagcaattaataaaaaaggcaatgtttgtggagtgctaaatcttttattttgatattttttgatatttttatattttaataaaaaaggcaatgtttgtggagtgccattgtaaataagttgaaaggctaaagttttttttatctcaaatatctccaaaattaattatatcattttaaaatatattaaataaactatttataaaaaattataagatttagaaattagttctaaaattaaacatttcattaataaagtgggattatttggaaatataataaataaaactataataaagtaggatcatgtggaaatataataaataaaacgtaaacatattattaatgacattaaataacataagatttaccagtgcatgattcttacctatatatatatatatatacaaagtttgtagtgaacatatatataattatttatacaagaaaaaatgagtcttaaaaaatgtgttgtattgatggtggtggtgttggtagttatggttgctatggtagaagaagtagaagggctttcatatgctacatgcatggacctttgcgagaccaagtgtaactttttttttacacatccagaaaaatactgtaaagataaatgtgaccgcaaatgtcgtagacttcagtcagctcaatcatcccagtaataatctcttcacttgttttatttagtttgattaaaaaaatattttgtataaagaaattgacatgatttatataaaaaaattgcaggatggagactatagaaatgagaaacataaatgggtagataagttgacaaaatagtcgagatatttgtaagattgatgaagttttcatatcaataaaaatattttttaaattataaaacttttttttataccaattataaaagaagcaaagattaaaagaagatagaagagtgaaaaccaacatttttggtttacttttgtagtattataaattatcggactcaaaatgttcatcaatacaaagcaacatctcatcaatgcaaatctgcactttgcataattttcaacatgcaaatctcatctactccactcggaaaccttccttaattgggttcacaacttcataagttcacatcatagatctgtgttattgggctgttttatggcttgtaaaagttggactagacccactaatcattatagcctggactaggcatgtattttcttttctttctcctacaatattatctctcatcaatacatcaaaaccacaacaagtttatgaacaaaactctgaaccgggaagttgttttctgataaaccaaactacacgccgtcttgagttgattgatgacgtgttaaaagattaatggctgattgtcattttccatccaatcacattaaaacacgtcaggataaagcccgtttcatcactgcttctctttcatcaaaagttctttaaggaaaaaaaaaaacgtcaatg

SEQ ID NO: 31594 - DNA, 3000 bp, Unknown; identical to SEQ ID NO: 8882
  misc_feature (1)..( 3000): 2750-1469P.txt file - cDNA_ID_3043879; gDNA_ID_1971910; Annot_ID_177079

SEQ ID NO: 31595 - DNA, 3003 bp, Unknown
  misc_feature (1)..( 3003): 2750-1469P.txt file - cDNA_ID_3043883; gDNA_ID_1971910; Annot_ID_177077
gcttccgtaagcatccgcactagtaaagtgtccaaatggatgccgtcaaaacaacaaaagtgttttaaaaaagaaccgaaacaagttttcacacttggtccttagcttctcaaactcttcttcgtcctgataatggactttaattatcatgttatacgtcaaccaagttatcagctaaccatcatcactttattaagtatatgcagccttgtgctcataatattcattatattatactaaaagtctaatcatatgaagaaaggaaaaaaaaaaaaagaggcttgtttatgaaattaaggagtgcacgtaaggccatatttataattctatttcagaaaatgtaaattcaaacacggcaaatatgttagtttcatggtgcatgcatgatgcatttccaactgtttctttttttggggatgaaaatgtatttccaccggttaattaacgaagcttctatttcatgtttccgttttcttttactttttttttttgtttttacttcatatatatcatttgacaaagttaaggctttaaaatggcagtagtttcttaatttgtttttagattttggatttatggtgtttagttcttagtttttttttgcagtaaatttttagttttatataaatgtatgtacccaatacatatcactatatattttatagtccaaaagaattttatgtgatggtgaaaagaaaaaaatgtgtgatcattcgctgaaattaataaattttgcagtatattaaagaaaactagaaaagtgagtacctaatattccaacaattagactgtatcactcatgcctgtcgtctgtcgactgttgacttgtgttataataaagacatttcaaattatccgaatattccattagcacatatgaagatatccaatttttgaataattggagtcgaccaatgtaaaatattcataacgtgacatcacatcacatacatgtacgactttgtcacttaccaaaaatgatctagttatgataataacatcatcacatgagtaagaatgataaggcatgatctaatcagcatcatataccgctactttatttactatcacattttcgttcacaagagtaatattatatttgattttatatatgtctaaaaatttatcgtagactgccgattttagattttgggaggttagaagaactaataaaaccgaaagaaatagatgatggtcggttaaatacttaagtcctttataagaaagaaaaattaaaagtcaactttatcgctgaaagtgaaagttaggttgaaagttcagagatttattcatcaacttccgtgcattgacacatgctcttctctacattcgctcacgtgaattttagaacaacaaattattttacaaacactataatcttccggtaatttaaccacaataaagagataaataatctttatattaaatcgatcgaattctaattctgtaggtactgtgagtcaaacatgaaagtgtaaattttcaaaatatgattggtgttaacttaggtgaatcaatttttgatgtttttttgttgattatataaatcaaaattacggaagaatgcatgttgtttacataagtgatataattaattttttactgatatattaaaaataaaaatattttatgttattgttttggttatttttttgttccacaaaaattaattaatcataatatttctttcttgactatcactagattcaatgaaaatctctcttttatacataaataaaaatcttctcaatgcattaataaatatatataaattgaggaaaaaaagagatagaaatcatggaaaaaaaggttaaaaattccaactataagcgagcatcacatatagaaatagaataatgtataggaatccatcatgatctcactctctatatataggtaagccaagtatcttatttttggttatgtatctctgaaatctgaatctgactgacttcaaaggacacagcttttacttctataactggttagcttctccacacacacacacacttgttagatttacttttcctccgcactatcagcagatttttctcatctgggtctgtttgtttctgttgactcaaagtttccgactttcttattttctgtctccgatttcatcgccgaaatctcagtcaattttgtctttagatctttaatttttggatccctttaattattttgtttggtcttacttcagagcgaagcaggtgaaaaaatggcgaatcggaagttagagaagatggcatcgattgatgttcatcttcgtcaactggttcctggcaaagttagtgaagacgacaagcttgttgagtatgatgctttgcttctagatcggtttctcgatatcctccaggatttgcacggtgaagatctccgtgaaactgtacgttttctccattttggatttgacccttttgctataagatcctgaaactacatgctctgttttgagtattgactaaaggtttcaactttttttgattcgatcatggattagattagttagggttttgaaacgcaggaagatttaaactttatgttagttttgagattagtagtttcatgtgatctaattttgatgatcttattgtgtgtgttgttgtatataggttcaagagctttatgagcattctgcagaatacgaagggaagcatgaacctaagaagctagaggagctagggagtgtgctaacgagtttagatccaggagattccattgttatcgctaaagctttctctcatatgcttaacttagccaatttggctgaggaagtgcagattgcttatcgccgtaggatcaagaagctgaagaaaggtgattttgttgatgagagctctgctactactgaatctgatcttgaagaaactttcaagaagcttgttggagatctgaacaagtctcctgaagagatctttgatgctctcaagaatcagactgtggatttggttttgactgctcatcctactcagtctgtgagaagatcattgcttcagaaacatg

SEQ ID NO: 31596 - DNA, 3003 bp, Unknown
  misc_feature (1)..( 3003): 2750-1469P.txt file - cDNA_ID_3043916; gDNA_ID_1971911; Annot_ID_177136
agcttctttcaagtccatgaaacacgattttaccggaggcgttgagtctcggactatccgccgtcacggtgagaccccgagattcgatacacgccgacgatgatgatgatccgtcaacggaaggcgtcgacggtggatgattccgtcttggtttggctaatctgattcttggttggttaaggtttcgtgaatgagtccgcgacggagcaaagggattcgcacttggtttatcgaggtcaagcgagagtcttggaagatcatcgatctcgtggctagaggaagacgatgaagagagtgagagacgtgaagatgcgactgagattgattcggagatatctgattctttttgcaacggcgacgatgcggcggtagaagatttagatccccggtgaagaaattgcttaaacgatgacgttttggggtttgtggatgaagaagaagaagaagctttaatagattcttcttgttccttggcgttgacgagtctcttgagacctaaaagctctctccatcgagtcgtacaacgaggagctttaggagagaagaggtcagagatctccatctcaagtctccggcatgatttcagaacctctggtgatcctcttggttcggtggtagttgtgttgactgtcgttgacgtcgtcgtcgtcgtcgtcttagggccagagaacttcaaaggtacgagctttccgtcggagaagagctcatcggcagagagcattgtgaccggatcctcaaggcaaaactcgaaatccacaactggatcttggatttccggtaatgggtcagattgttgcttgtcaacggaggaagagcgtctgttgtcgtctctggttaaagacatccgagggctcgtccatccgtacgacgagaacttctccggcgaaacaccggcacttttaacgcaagcggaagccattaagtttgtgtgttggacttgttgataggagaaaaaagaagaatctttggagcatttgccggcaaagaactatgttaagagttagggagagaagtgggagtgacagagacaagcattatatacacagctcactctcaggtacaccgtacacacttgtttcatttaccggaaccattcgggtcggttgtttttaatgggccgggttcacctatcttatgggctcagtattatttgaccctttttttgttgtcaatgcttgtgttattgatagagtgaatgactgaatgttatgaaatttagatctggttcgtgtgagtatttatttttataagttttttttttgttattatgtgaatcgagtattattttttctcattatggtcacctaccaaccaataattgagtctgatcataggcacacgtttcgtgtattcatgcatataagcattgttttctttcaccaaaaacaatccctctttgattaagaaaaatatggtttacatccatagctaatcaatatgagaacacaaatctttttttataagaaacgataacgttacaattctagcatttcaaagcagaaaatatgttctgtcttaaaataaaataactagaattgcaaaagcttaagatcaaagagcttagcggcaagagcggatcaatctttatattatgataccattctaggcaactcttgttgagtttccgataaatggtgagcaatatagattaacatacgtattgcatgcccatattatgctttctaatttgagatgaagccgatacgagacaaaatctacgaataagcaatatatacatatttataacaaatcttcataaaactttatataagtatgcattacacatttcattggtgtaacctgaaaatgcaattcttagtcaaatttgataaaaataattaagagatacgatatacagataaattgttaatagttaatactgtcttttggaacctagctagctcctttccacaacgataaaagattccaaatcacattctatataattatgttgtcatatatgatatataaattatcataaggttgtgtcatattgtgggtattggatattactattcttcaatcgaatatgtaaaatctatgtcaaggaaatatcggaagggactcttggagtgacttgctatctaacataaaatctatatctcacccaccggtcgaatatttgtcttgattcaaaatttaatcttggacatacattaataatagcatatgcatggcctagattgcgatgtaaccatgctctacataataataatgataaaattttataaatcatttcaattacaaaatatacatttaaaatatatatagttgaatgatactttacctaatacgatattaagatgtattttctcttattgttcgaaggcatatccgaataaaattttggcatgcactgtcttttcctacggtgataagccttgatccgttagaaccctcagccgaaataaacttatcaaaaaaacaaaaacaataattcgtatgcatgggctaaaacatacaatattgtatcataatggaatgcacaataccgcacataatccaagaactttggttctatccaatcgaacggagaggaactataactccgatcaaagtacagttgaaattaaatagaaactcaaatagcttttgtctctatccaatattatcaaaaagttaatagaatcgaagtagtttgaccaagtcaactacaaacaaagcttttgttagttgttgttgtggccatcacttctacttctccaatgtcacaaacgacaacatcgaacccaatactttcactactctttcattgaatcttacatctatatatatggaccagcttcttcttcctcttcattattcaataatctctaataaacatgattttagttagttaacattcattattgttgttctaatcgctaataaatatttcaaatcatttaacgactactagcatgtaaacattaattacgatgatctgaggtaatggcgaaaacgacactggctttgttttatacacgaggcacagcaatgaaatagacatatccacaattaatg

SEQ ID NO: 31597 - DNA, 3003 bp, Unknown; identical to SEQ ID NO: 31596
  misc_feature (1)..( 3003): 2750-1469P.txt file - cDNA_ID_3043916; gDNA_ID_2926287; Annot_ID_205441

SEQ ID NO: 31598 - DNA, 3000 bp, Unknown; identical to SEQ ID NO: 8885
  misc_feature (1)..( 3000): 2750-1469P.txt file - cDNA_ID_3043928; gDNA_ID_1971911; Annot_ID_177132

SEQ ID NO: 31599 - DNA, 3003 bp, Unknown
  misc_feature (1)..( 3003): 2750-1469P.txt file - cDNA_ID_3043940; gDNA_ID_1971911; Annot_ID_177129
cggatttcacccgtagtacaccattccatattaatatcgaatcaaacccgtcaattctatgatttcacctgtggtagtatttaattgtataattatattttaattgtcattctatgatttcactcctaattctatcgcaaattattatcaacccaaaccagacaattctaaaatattccgtagtacaccatcccatattaatatcgaatcaagcccgtcaattctaggatttcacccgtggtagtatttaattgtataattatattttaattatcattctaggatttcactcctaattctatcgcaaattcttatcaacccaaacagtcaattataaaatttcacccgtagtataatgtttaaatatttataatgtttaaatatttataatgtttaaatttcttataaaagaatcaaaatgtgttttaaaaaaattaaagttttaagtttttttttttaatattgttaattttgtttagtgtttaagattatataattatattatgattgttattatatgtttttttccatagcatactatcccatgttattatccactcaaacccgtcacaccatataaccccgtcccgtgaaattaaacacaaatttgtcattttattataaatttcaaatatttataaaattagaaacttcaaaaaagattaatattgacccaaacttcatcattgaattttgagtgttatatctaagatttctctcgcagtatatcgtcccgtattaatatcttttatattgtttaaatttcttgtaaaatttaatttataattttttaaactttttaaagtttcaattttttaaaataaataaccctagtaaacaaaccattttaattttggacacctcataaatcaagtttcatgctcattcgtaatcgaaatcattttggtcctttttatagtatggctcttgaccattgtccaatttttttaagcgatgtgggacattctaaaatcgtaattattatccacccaaacccgtcctaccatataacccagtcacgtgaaattaaacataattttgtcattttcttataaatttcaatattataaaatttggaacttaaaaaaatacaatatcgacccaaaattcatcattgaattttgattgttatatttaagattttttctgtaatatatcgtctcgtattaataaattttttatatatttataatgttaaatttcttgtaaaattcaatttataattcttaaaactttataagttttaaaattataaatatttaaagcattttttaaagataaactttataaaaaaatttaaaattataatatttaacttttgataaagttataatatttataattttttgagacattttaaagtttcaattctttaaaataaaaaatcccagtaaaatcggataactattttaattttggacgcctgataaatcaagcttcctgctcattcgtaatcagaatcattttggtccttttataatatgggtctgaaccattgtccaatttttctaagcgatgtgggacattgtacacatattatttcttcataggttgaataatatatgtccatttaaaaaaattagaattacatcatattcagaaaaaaatataatattttattaattatatatattttatataaattcaaaataaataaagtataagatcaaataaaattgaaagaagaattatatatttatgtttaaattaggtagaaatattttaggaaattagttaaggtaaataagaaatatggttagtttagagatattgtttatattaaatttggtaattaaatcattaattttcgtttttaattattagtttttaggtaacttttccaaaaattaatgttatctaagatcagaacagaattaaacatgttatccagaatccgaacagagttaaaccgggtaaaacccacccatttgaattaattgttgaattatggctcaaatcttcaacattatcttcaaaaatcccctccaaaaatgtatatatagataacggaaacaagattaatgtatcatcattcattccttgttgatttaattaaacagatgaacaaatgatatgtaataataaggtctcggtttacagtgaaagtgatttaatttagtatctttgttacttcgattattgaattgagcgtgtgtacttatgaagattaaatcgatgatgcatgggctcatgaagattaaaaaactcaatagacacttaaccagaattaatgatattggcccgatgagtattggcccattaaggcccattaagagagcgaaaaccctaaacgagaaacaagggatatactcagagcatcttccttggttactatataataagctttaggctgctagacgcctgcctccttgcacctcttttctttctctcgttctcatctttctctctaaggttagtcccttgtgtagatcctctcttcatcgattcaatttcatcttccttggtttgatttaggaattttgtcacgatttggtgtttagatgatggagtcttgctgttgatctatgtttatagcactttgtttccatggttctgttgtttcttaccgtttgttgtgcatcgatctggttttggtagatccctcgtagataataatctgaatatgtcaaagttttcttacaagtctgttgtgttttcagttttgattgatattgttatccatgtagtagtcgatcatccaaaaactggttcagtgtgattctccgatcatcgccgctgattttatatttatcatcatgtatagatttgcaggttttattttgttcgttgtgtgtttttgttctttgttaaatttaacctctatgcatttgatgtacatgtttttgtgttggtctcagtttctcttattctgtataagctaagctaaagtctccatggttagtgtctgtttagtattaaaatatttcaatttgctaattctttatgtttttgtgatgatattgcagagattttgtaggtgacaatcaaaagtttgacaaaatg

SEQ ID NO: 31600 - DNA, 3003 bp, Unknown
  misc_feature (1)..( 3003): 2750-1469P.txt file - cDNA_ID_3043958; gDNA_ID_1971911; Annot_ID_177124
taaacccctgaaaccctagtttcgttcgttgtatatttcttctcgctcagtaggtctttagggttttagtttcttctcctcaaaaaatggcgatgtatgttatctacgagtcttcttccggctatggtctcttcgaggttcacggactagatgagatcggacagaacactgaggcggttcggacttctgtctccgacctcagtcgctttggccgtgttgttcagctcacagcgtttcatccctttgagtctgctctcgatgctctcaaccaagtcaacgccgtctctgaaggtcagactcttcattactctcttcttattctttgttctgtatattcatgtgttgtgttgagtagcttgttcttgtatttagagctagagtagacacttcgatttaaaaccttatagttcaaatttcctggatatattgtagaaagagctttaatttatggttgattcttgtttttgtgttctgtttttgtttcattgttttggttttgtcattgatgcttttggaattggttttaatgtgatattggtaggtgttatgactgatgagcttagaagttttctggagttgaatcttcctaaggtcaaggagggaaagaaacccaagttcagtttaggattggctgagcctaaactcggttcacatatatttgaagctactaaaatcccatgccagagcaatgagtttgttcttgagcttctcagaggtgttcgccagcattttgataggtttatcaaggacttaaaggtgtgatctcctttctatgtgtttaaaatctttttgtctgtttgcttatctcatatggtttgtgttctcataaaaaatttctgtttatgtagcctggtgatcttgaaaaatctcagcttggattagctcacagctacagcagagccaaggtgaagttcaatgttaaccgagtggataacatggttattcaagctatcttcatgcttgacacgcttgataaggatatcaattcctttgccatgagagtcaggtttgttttgtgcttttccctttcagattgtgtgttttcctcgagaaaattggtagctgaactgtttataatgttattacagggaatggtattcgtggcacttccccgaactagtgaagatagtcaatgacaactatctttacgcccgtgtttcaaagatgattgatgacaagtcaaagttgactgaagatcacatccccatgcttactgaagtcttaggggatgaagataaggcaaaggaggtcatcgaagctggaaaagcatccatgggtaaaaattttgagctgacttttttggtagctttgagttaatgtgtgtttctgttaacttatgtcctgagacatttactctcttccctattggcaggctcggatttatcaccgcttgacttaatcaacgtacagacctttgctcagaaagttatggaccttgctgactacaggaagaagctctatgattatcttgtcactaagatgagcgacattgcccctaatttggctgctttgattggagaaatggtcggtgcccgtttgatttcacatgctggaagtctgactaaccttgctaaatgcccatcttccaccctccagattcttggagccgagaaggctcttttcaggtgcaatatctggcactatatttttaatgttcaccagtttccttttagtgctgcttgtgacatgaactgctgtggtatttcagggcacttaaaacacgtggaaacactcccaagtatggattgattttccattcttccttcattggccgagcatctgctaagaacaagggccgtatcgctcgttatcttgcaaacaagtgctctatagcatcccggattgattgttttgctggtaaaaatctgaaactccttgaagaagagttttggattatgaattctgttgtgaaagtgttaaattatgtgccctgatgtcctatgcagatggtgcaactactgcttttggtgagaagcttcgcgaacaagttgaggaaaggctagaattttatgacaaaggtgttgccccacgcaagaacgtggatgtaatgaaggaggtgatagagaatctaaagcaaggtatttcttgtagctgtttttttttggttgtaatcagagtcctctttatgatggcaaactcagtgtttttttatctgttcctcctttagaagaggaagggaaggagccagttgatgcctcggtgaagaaaagcaagaagaagaaggcaaagggtgaagaagaagaagaggtggtggcaatggaggaggacaagtcagagaaaaagaagaagaaagagaagaggaagatggagactgcagaggagaacgagaaatcagagaagaagaagacaaagaagagtaaagctggaggagaagaggagactgatgatggtcacagcaccaagaagaagaagaagaagtctaagagcgctgaatagaaagggatgcaacattaacaaaccctgtattgtattttttttttgagctaaattaatgtcgtctgtttttcgtagtgaacatcggagaatttttgttttggtctggaaacgattcaaggtttggcaatatcttaagtttgtttaggttttcactattttgacgtttgcaaccgtgaaggaggctcctccattttataaaatacaattaccaattccagtgctttgcaaatgtttcaataatagctaaactaactaccaaattggaaaactagcttaacaagtttgtgaaaatgaatttggagccatatgatttattattttacccaaatggagtaatagaagaagagcagctcgcgtttgaatggtcagttaacattaacaaaaggtaaaattgaatagatgttaaaacttgtgtaagtaaacaatagagctacctccttttgagaaggatagataaactcgtgaccaaccacattcccagtcccatattcttagtacaaataagaaattcacacccctcaaagaaatataacataatcaatcataggaaatatacttcgcataatg

SEQ ID NO: 31601 - DNA, 3003 bp, Unknown
  misc_feature (1)..( 3003): 2750-1469P.txt file - cDNA_ID_3043962; gDNA_ID_1971911; Annot_ID_177123
gtaacaaaaagataccctcacaaattatgttctccatgttgaatgtgcaaacatatggacagggctccaatgtcttattggaaaaaaattgttttaagactttcgctattgactggtgtctagattataacttttcgatcaactgcggaggcccagagataaggtctgttagtggagcactatttgaaaaggaggacgcggatcttggaccagcttcgtttgttgtgagtgctgcaaagagatgggcagccagtagtgtaggaaattttgctggcagtagcaacaatatatacatagctacttcactagcacaatttatcaacactatggactcagagctttttcagtcagcacgactttctgcatcttccctaaggtattatgggttggggctagaaaatggagggtacaccgtaacacttcagtttgctgaagtacaaattgaaggttctaactcttggaaaggtattggaagacgacgttttaacatttatgtccaggtctgcaccacttgatcgagctttccggttcacaaatgttactttttggttctgatgaattctaagatctagctccatttttccagggaagacttgttgaaaaggattttgatatacgcagaacagctggtggctcttcggttcgagcagttcagagagaatataaaacaaatgtatcagaaaatcatctcgaagtccatcttttctgggctggaaaaggaacatgttgtattcctatccaaggggcttatgggccattaatagcggccgtcagtgcgacaccaggtaacacaaacggttgatatattttttttcctctgattttcactatctcccgatactagttagtgccgtgtcacatattcttgttcagatttcacaccaactgtggctaataggccaccatcaaagggaaagagcaggactggtactattgtgggtgtcattgttggtgttggacttttgagcatctttgcgggtgtggttatcctcgtcattcgaaaaagaagaaaaccgtacacagatgatgaaggtacagatgtaataagaacataaacaagcccttgagctgaataactttagctctctgatcaaaattaaagttgactatcatctgttaaattggttgattttaagtagtgaattttttatggcagagatacttagtatggacgtaaagccttacacctttacttactcggaacttaagaatgcaacacaagattttgatctctcaaacaagcttggagagggagggtttggggctgtttataaggtaagtcccttactgaatcgaacaaaatagctgtatatttttctgagatactaggaaagaagggtacatgtaataccttttaatacgttttgttttgaataacacgttcaacagggaaacctcaatgatggaagagaggtggcggtgaagcagttgtcaattggatcacggcaagggaagggacaatttgttgcagaaattattgcaatttcttcagttctacatcgcaacctagtaaaactttacgggtgctgctttgaaggagatcatcgtttgctcgtatatgagtatctccctaatggaagtctcgatcaggcattatttggtaatgaacagaaacatgacttacctatctctgcttctgccaagctaaagtaatcattatgccattgggttggatgttacaggggataagagtttgcatcttgattggtcaacccgttatgagatatgtctgggagtagccagaggtctagtttatctccacgaggaagcaagtgttcgcataatacacagagatgtgaaggccagcaacattttactggactctgaactggtcccaaaagtttctgattttgggcttgcaaaactatatgatgacaagaaaacccatattagtaccagagtggcagggacgatgtaagcaaaatccatagaccctgacattttgtttgcaacacaattatggctttatagctcatgttagttgtatcaatgcagtgggtatcttgcgccagagtatgccatgcgtggacatctaacagagaaaacagatgtgtatgcctttggtgttgtggctcttgagctagtgagtggaaggaaaaactctgatgagaacctggaagagggaaaaaaatatcttcttgaatgggtacgtctatatttgtcatataggcgaagttgaagatggtgtgataaatgacaaaagccgataatccttttgtatttcttgtatacaggcatggaatctacacgagaaaaaccgtgacgttgaactaatagatgatgagctaagtgaatacaacatggaagaagtgaaacgcatgattggcattgctctgctttgcactcagtcatcttatgcgttgagaccaccaatgtcacgagtagtagccatgttgtcaggagatgctgaggtcaatgatgccacctctaagccaggctacctaaccgactgtacatttgatgacaccacaagctcctcattcagcaactttcaaacgaaagacactagcttctcgacgagctttatagcgcctggcccggagatgccacttagagacggcgaatcgaagccaatggttggattcaagatcaaggagggaagatgaagattgtcccctctataatttgatatgcttgtatatggaagttgacaattttcttctatataaggatgtggagaaacagatttcactttcattcaataataatattttagttgacaatttttcaatttttgtaacaaacttttgatatcttgcaaggatgaccaaaaaaaaaaaaaaaaaaaaaaaaaaagaaagttaacctgttgtgatgggccgggcattttataagctagtacaactaacacaccgttaaatgggcctggcccattgaatttttcaagagcagcgccatcaacagatgcgcttattaaacccctgaaaccctagtttcgttcgttgtatatttcttctcgctcagtaggtctttagggttttagtttcttctcctcaaaaaatg

SEQ ID NO: 31602 - DNA, 3003 bp, Unknown
  misc_feature (1)..( 3003): 2750-1469P.txt file - cDNA_ID_3043966; gDNA_ID_1971911; Annot_ID_177122
atgatggaagagtggtcgcggtgaagctattgtcggtgggatcccgtcaagggaagggacaatttgttgcagaaattgtagcaatttcttcagttctacatcgcaacctagtaaaactttatgggtgctgctttgaaggagagcatcgtatgctcgtatatgagtatctacctaatggaagtcttgatcaggcgctatttggtaatgaacagaaacatgacttatctatcactgcttctgcgaaccttaagtactcatttatgcccttggtttgcatgtttcaggggataagaccttacatcttgattggtcaacccgttatgagatatgcctgggagtagccagaggtctagtttatctccacgaggaggcgagtgttcgcatagtacacagggatgtgaaggccagtaacattttgctcgactctagactggtcccacaaatttctgattttggacttgcaaaactgtacgatgacaagaaaacccacataagtacccgagtggcagggacgatgtaagtaatccacaaactctgacctttggtttgcatcacaattacaaattagtgagacatgttagtgatgttgctgtatcaatgcagtgggtatcttgcgccagagtatgccatgcgtggacatctaacagagaaaacggatgtgtatgcctttggtgttgtggctcttgagctagtgagtggaaggccaaactctgatgagaatctggaggaggaaaaaaaatatcttcttgaatgggtacgttcttgcttattatgattgattgtaaatggatggagtttagaatggcaaaagccaataatacttgtgtattttctgtatacaggcatggaatttacacgagaaaagccgtgacattgaactaatcgatgataagctgactgatttcaacatggaagaagcaaagcgcatgattggcattgctctgttgtgcacacagacatctcatgccttgaggccaccaatgtcacgagtggtggccatgctttcaggagatgttgagatcggtgatgtcacttctaagccaggctacgtaagcgactggagatttgatgacaccacaggctcatctctcagcggatttcaaatcaaagacacaacaggctattccatgagccttgtggcgcctggctccgagatatcacccagagacagcgactttaagccaatgcttggatccaagatcaatgagggaagatgacaatgtatcatctacgatttatggctatagagatgtttgtatatatgtaagatgacaattttgtacaaaaaaaaaaagggattgacaattttcatctttgattgggaaaaacagatttcactttgattcgataataataatttagtagttagaagttgaaattgatctttaaccgttagtgatgggcctcgcattattcatgtacttagccaaatcaatgcagtctctgaaggtgactgactctgtagtatattcatgtgttgtaatgttttatttgggagtcaaaaatgaaataatctctgtactactttcatgagtgggggttccaggagctctaactggattttcaaagctgcaattcaaatatgtatgcttatgtcatgaagatgtagacgtcacatgagcaaagatcgtgtaaataagtgggggagaaaaccagagctaagcatattggatactttacagtcctagtgtaaatgaagttttgtattgaaagtctattagtgttgaatcaggacgaaacacttgaagctcctctccaaattatgatcagaaacagaaacatatcagttcaggtcttcaaatgatctatatatgtacctctaactcaaaagatcatagcattgctccagcatcagtttctcttgtgcggccctccatcgatctgctaatggaagatattaggttattacacactagtttaatacacgatttatcatgtcacgtttgtcctcaaaacctaccgtgggagaaacgtaattaactattcactgttgaaatgatagcatcagtgactgcttctgcattcttaagcttattccagtttccaagcggttccactgaggatcccaagccggatcagagctcaagaaatctccaaatgatgttgagatacaacaaaaagggaatcaagaaaagacctcaacgtttagccatgcatgcatggacgactctcattacggtacgtttaactaatcgaacattgcttgtatatcgaaactcttaactatgcgtttacttaaaataaaaataaaatacttctttgattcaataaaaatattttagtagctctaagttggacttggagtggatctctaaccggtcgtgatggggctcgcactattcatgtcgttttaagtctttaaccaaatcaaccggtgcagtctctaaaggtgattgactcttccgtagcaacttcttccttccttgatatgtaatcatgtgttatgtcttggaattcaaaaggaaataatgattaagatcactttcatgagtgggttccacgagcactaaatggatattggcatatctaaaggagacttaccaaataatccttaagtctcaagtcccctttttatcaaaaaagaagaaaaaaatctcaagtggttgaaaatggacgacgacttgaaactcgaagtttcgtttatagtcaatcttacattgttgatcagttacactaattctcttggctgtgtgtcaacaagtgggaagatttcatagtaagtcttctctcatagtactagtaattaagtcttctctctgctatagagtgtggagactaaaaaaagaagaagacaacattgtttttatattattatgtgaagtagtgtagtggtgaagaaggaagaattttccaactctacgaaccatagcaatcatagcctgatagccattaacgtctctatacagagaaaacagagagcccattcgctgatcggcaaatctctttataaacacactcatagtggtcttgtttttctgaaccaaagttatatctgttgaaatg

SEQ ID NO: 31603 - DNA, 3003 bp, Unknown
  misc_feature (1)..( 3003): 2750-1469P.txt file - cDNA_ID_3043970; gDNA_ID_1971911; Annot_ID_177121
gtccaggtctgcactacttgaccgagctttctgctttacaaattaaattttggtgtaattatctgcttccgacttttgattctgatgaattctaagactagctcactttttccagggaagacttgttgaaaaggacttcgatgtacgcagaacagctggtgactccactgttcgagcagttcagagagaatataaagcaaatgtatcacaaaatcatctcgaaattcatcttttctgggctggaaaaggaacatgctgtattcctatccaaggggcttatgggccattaatatcggccgtcggtgcaacaccaggtaaataaatggtgaattcttcttgttttacaccatctcctgatgctagttagtgcttaagtgttacatatttctgttcagatttcacaccaactgtgggtaataggccaccatcaaagggaaagagcatgactggtactattgtgggtgtcattgttggcgttggacttttgagcatcatttctggtgtggttatctttatcatccgaaaaagaagaaagcggtacacagatgatgaaggtatagatgtaaaaagctcttgaactgtagaattttggccctctgattaaaaattagttatatatcatctctcatattggtcgattttaagaaccgaattgtttctggcagagatacttagtatggacgttaagccttacaccttcacttactcggaacttaaaagtgcaactcaagattttgatccctcaaacaagcttggagagggaggatttggccctgtttataaggtaagtccctactgaaatttgtacatatttgagatattaggaaagaagagtatatgtgtactatcttttgttttgatattaccttttgttttgacaatatcatttattgaataatgcattcaacagggaaaactcaatgatggaagagaggtagcagtgaagctattgtcggtgggatcccgacaagggaagggacaatttgttgcagaaattgtagcaatttctgcagtccaacatcgcaacttagtaaaactttatgggtgctgctatgaaggagagcatcgtttgcttgtatatgaataccttcctaacggaagtcttgatcaggctctatttggtacgcacagaagcatgtttatcgatccatgcttctgccaggctaaaatcactcattatgtacatgtcattggtttgaatgttgcaggggaaaagactttgcatcttgattggtcaacccgttatgagatatgcctgggagtagccagaggtctagtctatctccatgaggaggcaaggcttcgcatagtacacagggatgtgaaggccagcaacattttgcttgactctaaattagtaccaaaagtttctgattttgggcttgcaaaactgtacgatgacaagaaaacccacataagtacccgggttgcagggacaatgtaagtaactcccaaccctgacctctggtttgcaacacaactatggatttataacacatgttggtgattttactgtatcaatgcagtgggtatcttgcgccagagtatgccatgcgtggacatctaacagagaaaacggatgtatatgcctttggtgttgtggctcttgagctagtgagtggaaggccaaactctgatgagaacttggaggatgaaaaaagatatcttcttgaatgggtacgtccatacttcaacactttttgataatgaacacaacttcaatgtatgtgaccatgagaggctaatctgggttatgccctttagcaaaagctgatattgattgtgtaacttgttcacaggcatggaatctacacgagaaaggccgtgaagttgaacttattgatcatcagctgactgaattcaacatggaagaagggaaacgcatgattggcatagccctgctgtgtacacaaacatctcatgccttgagaccaccaatgtcacgagtggtggccatgctttcaggagatgttgaggtcagtgatgtcacttcaaagccaggctacctaaccgactggagatttgatgacaccacagcctcctcaatcagcggctttccattaagaaacacacaggcttctgaatccttcacgagctttgtggcgcctagatccgagatatcaccgagaaacaacgacgctaggccaatgcttggagcccagatgaatgagggaagatgacaaagaccctatatggtggctatagatatagtcatatagagattatgtttgtgtatatgaggttcactttattcttcttggattggaaaaactctagatttcactttggttaaataataataatattttagctcctctgacttccacaagcggtcgtgatgggccacgtactattcacgtcctcaaccaaatcaatgccgtctcttttacagtgtaactgtgttggtttccaaatgaaggaagttattaagaacacttttcatgagtggttcaacgagctcgaaccggatatgacctgagattctaaagaatatttatgagtcccaagtcggagatggacgacgatttgaaacttgaaacgtgtgcttttgtttttatattttggtgtttgtcttacattattaaaagtcaataaagaaatggttcaggcaatttaagcaagccatgttgatcaattacataatcttataaacgtcacattgagattgtgttctgttgaattgaatgtttttggtctaattggtgatgtttattacggacgactcgcagcgcagccgccaccgtcgttgacacagcaggtgcactcctcggtccacgcacgtgagcttacacgccctcgctatcgggacaagaccattaattaattcaaattagcaaatgcatctcttagtttggtaacggcaattgttatagtatttaaactgaaatcataaatgaaccaaaagcttagacctctcaactaaattttgcaaagagcagaaataaactctttctaaaaagcatttgtgttttttaaccaaaagcaaaaccaccgtcgtcgatg

SEQ ID NO: 31604 - DNA, 3003 bp, Unknown
  misc_feature (1)..( 3003): 2750-1469P.txt file - cDNA_ID_3043974; gDNA_ID_1971911; Annot_ID_177120
tttttcgtaagtaaaacgcagagatgggcagtcagcaatgtaggactatttactgggagtaacagtaatcaatacatagctctttcggcaacgcaatttgcaaacacgtcagactcagagcttttccaatcagcgagactctctgcatcttctttaaggtattacggactggggctagaaaatggaggctatagtgtaacggttcagtttgctgagatacaaatacaaggttctaatacctggaaaagtcttggaaggcgaattttcgacatatatgtccaggtctctactattcttaccaatattaacttcgtcttctctgtgaattagttattttggttttgtgaactaggtccgtactctgtagtaactattttgaactagagagagaagatccttgataagctttggcatacaagagatcctttttctattagagtatctggtacaaggttgtagcacatatttcgttcaagtgggggtgaaaattagatgcatcgttttaaggctcaactcttcatgaacgatattctctactctcaaaaatggtttctgacctctgagttccttttgtttctcagggaaaacttgttgagaaggattttgacatgcaaaaagctgctaacggttctagtatccgagttattcaaagagtctataaagcaaatgtatcagaaaattaccttgaagttcatcttttctgggctggaaaagggacctgctgtattcctgctcaaggcacttatgggccattagtctcagctatcagtgcaactccaggtatacatacagcagaaactttcatgatcttcgtagagtccaatgtatcttctaactagcggcttttattctctgcagatttcatacctactgtaaaaaataagttgccctcgaaatccaagaaaaacattgttatcattgtaggggctattgtaggagcagggatgttatgtatattggtgattgctatcctcttattcatccgtaggaaaagaaaaagggcggctgatgaagaaggtaaatgaaaagtcttagctgtggcagttttattaaagtctaatcgttaacaactgtaaccttctaagtggtatttatcaaatatttctcaaatgcagtgctaaacagtctgcacataaggccctacacctttagttactcagaactcagaactgcaactcaagattttgatccttccaacaagcttggggagggaggatttggacctgtttttaaggtaagaccgtacacagaatgtgtaccaatattgggagtctagtgtactagaaagttatgtaaaattttacattatctatattctaaaaatattcattggtacagggaaaactgaacgacggaagagagatagccgtgaagcaattgtcagttgcatccaggcaaggaaagggtcaatttgttgcggagattgccactatatcagctgttcagcatcgcaaccttgtaaaattgtatggatgctgcattgagggaaatcagcgcatgcttgtatatgaatacctctcaaacaagagtctagatcaagctctattcggtaagtgcatgagatcttacatgtgttatccttgtaaaaaaaacaaatgctgttaccttacatgttgcgtgactgtggcagaggaaaagagtttgcagcttggttggtcacagcgtttcgagatatgcttgggagtagcaaaaggtttagcatatatgcatgaggagtcaaatccccgtatagtgcatagggatgtgaaggcaagcaatattcttctggactcggatctggtcccgaaactctcagattttgggttggccaaactatatgatgataagaagacccacataagtacccgagttgcagggacgatgtaaatatcctgaaaacctcacattggatgtggtttgtcaaatgggctaaaacttaccgttgttaaatgttatattgcagcggatatctgtcaccagagtacgtgatgcttggacatcttacggagaagacggatgtgtttgcctttggtatagtggccttggaaattgtcagcggaaggcctaactcctctccagaattagatgatgacaaacaataccttctcgaatgggtatatatctaacttttcctacaaacacatcctttttaattccaaatttggtgaataatttggtctttgcaggcatggagcctacaccaagagcagcgtgatatggaagtagtagatccggatctgacagaatttgacaaggaagaagtgaaacgtgtaataggagtagcgttcttgtgcacacaaacagatcatgcaatacgaccaactatgtcccgagtggtaggtatgttgaccggtgatgtggagataacggaagccaatgccaagccagggtacgtctctgagagaacatttgagaatgcaatgagcttcatgagtggttcaacgagctcgagctggatattgcctgaaactccaaaagattcttccaagtcccaagttgaagaacatggacgacgacattgaaacttgaaaacttgtggtttttctattttttgttcttacataaaaaaaaagaagtcaatatagaaatcgttgttggtaaataacacatatacatattcgtttgaccaaaattggatttgactgtttctcctgaaagttgtgtttggtcccatttttaacattaaaatcccttaaaaccatcattggcatttagtatcaaagtccaaaggtggtgatgcttcttgcactcgtaggcagcagccgccattgttgaaatctcccgttgacaacgcagcggaatctcggtttaagcgcgtccacttcacggcttgtggatgcatcgcgtgagacgcactgctccgcgtagttggttagaccattaattaaattcaaattaagccaaatgaaaagtatctcttcaaagtccaacataaacaccatttttgaaccaaattaaaaccttctccgtctagttttggcggctatcatcttcttctccgtttaattttagtttccgacgatg

SEQ ID NO: 31605 - DNA, 3003 bp, Unknown
  misc_feature (1)..( 3003): 2750-1469P.txt file - cDNA_ID_3043978; gDNA_ID_1971911; Annot_ID_177119
ttcttttctctctttttacagatttttagaaaccatgcatgattaatgttcttttaaaaagttgttgcatggttgtttttattattgcaaacgtagtagaaggaagaacagtgtcaagtctattagtgcatgcggttatatataatccaaatgataaatacggatatagtactgctttctaaagatgagttagtgaaattaatgaattttgggggaaataaacgccgtactatggtccattcgtacagaatgacccaccaactgactttatatttcttccatttacgtgtcataccaataataccaacacgacttttcttctaaaattaaatgcatgtatctgttctttgaaatgatgattttcttattaggtactgcatagagaacaccactatttgcttcatagttcatacaacgttttaaagtgaagtttagtttggtaaaagttgcatttacatactcaataatttaacagacgttgtgctacttgcgagtaatcactactggtcaattaatatataactcttccggagttactcaaatagtgtgtatagatatatagcaaattagcaatggtttaaatgcgaaagcgtgggctgccccaactgtccagccgtacgctccatgctacggacactttgctttcaacttcgacatttatgtttcttatttaataccatgagaattttggatatgagtttgtcctcacacatcaaataaaaatcatttagacaatcatacaaccaaatcttatctaactgaatcaatttgaatacttgatcctaaaacattgttagctcgaagtctctagttaagttccatcattgttccataaacacaatcttgaaatcaaacatttcaccacggtgatctctaaaagtagaccactagtttgtgcctcgctcaaggccagtgaaatatctgttagttatgtagtcaaaatttcagtcggactttgataataatagccaagagagattgtcaagccagaattttataatgaataactaaataatatgagaagatttagttgttcgttacagacagctctctgcactaacagttctatttaactgacttgaacaacgaagaagacagattcttaatgagttcttgggccttaattattagtaatcgattaaaaaaaaaatagaatttctactgtgaaaatttcaatttatgagtttagtatcatcgatttcatattggaacattcatatgtttgtcgagtgaaatttttaaaagaaaataagactccgaaatattgagatcactgatacaagaaattaaatgtcctcatcaagttaagagaaaccaagagaaaaacctagagattcaacaaagttttccaacctgacactgataggtcatgaattgggcttgtgggctttatattgtttaaagcctgttattcttagtattgctttctatttaagtttgttgtcttgcttggtaaacgtttatcgattaagaactcaagaatgtttatcttcttcatcatctcctttcttcttcctttccttctctgatttcttcagcatctcaacctatttcttctattatctcatctcctttctgttactaaaattgataagcaccattaatttatatgaacgtttacataataattataacatatatttatacttaaccttatggatgtgcacaattatcaatgttgtattcacagctcaaaaccctatttgaccattctttcgacaaaattggctatgcagaattgtttttaggtgtaaggttttagctttgttttttggatgtataaggaggctaattttttattttttttacggtatattataatttatgacattgtacggtttcatagtttattcacatacataattagtaataaaaaatgttttactaaaaatgatattcaaaccaaaacatctaaacgtttattttggaaatcggtcattttatactcgacctaaatttaagtggtcaattcatacaatatttttcttttcttatgtgctaatatattcaaattatatatccaaatttaccaaatcatacaagattatacattctagttcattctactgatgtagatgccacatttttgattattttgatgacgtagttaccacgctcttgacgatgtccgtgtcacgtcctcatcaccttatttttttttgtttcttcacctttttcttcttatattttttattttttgtcttctttatcactattgctcgaggaagctgtaaaaatattatgtgtttgatgcatgtaaaaagactagaaaaattattttcgatactaatgagtaataaccattatttaaatgaaagaacaaaaatctaatagagtttatagtcaattcatcaagtcattcagataaacattgtattattgttttcgttagaaaagtagtaacggcaagaatgtttttaaaacatggtcaaacctattaacttgtatttgacgtccttgtccgaatcataactctatcgcgaaatggtcgtttagtattagcaattggattgcatcagacgtatgtatctttgcgaatattttatacaaagtggaagaaaagaaacacgtatgtattttggtttcaaaatgagacaactggctgatgtcattgatatgtcatatacggttcgattaatcaactctatttaacccggttccaccaaatcagcagtttaaaattgaaattcggaaataacacttgatcacctaattcattagtttaatactaatgattaacaagtaaacaacgactaatgataaaacggccagggctttccgacacactttttttgttttattcatttattggataactaaatacaggaaaaagcttacccacatggcgacattatttatcaaaaaaaagtaattaggctgttaaattctaaagttaaaaccatataatatacatttatttatacgcataacaagaacaaaaatggctagttggtttactctggatccctcccgactctctcacatctttggtcgtcgacgatg

SEQ ID NO: 31606 - DNA, 3000 bp, Unknown; identical to SEQ ID NO: 20327
  misc_feature (1)..( 3000): 2750-1469P.txt file - cDNA_ID_3044023; gDNA_ID_1971923; Annot_ID_177199

SEQ ID NO: 31607 - DNA, 3000 bp, Unknown; identical to SEQ ID NO: 20327
  misc_feature (1)..( 3000): 2750-1469P.txt file - cDNA_ID_3044023; gDNA_ID_2926219; Annot_ID_203209

SEQ ID NO: 31608 - DNA, 3003 bp, Unknown; identical to SEQ ID NO: 20329
  misc_feature (1)..( 3003): 2750-1469P.txt file - cDNA_ID_3044026; gDNA_ID_1971923; Annot_ID_177194

SEQ ID NO: 31609 - DNA, 3003 bp, Unknown; identical to SEQ ID NO: 20329
  misc_feature (1)..( 3003): 2750-1469P.txt file - cDNA_ID_3044026; gDNA_ID_2926219; Annot_ID_203204

SEQ ID NO: 31610 - DNA, 3000 bp, Unknown
  misc_feature (1)..( 3000): 2750-1469P.txt file - cDNA_ID_3044030; gDNA_ID_1971936; Annot_ID_177266
agttattttggctgaagctgggaaggattttgttgatgtgctctgtagtcttttgactcttcctatgggtaccattgtcaggttgctcgagaagcatcagaatccgcagtcttcagtcgttggttgtttacacaatctttacaaaagtgttgcagacatggacgttgataatttcgagtctcaagcttgtaagcatttcttgctgcatcctcggagtgcgaaggggagtcatggcagagatctaaagctcaacattgatgacaccgaggcgaccaagttctttgtctgcccaaattttgtttctactgaagcatgccgtaagttattcagcaatgttagtaccatgaagtgtcgttgtggaagctctatgcaccgtgagattccggttgaagaacagcaagctgatggagtatttcccagctgcagaacatcatttgttattacggatgatctcaaagtggcattgaactctatgggtcttgttttgaatgtcctcaatgattttggttactctggttttgataagctgcaagaaatgcttattgatgttggttttgaagaggtacttgaactttttatatctacccttgatgacaacttcttaataacgatctttcttacactactttcttttgtaaatgtagattctaactttgctagggtgtttgttcacttcggaagctccattgacagacaccttcctgaggaaacattgcatgtcaaggaaacgtaaaatgttgacaccacttgtacaagaaagcagtgttgcaggagctgcagacaatctcttaactttgaaagtttatgttagaaagacagacagggctgttctctatgctgagtgcagagaagaattcgttgattttcttttcacttttcttgccatcccgattgagtttgcttgggaactttctattgacattggtaatatgggctgtgttggtaatctgtgcagaagtgtgaaagatttgagctttgagaagcagaaagcagccacagtttctcaatgcatgcttccttatttctactggaagggcacaacctcttgatgttgttatccaggaatcaccagaatatgaatgcttggtcacccattatggtcataacatgctctgtaaaaagattaacaaggctgtgctttcaaacggtgaaataattgcaaagttcacttcagcttctgctagtattggacttgtgaagggagaaacaaatttcatagtgtcagatgatctggttgtcactcctatgaactcgtcctcaacaatttcattgttaagcaagctgcagatgaacattggtgatattgaggagcaagtaattagcattggcaaagctgaggtatggtgcctctaccttttaatttatagtctttgattcttgagttcttaatatttttgaaactacttttgtgttacaggccactagcttacttagagcttctttgatcacaacctctgccttaaccaatggtctctcaaacttcctctcaaagatggacccggacgaagtaactcaatctacacctaagattcaaaagtctgacaaaccaaatgaagcttggcagcttctgtagctatgttcctttttcttgttttgctgcagacagaatctttgagagcatggcgtttgtttgattgtactccatttgctctatgtaaggatttttctgaattaacactatgttgaggatcttgacaactcttattaagaaatcttacagagaaatgtctcaaatgtatgacgtgattgtattatctttgttattgtgatgtttcttgaatctattttaaactggaatatctctttttaaatgatattcaacagattcagacaacgaagactagatgaatcatgaaggtagagtagaagaaacaaactttctgattcatcttagaagttagaacgattacataggagcctcttatatacgtagagcgttctggtttacaaccacttaaccgagataaattatatggttgtttcaacgtggataatcttatagagattttttttctattttaagaagaaatttgtcattttccaaataataacttgtccaagccaatttttttttttttaacttttgcattaaaattacaaaaaaaaaatcgtcatttttcctccacatcattacatccgttgtattttcttttcactatttttattttttaatctctgcaaattggtaaatgaatactcataaaatgataaaaacgtgaaaaaggtaatgttttttcctccacgtcattaaattatcaagggattatttgtattttctcatttgtatttttttgattaccaataagtttttgccttgactcgactggcctcagtatataaggaagacttggtctttctctctctcctttctcaactactctctatctctctcttcctttcgtgaattttctctctctagggtttcgatttcaattttttccactgaacccgcgatttgaactgaaccttcaccgtccatcaccatctccggtggatttcgtaggcatctacggagcttacttgtttcaaagaaccttggatgttgtttccgattctccgaaagctctgtgttctttagtttgatacctcagatattggatgcccttggtgagttttcgcacttattagtgatacgcatgattttgatgtccatatgttttcgagaagaggacgaatttcaaatgttcggctgagatttcgttgattcgtagcttctagggttttattttcctatggtagtcgagttaagttggagaaggataccgagagtatatggatctcttgctctgctttggatcttatttgcttcaattttcggctttgttactctatattgagagaattgggaaatgattttgagtttgcattctggtctgtgttcccgaggttgataatattgtgctttcttcatgcttcagatataacttaggtagcttcttacagaggaaggatatgttaggttaatttctgttcatttgcccttggatggttgctacgatg

SEQ ID NO: 31611 - DNA, 3000 bp, Unknown; identical to SEQ ID NO: 8931
  misc_feature (1)..( 3000): 2750-1469P.txt file - cDNA_ID_3044034; gDNA_ID_1971936; Annot_ID_177265

SEQ ID NO: 31612 - DNA, 3000 bp, Unknown
  misc_feature (1)..( 3000): 2750-1469P.txt file - cDNA_ID_3044042; gDNA_ID_1971936; Annot_ID_177260
tgatgaattatacttacgtgggaacgagttagtttacttgggagattcttacccacacgtccgataatatatatatacacacgaatacacatcctttctatatatcaatctgctcaagattacttaaaaaaaaaaaaaaaaaaaaaaggaagaagtgaagaatgtaatcgaataattaaaagggtatatgcactagatgaccataaaatccataatattatataaactaaccataggcgtatagtacttgtcggaaaccaactttaaattactctaatatttctataataggattttggttgagggggacaaatagctttataggcaaatagttttaccactaaagctttcataacctcctcttcccttacaacaataaccaccactagatccgtaacaccaccgcctcctccgtatttagtattattagatctgtaaacactaccgcctccgtattcaccaccatatccataacaccaccgcctcttccgtattcatcaccaccgccgtttacttttgttgacatgtatttttattctaaaacattgtatttttcaaagtttcttttaaataatacttgttctttactaaaattacaatgatccgtatgtctcaattcaaacgatagcatgtaatttttgaatacttcatgctatttttctatttttctatttgatatgtatattttcctaaaacgtttatattttttgataagataatatttttttaaagataatgtgcattttacaaataatctatgtttttttactaaaatcacaagtaagttagtgattcatgatttatgtttttttttataatcacatgcaaatttgtacaatcacatgtaatctataaataacacatatgtggtttgcttatctctgttgaaacccatttaccatattgtcaaaacaataaacctacattttaatgtaataaaaataaatagcatgtccttaaatatcttatgcaatatttctatactcaatcacaactgtttctaaatggctatcttttaactaagttttcttttacgtatacatttttaaggtataagagatattgcgtgtgattttaataagtagtggtctaatattgcatgattttttaagaagtagcggtgtaatcattatttcgtattatcttttgtttcctacatgtagcagctattgtcggaaagaaagagtttatctcatttataaagggtaaaatagttatttcgaaggataaaaaaatgttatttacccaacttttctgcacgaaggctattttattaataatgctgtcaaatttggtcatcctctaatattaccttaattaaaatacgatagtaaattatatcttacgatggttactagaatgttagtacagtatgttgtagtttatacgaaagaacaaaatgattcaccaaacgagcggcgtttaggtgaaggacaatatttgtttcccatgctagagacattcggagacccgtacgtactatagttcctaaatcatattaatagcaaatatatatatttgaatatctaaattgaatattattctgtggggaaaacagaaagaaaagaaaagccaagacaaatttgatcagataaaggaataaaactaaagttaaagttatatagaatgcatatcacaacaaaaaaagaaagcatacaaataatacagtctttgataacgaaaacttgatcaatgttttctcgtgttttttcttgactataacctctcttcttcttgcaaacagtataactttaaaaatgaattttgaaagtacttgatttttgttatgaattattcgtcttaattttaaacctctgtttttcgtcttaatgttagaatatcgagaagattagtttggagaaatgtatgaatatataacacagaaaaacaaaagagagaaaaagaaaaaggaaagaagagagaaagcgaaaggagagagtgtcatagagacaagaaattaggagtgtgatggcgtgatttgcttttccttttttttttgggtccgaatctttttaattccaaagtatctctttttaaaatttctttaaattaaaaacaaatactagtaaattcttagttgttactgtggttaaagcgggtaaattccatagttgacgcctgttgctatgattgatgcgataattgacatgattattacggtagcactgtaagaaatgcacaagatgcagcactatcaaaatactactagtattaactaatcaattaatatcgttgaaataatttgtttgtaactttaaacggactttattagatcaacaaaatcatcatgtactaaataacacacgcaccccatacttatcgttgaatcacgatagagttattgttttagattaaaatgaagcatgtgttgttgctttttgaaaattttgtcaaaagtagtgtgaaaattttgattttttagttaaaattgcttttgacaaagcagggaaaaaaatccactttgccaccgacccaacaagtaacgggtttatattagcattacatgagacaaaaatcgacagaacataaggtcaatttagacatatcatatttctccaattaatttgcatgttaacaaaaaaaaaatgtaactgacaaagaaaataaaaagcaaaatattgaagtggacaaaggtttaatatgttttatgttagatatagtacataaaaataagatttggcttatatcatatgaataaatctgaacaaaatttctagataaccgtacattaacacgctaaaaccatatcctaaaacttttgtttatttgaaaacactaatttggtttttctataataattcttttgttttgtttttttcttgttcatctcctttctctttcaattaccgttggaacaagacgaagtttcagagacaacactacccaatctctctctctaaccttaagtgttgtctttctctctataagccagagaccagacagtgatgacgatatagtatatgagaccagagggaggattaaccaccatttcccgtcatg

SEQ ID NO: 31613 - DNA, 3003 bp, Unknown
  misc_feature (1)..( 3003): 2750-1469P.txt file - cDNA_ID_3044046; gDNA_ID_1971936; Annot_ID_177256
caggagaaactttgtagacaaggaagatgattccaagagagggatgatttcgaaaattgaagcaggaggtgaccggctctttgtttctcgggaatgtatggaaggtgtggaggtctgggaaacttctagtttctccggtgtggtatccgtcgagtaatggtttcccgaagaacggtgatcgatcaccctctgttttcccgggaaaatcttgttaatttcgcaggaaagtaacaaatcttcaaactttccagggtctagtagaagactagtagtactgattgtctctacccaggtccacacttgaacagaatgaagaacatcatcaagattcacactttaccattatataaagtactagagaacactctcttatgttgtaaattgatccatagatattgtctttgtaaagttttggttctagtggataaataattatagtcacaagtaactaacaaatccagtttagagacagaagcttaaaaaaaaaaaaaagacactaattgttgcgggaaaattttgtttaaaaacaatgtaaaggtatgatggaagtgatgtcggtaaaaggagaaaaaactaaccttccttgttcatcttcattgtatttaatctaattgatctatgatttctccatattttaatacccttttaagtactcaacattatctcagcgtaatgattatatctcttttagtttgcaaagcaagtttccattgtatagctaaaattcaactactctttttgtctttctcaacctactctacctaatactcttcgttcttttcttttttgatgaaatgtttaccttttttaacaagacaaagaatctttctttatgtattgctttctttgccaatgtaataaaaccttttgttgcaacttctgtgtagtgcattccacacaaggtcttgaaaggagagaggaacccacatttttaaatgcaagtccttcattggattctttagatagtattgatacattatgtttttgttaggtcagattttggacctacaatttccgaaacgcttaaagtttgttatgatgaaaaaattaaatttcatccttcttttaagaaatgtcttggaattttccttttgtagtatatattaacaagaaataataaaattttgattaatgtaatatggggtcaaaaaaagaagaaagccaagtggggatttcccatgagctttcttgtctttggtcctttgacgccgacccctccttttgaatttaaacctggcttctctctctcttttttatttttttggtcggttacaaaatatcaacgtaacttgtttaaaacaatggaaagttaataaaaacagtgtgatattttattttattgtaaaaaccttagtttgctcaatgaattttgaaaagaagatcaagaataaccatttctagtcaagaacgataaatatttctgttatcgaaaataagaaatttaaaacactcctatacaattctctaacattacagaaaaaaaaaacagagaataggagctctctgtttgaccggacgcaaatccaaaccgggtaaaatcaagaagaagaccacgttgagactgagtttgatctcgacagaggaaaagaagagttcaagaactcaatgcaatcttcaatagcttctgctcgatgagactctgtctcgtttacagactttgacctcttcatataaatagctgacgaagaagaagacgacgacgacgaaggcaacaaaaacgatgacgtttttcttctatcagtagtatttcttctgaaggaaataaaacgcagcgttttggcgaatcttgctccaatacgttggatcaatttcctcgcggccggcgagctccttagaccaaaactgagaattccgacgagaaccacccttctccggctgtgatgtgacgagcttaaaccgtcgtgttttgggaatatgggttcgtctgtggcttctgggttcgggttaaagcttactcttttgcatgctcttcgtgacatattttttgttgtctgaaattgcggtgaagagagagagagagacagggcgaggagaaacagagagagagagaggggttgagagaagaccaaatagcaaatactaaagagaagcaaatgggatattttgaagactatttatggggtgttgtctaatgacataaaagacattggggtgaaattgtaaagatataaatatggtggggtcagtttaacaaccttactaaaaattgaaacttgtaactcacaattttctactttctaattgtataatgtggatttagtgtgagagtggttatatggaaatatttatcttatcttttctacagtttttccttatctataagagctacctactactacatgtgtgtattaatgaaaaaataagagcaacttaaacaaatgctgatcatgatcatggggatgagtactggctcgtcaagggtattgttcgctcgtggaatgagttataagtttttgctcatcttcttaatgaaaaaatagaataaacacacattttgttatactactaggcttttcctaaacccatttcaaactctttaaggtaagtttattaaccaaattatgatccgtcactctaacattaaatggaagtttgttaaccaaaaaaaaaaaaaaagttagtttacattagtactatttatagatttgaacaatcgatctgtccttagatatgtaaataatttatactaattctaactgcgtataagcaaaacttaatggtactaaaatcaaccttagtcagcaaccactactaagacagagagagaaagtgagtgtgtctgtgagggcgaatcaatgtctctgctttctccagaagatgatatttactttttgtgtcaattagctgtataacgtcttcttcacataaaacaagaacactccacttactaaaaaaaataattatttcttcttgaagagtggaattctttctcgaatcttagaaaattccatttagaactaaagaagagagagagatccagtttctcgtcccagttaagctatg

SEQ ID NO: 31614 - DNA, 3000 bp, Unknown
  misc_feature (1)..( 3000): 2750-1469P.txt file - cDNA_ID_3044053; gDNA_ID_1972154; Annot_ID_179399
tcgcgagggacttctccttctcctactgtgaattcgttgagtaaggctccgtcccgagggacttctccttctcctactttgaattcgtcgaggccgtggaaaccaccagagatgcctggtttctctttagaagctccaccgaatctgaggacgactttagcagacagaccggtctcagcttcaagaggcagacctggagtagcctcagcaccaggttcaagatctggttccatagaacgcggaggtggccccaccagcggcggcagcggaaatgcaagaaggcaatcttgttcgccgtccagaggtcgggctcctatcgggaacaccaacgggagtctcactggtgtgcgtgggcgagcaaaggcaagcaacggcggaagtggctgtgataacttgagcccagtggctatgggtaataaaatggttgagagagtggtgaacatgaggaaactaggtccaccgcggctaaccgagaatggtggtcgaggatcggggaaatctagctcagcttttaacagccttggatatggtagaaacctctccaaaagctcaatcgatatggccataagacatatggtacgatcacgtctcacaattttagtcaaattttctttgttgagagtagagtagcatccgaaaatcttcgattgagagtttctcacaagctcgctatagattaaacattgggcccaagctggatgatctgactcgcaagaagagtgtttcttaaagttctctggtaataataacacaattgtcgatctttggtgtgtaggatataagacgaggcatgactggaaacctccggccgcttgtgacaaaagttccggcatcatcaatgtacagtgtgagaagtcggccgggtagtgtctcaagctctccggtggccacgagcagcactgtgagctcatctgacccgagtgttgacaacatcaacattctgtgcttagacggaaacgaagccgaaaatgatgatcttcttagtgaaagaagctatgctgcttctccgcggaaccagtaccccaagttcacatcttgacccatattattatgtaatctgtgttcttgttttttgttctcacgcttcgaagcaacttgtttctaagtgatcaaccgtataatctataaacctcaggcatcaaatgtcttttttccttcataaatgttctcccaaagcaattgctaaatgctgtgtctgatattttaaaccaagatatagaacaaagtgagaatcgagaaacagaacaaaacatggaaatagtaaagaagacaaaacagagcatagaagaagaatttaacgagtttggtacctaaatctcgcgggacaaccctctttgtaaatccactaaattacttgaaaatttacagcttttggcatgtaccaaaatggttcattccaatatgaccgatacaaaaaaaaaagttgtacgataagaatctccagatatatatttgaatcttttatactatatgaagggacgaaacagagacatgtaaatgggtttcggttttcttacaagtgtaaacaaaggaacatattcataaacttgtctcgttaggtttataagagagtcaaatatacttgaagaacatgtcgttgtgaggatttggattcggtgaatcgtcttcacgtttagagacaacaagaaatcagacctttaagtgacgagtaaagtaagtagttacatgccacaactccaccaaaatcgtgtttatactttttttttttataaatacttttattactacaattttataacgattactatttcttattgaaaattggtcaaaaacattttagaactttattttactttttttgtcaacaaggtggacttttcaagttttgattttgtggcgcaaataagaaataatggaggattttcgtggaacgatgatgtcatgtgccaactgtaaattcaatttcagaccgcaatcgatagaaattaacaaacgattcgttttaagaaagaaagaaagacgcaaggcaatgtgaaaacaaaaattcctttttggatcattgagttgggatttgagaattcgaactttctctttggatgattgaatgtcagcgtagtgatgacgtcaagtaaaagctcgtttgatgacgttataaaatgttggcaaaaatttcttttttaagagaaaaatataaatgcatggttgtctgaacggcgagaagaacttggtcaaattaaatgtgccgtgtagtttggtcaggtaaacaaaactttattagtaactatcgctcttaattcatacgtatgtacgtatgagtctatgagaacctttcttagttaaacggtacgaggacaattattgtaaaatgtaaaaaaaaggtaggtaagtgatagaatttgtttggcgtatttgtgtgacttaaattgtaataaacaggtctataaaatccattgaagttgaattcttctaaccttgccttagttacaggcagaagaaaataattaaagaagaaatctaatcagtgcgacttttataatagtctcgtcgtgtgaaaaaagtaaaataaaatatagtaataaaagtctcgtcgtcgtgtagctgtcactttcgtttgtcactttcgagcatcagcagccgaacataaacaacaaaataaaattgaataccttttagcgtattcactgttcatgagttctgggtttggtttgctttgtatgctcaacaatttattgacatcttcacgaaaaagtttaaattttaaatcagacaaaagcagtctcatgatttctctttgattaactcaatatagatttcttcttcgcactagcaaataaacacattatcttcttcttcttcttctctcatcgttactttatagatttagtatcgaggagacaggtcgaaattgaggttcttttaaagaaaagttccatttcatatctctatcaaacccttttctgaatattattttgcttgtgaatttgaatttgagcttttttcctctgttcttgggaggaatttttgtctgtgtttgtgatg

SEQ ID NO: 31615 - DNA, 3003 bp, Unknown
  misc_feature (1)..( 3003): 2750-1469P.txt file - cDNA_ID_3044053; gDNA_ID_1971936; Annot_ID_177251
ccgtcgcgagggacttctccttctcctactgtgaattcgttgagtaaggctccgtcccgagggacttctccttctcctactttgaattcgtcgaggccgtggaaaccaccagagatgcctggtttctctttagaagctccaccgaatctgaggacgactttagcagacagaccggtctcagcttcaagaggcagacctggagtagcctcagcaccaggttcaagatctggttccatagaacgcggaggtggccccaccagcggcggcagcggaaatgcaagaaggcaatcttgttcgccgtccagaggtcgggctcctatcgggaacaccaacgggagtctcactggtgtgcgtgggcgagcaaaggcaagcaacggcggaagtggctgtgataacttgagcccagtggctatgggtaataaaatggttgagagagtggtgaacatgaggaaactaggtccaccgcggctaaccgagaatggtggtcgaggatcggggaaatctagctcagcttttaacagccttggatatggtagaaacctctccaaaagctcaatcgatatggccataagacatatggtacgatcacgtctcacaattttagtcaaattttctttgttgagagtagagtagcatccgaaaatcttcgattgagagtttctcacaagctcgctatagattaaacattgggcccaagctggatgatctgactcgcaagaagagtgtttcttaaagttctctggtaataataacacaattgtcgatctttggtgtgtaggatataagacgaggcatgactggaaacctccggccgcttgtgacaaaagttccggcatcatcaatgtacagtgtgagaagtcggccgggtagtgtctcaagctctccggtggccacgagcagcactgtgagctcatctgacccgagtgttgacaacatcaacattctgtgcttagacggaaacgaagccgaaaatgatgatcttcttagtgaaagaagctatgctgcttctccgcggaaccagtaccccaagttcacatcttgacccatattattatgtaatctgtgttcttgttttttgttctcacgcttcgaagcaacttgtttctaagtgatcaaccgtataatctataaacctcaggcatcaaatgtcttttttccttcataaatgttctcccaaagcaattgctaaatgctgtgtctgatattttaaaccaagatatagaacaaagtgagaatcgagaaacagaacaaaacatggaaatagtaaagaagacaaaacagagcatagaagaagaatttaacgagtttggtacctaaatctcgcgggacaaccctctttgtaaatccactaaattacttgaaaatttacagcttttggcatgtaccaaaatggttcattccaatatgaccgatacaaaaaaaaaagttgtacgataagaatctccagatatatatttgaatcttttatactatatgaagggacgaaacagagacatgtaaatgggtttcggttttcttacaagtgtaaacaaaggaacatattcataaacttgtctcgttaggtttataagagagtcaaatatacttgaagaacatgtcgttgtgaggatttggattcggtgaatcgtcttcacgtttagagacaacaagaaatcagacctttaagtgacgagtaaagtaagtagttacatgccacaactccaccaaaatcgtgtttatactttttttttttataaatacttttattactacaattttataacgattactatttcttattgaaaattggtcaaaaacattttagaactttattttactttttttgtcaacaaggtggacttttcaagttttgattttgtggcgcaaataagaaataatggaggattttcgtggaacgatgatgtcatgtgccaactgtaaattcaatttcagaccgcaatcgatagaaattaacaaacgattcgttttaagaaagaaagaaagacgcaaggcaatgtgaaaacaaaaattcctttttggatcattgagttgggatttgagaattcgaactttctctttggatgattgaatgtcagcgtagtgatgacgtcaagtaaaagctcgtttgatgacgttataaaatgttggcaaaaatttcttttttaagagaaaaatataaatgcatggttgtctgaacggcgagaagaacttggtcaaattaaatgtgccgtgtagtttggtcaggtaaacaaaactttattagtaactatcgctcttaattcatacgtatgtacgtatgagtctatgagaacctttcttagttaaacggtacgaggacaattattgtaaaatgtaaaaaaaaggtaggtaagtgatagaatttgtttggcgtatttgtgtgacttaaattgtaataaacaggtctataaaatccattgaagttgaattcttctaaccttgccttagttacaggcagaagaaaataattaaagaagaaatctaatcagtgcgacttttataatagtctcgtcgtgtgaaaaaagtaaaataaaatatagtaataaaagtctcgtcgtcgtgtagctgtcactttcgtttgtcactttcgagcatcagcagccgaacataaacaacaaaataaaattgaataccttttagcgtattcactgttcatgagttctgggtttggtttgctttgtatgctcaacaatttattgacatcttcacgaaaaagtttaaattttaaatcagacaaaagcagtctcatgatttctctttgattaactcaatatagatttcttcttcgcactagcaaataaacacattatcttcttcttcttcttctctcatcgttactttatagatttagtatcgaggagacaggtcgaaattgaggttcttttaaagaaaagttccatttcatatctctatcaaacccttttctgaatattattttgcttgtgaatttgaatttgagcttttttcctctgttcttgggaggaatttttgtctgtgtttgtgatg

SEQ ID NO: 31616 - DNA, 3000 bp, Unknown; identical to SEQ ID NO: 14992
  misc_feature (1)..( 3000): 2750-1469P.txt file - cDNA_ID_3044064; gDNA_ID_2684240; Annot_ID_192547

SEQ ID NO: 31617 - DNA, 3000 bp, Unknown; identical to SEQ ID NO: 14992
  misc_feature (1)..( 3000): 2750-1469P.txt file - cDNA_ID_3044064; gDNA_ID_2684240; Annot_ID_137747

SEQ ID NO: 31618 - DNA, 3000 bp, Unknown; identical to SEQ ID NO: 21458
  misc_feature (1)..( 3000): 2750-1469P.txt file - cDNA_ID_3044109; gDNA_ID_1971948; Annot_ID_177320

SEQ ID NO: 31619 - DNA, 3000 bp, Unknown
  misc_feature (1)..( 3000): 2750-1469P.txt file - cDNA_ID_3044130; gDNA_ID_1971948; Annot_ID_58607
acaacaactccaacatagaaccctcctaaaggttcagggctggatccaaatttagcagacgagagatcccagaaaacatcgatattacaggcatacgcctctagagtcttggacccttttcgtttagtgaagagccacggcttaatctcgactttacacagacttcggttgcaagaatcatcaacccccacggtaacacactgacccatcagattcttagtccatgtgactgtgatcaagcaagtcctacctcggatgcggcaacggtagatgcatattaccaaattctgagcatttcttccagcgctcgaggaagacgaagagtccgcaatctgaacaccattttcaccagagcaagaaggaaaatctctcatttttttttccttacagaattcccaatttcgagcttctctctctctccggaatttcaacaaacaccttgtggccaaaactgggcaacgctgagaaattcaaaggcggcgaatttaacttcagtttagtaacgaaatttcgtaaaagcaagtgtttagactataggatttacctgaaagtgataagtttcatcaaaagaaagagaaacccaatctcaaaaaagcatcgaaatctggaaaaatgtcaacagatttgatctgggttctatcaaatcgatccagtttcatcaaccaaggagagaatgagaagttaagagaaagcctgagactccgggagagagagagagagaatgcacaaaaggcgaaattcgccaaaatagaagagaatgtgtgtgtgcctactactgtagtcaaaaataaaagacagaaacagacaaaaaggaaactttgttttcactgtctgagtcattttttctaaaaacgttaaaataattacccgattttcttggcaaagtaccaaattcgaatttaattcagcggaaaacgactgtaacaataaatttcggacaaaaacattatttacattcttttcttttttacatcatcttagattttaatcaaaaaatttacaaactttggttcgaactttgttatttttgacacaaatactcacattttcttctgtgctttaagttaaataataaagggttttaactttgtctcattatagtgaattttttatgtatattcttaaaaaaaaaagtaggataaaaattaaaaaagtatatgaaaggctggaaggaatggttgccacgtgtggtatgataaccattggtatctcatgacttgtagtaggcatgtagttaatacccacgattgagcccactctcactgctctcttgggctttcgctaatggattaattagtcatataccgtttttagaggtagtttagcgattgaatttttcatacgataatcaatcatatgtcttgactcttcattccattgtcaaccaaataggtgggtgaagagcatatgtttaattatcaaaacgaacaaagttatcataccaaataggttaaactgtttccttttgtttggcaatgctaccgcaaaagtcttggaataattaattatcattatgtatgtttccgattgaaatttggaccaacctgtaataaagcaggtcccagtagtttaacattattttcttgggatctgattttttatttttttattttatcgtagtctcattttcgttattaatattatcgtgttgttggtgtcgtttgttattttatactagtattgatttaaaattaataatatgtctccctatctacttgtgagcgacggacatcttctcaaaacagaagataaaaatgcaaataaaaaatcctaaacattgacaaagattgtaatttgtaggatgagtcgtttctttcaagaagctataaaatcttaaaaacgttaaaacaaaacagaaataagtgatactaggatttaacccgtggtacaccacgggacaaatattttatttatatatataataatattaaattttatggttttaatttaatattaaagttatataattttatattaatattgtaaataaaaaattagtgatgataaaataataaataaatatttaacccgtgttatatcaatccaaatccgcttcactatataacttgtctcatgatatttttattattatttgttttttgggcaaaatattttaattattttagaagtttaaatttggaaagatttaaatgattttaagttaattttaagttagtgtgtagtatattttagtttagatttgaaaagatttaaatgatttctgtgactatttttctttttgttttctaaattttagtaacaaaattgatttatatttagatttaagaataaatttattaaaatattaaatgccaatagcattggattgtaaataaacctcaatttcaggatttatggatttatttcataaaagtgttgcaaaaatatatatatatagatgttgccaaacaaaaatattgttttgggtctcagcctttttaaatacaccagcccatatttgattcggattatcatttcttgagacttaacaacgaataaccgagattatagcctaaacgttttaggcggctaaccagagaatcaatttctatgtctctcaactcaagtgaaaagttaaaactctttctttcgaacataaactaaaaggttaggaaagctcgaatcagattattaatttttggtaatgtgaactaaaagtttagtaaaaaatcgtttcaatctttttcttatctaagtaccatctaaaatgggtttaggctcaattcttcacctaatttcatttcgaataggttttgatcatataaaaaagaaaaaaaattggttaagcgcactgaagacagttgttagcaccacagagttttatgaggagagaaagcatcatacatcatcacaaacaagtttcttcatcgctcattgttagtcattagtactttacttcttccttcttcctcttttattataagaagagaaagaaaaaaacatcatcttttttttcttgaataacagagcgattgctcttatctcagttgattggccatg

SEQ ID NO: 31620 - DNA, 3000 bp, Unknown; identical to SEQ ID NO: 31619
  misc_feature (1)..( 3000): 2750-1469P.txt file - cDNA_ID_3044130; gDNA_ID_1971948; Annot_ID_177311

SEQ ID NO: 31621 - DNA, 3000 bp, Unknown
  misc_feature (1)..( 3000): 2750-1469P.txt file - cDNA_ID_3044134; gDNA_ID_1971948; Annot_ID_177301
gctctaccaaataaccgcgtttagaaaacgctattagttaccgagtgtggttgggaccgagtgaggacgtcacggctccaaccaatccgcaaataaggaagcgcgtgtgtgtaagtagtgggtgaccactttgcctagtcttaaacgttaagtctggaaataccaaaactacccctggtttggtcgaagattctcacgcccctaccacccaacccaatcacaatcctcgtgaacgaacacaccaccttctctccaatctggatctggttcctcttcttcttggtctcttctccatctcatcggagctgatctcgaattgttctccgttcatttgttacggtggagatgacatcggatcaccgcgacgctcttttctctctggaactggaatcgcctgatccggacgaaggaggtgtagcagacggaggagaatctgataccgacgaggatttgcgcgacaacgatgatgttgttatgccgggaacgaacgaagctgaagctgaagacgacgatcccgaagaggaagatctcaattctccgtctacatcatcactccccatggtttctacgatctcagcgactgctgttgtttccgggaccccgacggcgacttcctctacaggcgccgtgaccgttgcacttccggctggatccgccgtccctgtctccgtgattcccgttgattccgatccgaagtggcaccgtatgacggagatcgtccatcagagaccaccgatcgatgattctagacgccttttccagaggctgtggacagacgaagacgagatcgagcttcttcgtggttttctcgattacatgacgatgcaccgcggaagcagctcgcatccgccggatacggcgccgttttatgagcagataaagtcgaaacttcagctggatttcaacaagaaccagctggtggagaagcttcggagattgaagaagaagtacaggaatgtgatgagcaagatcagctctggtaaagaggtattcttcaagagccctcatgatcagtctactttcgagatttctagaaaaatctggaaccaaactgggaaaatcataggctttgaagataacaacgtaatggatttcgaagaaaccaataaccatcataacaccaccaatggtaactactcaacctttaacagccctagttctaatcctactctggagctcgactccgaaaatggaatcgagaagaaattgacaatgagtagcagtagcgtgtcgagaaaacgatcacgatcaagaattgggaagattgaggaagacaacaaacctgtcatcactccctctgatgggccaatagctagcaatgtcaacctcaacgaagctgcagctgttggtattggaggaaatctcgggggtttgatcgaagagactgtgaaaaactgtgtctctcctgtgatcaaagagatgatgaatgggacaacaagtatgatgatggctgcaatgggaggagggtttccgggtcttggtggtggtggtggtggtggtggtggtcatggttttggctcgctaagccccatgtttacacggccgttcaatttcggttttggtgtagagggaggaggaaacaaggcggttgcagatgagcggtggaggaaacaacagattctggaattggaagtgtattcaaggagattagagttggttcaagagcagattagaacgacattgaacgagttaaagacgatgccgagtggtatatgatgaagggcgagaagaataagacaacaaggaaccatttaggttgatatttgatatctttgagttaaccttctggtgtgtgagtgagtatagtaagagatttggatctttttaagttataaattggtaaggtattgtgatctttctctaggttttttcatcattttgatttttttttcttcttcttatctttaaattatttgtcaatagggatgaatcataggaggggggtttgtgtataaccttttgtattagattatagttcttttttcgtagaatcatttgttcaataacaaacagactttctagctgtttttctttcaaaaagaagaaaaataataattctaaattgtgtgctactctttctttgtctaataaaatctgtaataacatgtttatttctagatcggatactgttattgaagtgtattaaactttgacctctttctttatcatgttgattaatgtagttacttaaaaacttttgtgtttgaaaaaaagaaccaatgttgtgtttcttgctagtacgcatcagaagattcctttcctgattaagtaaaaaaaaaaaggcataatcaaaacaatttaaagattcaagaaggcagaaacttgtccacgtgacgaggcaaagaatgttaggtaggtttgttattgactttatagtttatacaatgattttaacaaaatacctatggaagatacatgattattttttataaatgtataaacgagtggatatatttggtggtggatgatggtgtgtgtgtatatgcaaataattcactttataaaagcttatcgctaatttgacagaacactagaacagttctctctttttgtcgacagtcttcttcttcttcttcttcttcgattggatctggaactggtaagctcttctataagtctctggttttgtatctttcgaactgttcttttgtttctctctccaaaaatttcaaactttcataatttcgcctcctcaagttcgatttcagctcaagaacacgaatgcttcactcacttgtttcattgttaaatcttatatttagtttgatactcatgttttctgctgttcgatttttttttttctctgatttatattcgagtttgaacttaaatcatggttttggtttcactttacaattttggatctcatgcagtttcaaaacactcttcgatttatatgaatgttttatattattagggacattgcttgcagactgtgtcttaaatctttttgattttcttgtgatcttcagaactcaaattgggaagaattttgacatg

SEQ ID NO: 31622 - DNA, 3000 bp, Unknown; identical to SEQ ID NO: 8976
  misc_feature (1)..( 3000): 2750-1469P.txt file - cDNA_ID_3044167; gDNA_ID_1972049; Annot_ID_178321

SEQ ID NO: 31623 - DNA, 3000 bp, Unknown; identical to SEQ ID NO: 8976
  misc_feature (1)..( 3000): 2750-1469P.txt file - cDNA_ID_3044167; gDNA_ID_1971952; Annot_ID_177366

SEQ ID NO: 31624 - DNA, 3003 bp, Unknown
  misc_feature (1)..( 3003): 2750-1469P.txt file - cDNA_ID_3044171; gDNA_ID_1971952; Annot_ID_177365
cctaatattcaaaatcgtaaaaaaatgtccctgaagaaggagatgtgggattccaacgaaaagacatgcgacgattcgaaccagcctatacttgtcgtggacctgattagatcaatcttggaacgtttgagctttgttgatttccatcgagccagatgcatttcttcattatggtacactgcttcggaatcatgcatcggaggaccatcaactccatggatcatcctctttccgaacgaatttgttgaaagaaacaacgattcatgtaagttgtatgatcctcgtaactatagttcctacatagtaagagatctcaggtttgatatggctaggagtcgttgtttggccagtccgatagctggttccttatgttagactataacaacgatttccacgttttgaatctgtttactcgagagaggattcctcttccgtctctagaatcaaccgatggatttccgatgaatattacgaatagactagacactgcggttttgtgggtagatgaaaaaagcagagattacttagttgcttggagttacggtgacatttttgcatatcgcaagaatggagatggaaacaatagctggaaagtgattgagcctttaaagaatcaacgatgcgttgatatggtgtgtaaagaaagcaagctttacgtgtttagtgatactcgagtcactgtgtttgatttctcccgtagtgattctccaatggaatgtgcaagtttattttttatctggagtttcacaaaagtcctgttgtgactttgtctggagaagttttggtcattgctagcagagtggaaccacatcctgggacgttcttattcttcgtctacaagttggatcctaagtcatcaaaatggagcataatcaaatctataggggacgaagcattgattttggatcttggaataattgttgcagcaaaagatggagttatgaaaaattgcatatatttagtaatgatcattttcataagtacagtgggattagtctatgcggtgataacggtaacagtattttcatctaccatattgggaccaaaaaggtgatccaagtgtttgaacatcttactgcttcattgccaatactattcaggatgctcgttggtttttccccactatcggtggaaaatgtttgctttaaaactatctagttttgtcttttttgtaaggctacattatttgcttgtctctcgtggaacaagagtgtttacaagttttctttttatattcaagtgttttggacttagaaaggtttgaaaaatcgtactcaaattatctatatatcaacaactaatcctctttagatggttttgtttttgtagataaatttggcttttagttcccatcaacatttcttccatgggtttaagtgttgatcatgagcttaacaagtcattagctatatcaaattaccaaaagactgattctcaaaaccgatcaagaaagagcatcattttataatctaactcgtgtagagtactgaaattttgatttggaaattaattctcaccgacttaacatggaccaaatgtacttgatgtgcaccgacttaacatggaccaacttggtcgatatcaatacaattctggacatctagaggacgcttatggtacgttgattaggcttcccgtgtgtattttgcttgtgatctcggcattccattgccgaaggttcgaggatgcgcgcattctttcgattgaactatctacaaacgcacccaagcttgatgacgctgatgacaggaaagcaatccattataaatccttatgtggacgaggcttagccaacatggctttaggccactattacacagccgctgttttggtacgtaaactcatatagatatatttatgttttgtttataattatgtttggtataacttatattcatcaatatttattgttttcgcagtttgcgcatttggtcaaatgctatgccaagtggtcaaaaaactcttttgacctctttacttgggaggatttgttcatgtacacggcatggtgtggtcttgccacgatgaaaaaagatgagcttgaggtaatacaatattaatcgattatatatatataaaaataaataagccgacttgtaaactttttttattgatgattttttaggagatttctgagaggatgggaagtcaaaaagttggccaccatttccaacacttgattagaaaaactcttggagggtaatatataactcttaaaaaatttctattgaatacacttgtcggcaattaaacaagcttggtttatttgttgcaggatgtttaaaccaccatgcttggattttttgaaaactcattcaaaaccaaagcacttttggacttatacctccacgaccatgtgaatgctcttgagatcctcatccaggagaaatttagggtgtgatgcatggttgctttaaaactatctagttttgtcttttttgtaaggctacagtattttcttgtctctcttggaacaagagtgtttgcaagttttcttttatattcaagtgtgttggacttagaaaagtttgaaaaatcgtactcaatatcaacaacgaatcctcttaagatggttttgtttttgtagataaatttggcttttagttcccaccaacatttcttccatgggtttaagtgttgatcatgagcttaacaagtcattagctatatcaaattgccaaaagactgattctcaaaaccgatcaagaaagaaagcatcattttataatctaacttgtgtagagtactgaaaatttgatttggaaattaattctcaccgacttaacatggaccaaatgtacttgatcattttcaatataacaaactagtgcaccgtaccgtattataaagtctttatgtatttttttttaatataaaaacattttcagatatatttatttccaataaattcatttattttaagaaattaaccaaaaagaaataaaaatgaacaaacatatataagtatcttgattagaagaagcaggagacaaaccctagatg

SEQ ID NO: 31625 - DNA, 3000 bp, Unknown; identical to SEQ ID NO: 8964
  misc_feature (1)..( 3000): 2750-1469P.txt file - cDNA_ID_3044175; gDNA_ID_1971952; Annot_ID_58631

SEQ ID NO: 31626 - DNA, 3000 bp, Unknown; identical to SEQ ID NO: 8971
  misc_feature (1)..( 3000): 2750-1469P.txt file - cDNA_ID_3044175; gDNA_ID_1971952; Annot_ID_177355

SEQ ID NO: 31627 - DNA, 3000 bp, Unknown; identical to SEQ ID NO: 8962
  misc_feature (1)..( 3000): 2750-1469P.txt file - cDNA_ID_3044194; gDNA_ID_1971952; Annot_ID_58624

SEQ ID NO: 31628 - DNA, 3000 bp, Unknown; identical to SEQ ID NO: 8974
  misc_feature (1)..( 3000): 2750-1469P.txt file - cDNA_ID_3044194; gDNA_ID_1971952; Annot_ID_177345

SEQ ID NO: 31629 - DNA, 3003 bp, Unknown
  misc_feature (1)..( 3003): 2750-1469P.txt file - cDNA_ID_3044198; gDNA_ID_1971952; Annot_ID_177343
taaatgctctctcaagggaccaagtctcattattaccatcacctccgagcgttctcttctctccatctgtctgccgctcctttaacgtcggttcccattttcttattcacaatgaccccaagaaactcgaggagatggaaaaaagcaaaaggtaaaacaaaaacaaaaaagctttcttcgagaaccagagcacattgattccaaggtaattactttctcaatgccatggaaaaggacccattttgttcccctttcctgtaatctaatcgtttcaatccgtgattatctctgtcagcttggaggaaatgacttagatttcataaatcgattcatgagttgtcagaaaggatttaaattttgttggtttgttcttatttcttctgtagctgctatgaatttttagatttagtttggctatgattctaaacctacgtctttatgaaagcacttacattttctagacacaagatcatagtgagttcatatgatgcggaaaagttattattctcttggtcttccagtttatatttatggaggaacatagtctcattaacaagcttgcattgttctgttccattggattgttataaaaatattcattggtcaattgagaaatcagtgtctaattttttttgaacgtgtctttgcagattgaatgctgtttctggtggattagtttctctgagttttggtgatagatcagattaacaggcagaattttgagaatgtcgacagtgggaaattcaacgaacatattttggcaagaatcccccattgggaaaactgaaaggcagaagttgttaaatcagaagggttgtgtggtgtggatcacagggctcagtggctcaggtcaatcttctaaaaaatcttaaattcttttcccattgtgatacttacttaagatgccttctttatatctctgtctatattctaaaatcttagcctcaaactttgtgcagggaaaagcacgttagcttgctcgcttagtagagagctgaacaaccggggaaagctatcatatattcttgatggtgacaatcttcgtcatggtttgaacaaagatcttggtttcaaggcagaggatagagtggaaaatatacgcagggtcggtaagtagtacatagttgcttactatcttttgctttcagttgatgaaagtctgattccgaagaaactcactaatacaaatgcaaatcctttaaaaaggtgtctcatatgtagtgatagtttacatggtaccaatacctcattgatatacatattggtatacacctaaaagctgatagattctggttaatgttgaaagaaacttctctaaagggcaaaatactaaagaagaccaacaatttgttctaaatgcaggagaagtagccaaactctttgcggatgctggtttaatctgtattgccagcctcatatccccgtatagaaaagaccgtgacgcctgcagggaaatgatacagaattcatcttttattgaggcaagctattcaaaaccaggctttacagtttgtaacccccattcggttggatcttaaaaacatcttgtttgatattgtggccaaatttgttaggttttcatgaacatgtctctgcaattgtgtgaagcaagggaccctaaaggcctatacaagcttgcacgtgcaggaaagatcaaaggtgagataacatagcttcaaggttccatataaacagaagatagcaagttgcttcaatatcatttgagttgttctataaaagtttttttttcttcatacccttttgtgtaggtttcacaggaatagatgatccgtatgagtctcccttgaactgtgaggtatgtgatccatgtgaacataagattcttcttcaagaatattgcaaacaacgcgtatgtgaatacgtttctctgtttcttttgtatgttttgaaacataacagatagagttgaaagagaaagagggagagtgtccttcccctgtagctatggctgaggaagtgatctcttatctagaagacaaaggtttccttcaaaacgagtaacgtccatcataatctaacgaccgagatttgtttttccttttactttttatgggtgttctctgtttgttactttcctgaaacactgcaaattcttaagaagtttcaactaatgaagacatatatagcttcttctccttcttctgaaacttgtcttctacactgaaactctagtcagtcaataccagaattcgatcctatacaacaacaagagccatgccattgttttcattgttaatttatactacgatacaacgattatactaagacaaccattaatttacatagtgtcatagtatttagaattttagtttttttgggggtcaaaaacaatagttttagttatgttagtgaataaatagattcagaaaaaactgtcgatcttatttgaatagttcgtaaaagagagggttctgtttgcaattttcctaacttttagatcctgagttctgcaatataaataaagaacaaaacaaaacacgatcacgaggcaattttgagacaagaatggtgttgaatagtcgattggtggagacaacagttaatctgtcggcggatctctggcaatatgttgcgtgtaaccccgagatacttcctcgcgccaccgtcatccatttcatcttctgcatccctctcctccaactccgccgtctcgcttcctctctaggatcatacctatgcttcgattccggcgccggagttgatcaccgtactcattccgattaagttaccggcgcgtttccatgaatcgtctgttaaatttcgacttttgattgtgtaatttttgttctgattgtaatgtaattttgtttgtttgtaaaccgaaagggacatacaaatttaataccagaataaaccggaaacatttaaatacacacagaaccaaaccgggttgtgtggaattgttgtcgtcacaggagagaaataagcagagacgtgtaaaccaaagaacaacgaaggtttcgtttcgtggggaagaagatg

SEQ ID NO: 31630 - DNA, 3000 bp, Unknown; identical to SEQ ID NO: 9379
  misc_feature (1)..( 3000): 2750-1469P.txt file - cDNA_ID_3044202; gDNA_ID_1972110; Annot_ID_178737

SEQ ID NO: 31631 - DNA, 3003 bp, Unknown
  misc_feature (1)..( 3003): 2750-1469P.txt file - cDNA_ID_3044202; gDNA_ID_1971952; Annot_ID_177342
tgttttggtttgatgaaaaaaaaacagagtaaaacaaacctctggatgatatctgattccacctttcatgggacctcttgcattgtcgtgttgaactctgaatccaacaaaggatgctagagttccatcgtcttttggtatggtacattccacctgcaatagttggttagttccgttcaaatgatcttgaaccggatcggttctgcagatctgttatagatggaagaagaaaacagaggaaaacatcgaaccttgatctctctgaagggaatgagaagacttttctcgagctttgagtctaaaccaagaagcctagaagcaagcttgaagtttctgttggttgctgctaaagcattcatggctttcttctctcttctttattttgggtttatttgatcagagagtctgatatgaagacagttggaaaaatgtgagtcttgcttatgttattgcaagtttatttatatagagtgatacgtacacacttcgtgttatggaatatgagaatgaaaattttgttatttatatttataataaaagataatttatataaggaatatgaataatcatataagatgatacccataattgatcctgattttgagtattcagaatactatgtgtctgtttagcaaagttctcacacaaaaaaaatatatagattatagaaatagcccatgtcttcaccatgtgtataaactagatcagaataatggaatattcattaatgaaaaggaaatccgtagactaatcaagcagaataaatatattcttttcattacaaaaagatcagaataaaaataggaaaaatcaagatttcacaagattataaatattacatggatgaaagagatagctcgtaaaatttatcttattgtgtcacacactgtcattttattcattttaaatctagattaaaggaaaaaataacatttcgtattacctaattagtacccacctaataagcaaggaccaagatattgtttttcagaatttgtttttttttttaaataagaaaatatgatacaataatgatctagcaatagcatgcattggaccggatgactatactcgtgcatgaaaaatcatagtcaaattgtaatacgttaatgtgggacgataataatactttttttttgttttattatctacgattatatatatattaataatcatttacatatttgtgatatacgacccgaaatgaatcttgcatgtcataagatctttacgtgttattaacttattcaattctacttgcccctacacatataggcatagcgtatacacttttgtgagagggtgacaaaaaaaaacgtatacactttagtgagctagtgggaaaaaaacgtataaacttatcacacacatacaatattcagttttaattgaaaagattctacggatatatgtttttttagatactcaaatcagaatctttttggaattagaggaggacacgagaggatgcaacaaatcaagaaacatatagaattacaagattccaccatgaaagaatctttttggaaaagagattccccatgatttatgcttccactaatataattgatttattgtggatttccaccaagatttctttctctttcaatttccaaaagaagatatcaatttcgtaataacaacattgaccgtaaatagtgtttccaaatttgatctcaccctctttggtcaaaccaatatatagaaataataccccaataaagaatccggttcatggtaggcttggtagctaatgtcaaggatttagtatttttaaaacgttatgcattagctttctatcactttttaatacatgaaaaaaaaaaaaaaaaaaaaaaccaattggactttctcctaaaaggccattccctaataaacaacaaactacgaaaagctaaacatgtatttaaaatattaaagtgatagaaagctaatgcataacaattaaatgaagcaatttttttatattctttggtcaaaccaatatatatacagaaataataccccattaaagaatactgttcatggtagctaatgtcaaggatttagtatttttaaaacgttatgcattagctttctatcactttttaataaatgaaaaataataactcaaacaaatataaaaggccattccctctacgaaaagcaaaacatgtatttagaatattaaaaagtctaaaatcaaacctaaaattcaaaaatcaattaaaggccacaattgtcctataaaattatgggcttgaagcccaataatatctaagtgaaaaactaaacttaaatgctctctcaagggaccaagtctcattattaccatcacctccgagcgttctcttctctccatctgtctgccgctcctttaacgtcggttcccattttcttattcacaatgaccccaagaaactcgaggagatggaaaaaagcaaaaggtaaaacaaaaacaaaaaagctttcttcgagaaccagagcacattgattccaaggtaattactttctcaatgccatggaaaaggacccattttgttcccctttcctgtaatctaatcgtttcaatccgtgattatctctgtcagcttggaggaaatgacttagatttcataaatcgattcatgagttgtcagaaaggatttaaattttgttggtttgttcttatttcttctgtagctgctatgaatttttagatttagtttggctatgattctaaacctacgtctttatgaaagcacttacattttctagacacaagatcatagtgagttcatatgatgcggaaaagttattattctcttggtcttccagtttatatttatggaggaacatagtctcattaacaagcttgcattgttctgttccattggattgttataaaaatattcattggtcaattgagaaatcagtgtctaattttttttgaacgtgtctttgcagattgaatgctgtttctggtggattagtttctctgagttttggtgatagatcagattaacaggcagaattttgagaatg

SEQ ID NO: 31632 - DNA, 3000 bp, Unknown; identical to SEQ ID NO: 8996
  misc_feature (1)..( 3000): 2750-1469P.txt file - cDNA_ID_3044221; gDNA_ID_1971953; Annot_ID_177411

SEQ ID NO: 31633 - DNA, 3003 bp, Unknown
  misc_feature (1)..( 3003): 2750-1469P.txt file - cDNA_ID_3044226; gDNA_ID_1971953; Annot_ID_177408
tccttggattatgcacaccaatctcccctagtatctctttcaatgttttgacaggtttatctctgtttgtgcaaatcagataactcctaaggtgctgcaagtgtgggctaggatactgtgtgcagttcccaattctcgtctagtggtaaaatgcaaacctttctgctgcgatagcattaggcagaggtttctcaccacgctggagcagcttgggttagaatcaaagcgtgttgatctcttgcctttgattcttttcaatcacgaccatatgcaagcctattccttgatggatattaggtaagatttgacacatagtgctctgtaaaacaccgaggcttatagattcacatatttaatttacatttattgcagtttggacacattcccttatgctggaactaccactacctgtgagtctctctacatgggagttccatgtgttacaatggctggctcagtacatgctcataatgttggtgtcagtcttctcactaaagttggtaagctcttagcaaaatttttttttttttttttgcaaaaattgttgttagtcggacatcttttagctaattcagccatttcttgattcaggattaggacacctggttgccaaaaatgaggatgagtatgttcagctatctgttgatctagcctctgatgtcacagctctttctaaattgagaatgagtctccgggatctaatggctggatctcctgtttgtaatggtccttcctttgctgttggtcttgaatccgcatatcggaatatgtggaaaaagtactgcaaaggtgaagtgccgtccttaaggcgaatggaaatgctgcaaaaagaggtccatgatgatcccttaatctcaaaagacttgggaccatcaagagtcagcgttactggagaagccactccgtctctcaaggccaatggttctgctcctgtaccttcctctttaccaacccaatccccgcagctctcaaagagaatggactccactagctagataaccagcaaatcgagctgctgcgaaatgccggcagagagtcttgacccatctggaaaaggtgtgaaagaaagagtcgatgagcttttcctgctatttacttccaagacaataggaactagactttagattactgcttgtgtagtaaaaagaatagtaaaaccagctctttcttttgttgtatctctttctactcttagtttagctttacatgattcttgggaagtcgttaggtggtagtggatttggagtttttcttctcatttgagagatcaagttgttgtgtatcgattagggttttaaggctttttaggatgttttcatgtgttggattttgactcatatgatagtaaatatagttatagaaagcttttcggtgcctttacctatttcataatataattatctaaaactcctgcttaagcttaatcccataggtgagacccaatgaaagacttttgacttgtatgattatgttgccaactccatatctctctttaattaattaatatggagagagtaaaaaggcaagcaactaactactcttcaattcaacacttcttctgctccattgcttccaccagaaccctaaagaccttataaaacccaatcccaaatccctttgctcattcaccaccaaagcatccaactttctttgcttcctctttcaaagcaacacaaaatattaaatctcaagaaacaaagtaaagaaaaatgaagaacgaatctaccttcattgatgtccctgcagaatccagctcagccatgaaaggcaaagctcctctaatcggtgtagcaagagaccacactactagtggctcaggtggatacaacagaggactcgccatctttgacttcctcctccgtttagctgccattgttgcagctttagctgctgccgccacgatgggaacaagcgacgagactcttcccttcttcacacagttcttacagttcgaagctagctacgacgatctaccaactttccagtacgactcatagatgcttgattgatcaaacagatgcttgtgtttttcttgagaaacacgtcacctaattaggtcatattttttcttcaggttctttgtgattgccatggcccttgtaggaggatatctcgttctgtctcttccaatctccgtcgtcacaatccttcgccctctcgccaccgccccaagactcctcttgctcgttcttgacactgtatacactcaaaactcttcaaattatattgctttaaaataaaactttagtatcaagtaaaatactaagaattgtgttgggaacagggggtcctggcgttgaacacggcggctgcatcatcggcggcagcaatatcatatctagcacacagtggtaaccagaacacgaactggctccccatttgccaacagtttggagacttctgtcaaaaatccagcggagctgttgtctctgcctttgtctccgtcgtattcttcaccatcctcgttgtcatctccggcgtcgctctgaaaagacactaatcaaaaccttatatgtgtgttcatcattattgtaaaatttatgtcaccattgtgtaattattactcatccatggccttgtgaattgtgttgtattaatctttttaaaaaggaaaatgaaagtgtgattgtagctctgcttttctggaaaaaaattgaaatgagtttctcaattttttgtccaccaaagcctatgagattataaatgtctcctatatttgtctctacgaaaatacccggtaatgataatgttacagtgagtagcagagaaatatcttacgtggtgttatcttagtggacgttcacggagttgtcgttggtcataatgtttctgtcttcctttttttggtttaaggataaacgagccttcctggtgccacgtcaccttttcgtcttctgctacttcgtcttcttcactaaatgattcagtattttctcctcaatcttctccattttctcaccaaaccaaaatcgtgaaagaatattttcccgcttcatgtagatg

SEQ ID NO: 31634 - DNA, 3003 bp, Unknown
  misc_feature (1)..( 3003): 2750-1469P.txt file - cDNA_ID_3044230; gDNA_ID_1971953; Annot_ID_177406
ctccggtcaagaacttcgctgcgtctatccacctgcgttttatggacgagccaatttggtaatcgatctttcgtttaactcaaagaagcaataaagtctctagtaactaaccctccaccgtcccgactaataaggaattgggttgagcctcctccaaagaacatacaaggcataggcaccactacatacatgagtgctgatagcattggccaccagttaccatatatcgcgcatgcctgaccattatgaacaaatagttatcactatatctcccagatgactataacacgtgttactcattgcatggtataaccaggtataccaaaggaaatcacaaaatatgggaaacgtatcagatttgtaaatcagatgatcctttcttcttctaatcgaagtgcaaaaaaaaaaaaaaactatacctatacaaggacctgatataagctgaggagagaagatgcttgagtttatagaagttgttcagaaagtctaagtcaattaacaagttagacattgaggtcggctaaggaccccagcttaccatatgctccggtcaaatagtgttgtaaggataagaattctaagtgtaattttggtttttgggatccagagatcgctagtcaacatactacaagagagtaaagctcaaaacttcaaatatgaaagaaggtttgaatgtaacaaactttacttcacagagtatctctcccagtaaaacgggccaaaagactcacaactctgtttgctacatcaacaagggtacaaaaggagaccagtatactcagctcacaacctaacagcagaactagctaaccatctcttgcaggatttaaagctactaagtcatgatcttatgatcaagcttcaagggttataagcagatagctatattcagaaacgtaccaggatctgtaggaggatactagatgaaaacatgaaagcaagtccagcaagtctgtgcaatcaagaaaaataaaatctgtaagatcacgacacacgagaatacactggcagatgtaacaacaagggtaattaaagagcatcaagtcttagaacttacactgtaccaagaaagcaatttgagcattccagaagaaatcagcatcggaaaaaatttagaaaagagcaaacaatgagtgagtttgaacaatgcaaaacccagaaaccctagctcacaaaattaaacaattcacgaagcacaaaataactataatctgagtaaatcaataccaatctctaatacgtatggaatatatgaacatagagcaagggagaaaagtaaaaggggaaaatcgacttgaatctgattcgattccgtcgggaaatgatacagttggaagataggtgattgattaccttcgatggtcatcgccatgtcggcgaatgaaaatgttctgattaccggagatcgagtcttgaatgatcgccggtgacgataaaagagaaggtgatgatttcgttgttccccttagagagatacagaaggagagagcccagagaggagtcgcgatttgagagcaaaatgaaaattagtgaccggtcaaaattggttttctcaccgttcatcgatttcatctttttggtttggttggtttattttggttataattggtttccaggattgtggttttgataatacagctagtagtcgattttaaaatatcacaaactaaatgacatgaaaaaaaaattacgatcaaaatttgggttgcaaggaccacataaaactcattcctaaatcatacgtaataaaaatgattttataactgaaatttttaaccaaagttcataccaatcatcaaaatatgtgaaatgctaaatatttttttcttttcattttttgttatttaaatgcaatcaactatgattgaaactgcatcaacgaaaaagtattattaaactattaagcaaccataagttgagttgattcgtttccataattttagttagagtacgtaaatctccatcataatacactatctatgctatcattgtttgttttttttttcttttttttgctaagaatgtaaatatcattagaaatgaaatgtttggtattacaagagacgtattacctaaattaaattaaccttggcaaaaagaaataaaaacaaggttaagataaagagtagttaatcaggagagattaatggatccaaagtagcataagttgtttccaatgctttctatgtcttcgagaagtaatggtattgcgcacctcacgatctatgctatcatggttggtgcgtttatgacatgctgctgctggtgacgattcaaaagtgtttatcagttgttcattatgatgccattgtgatgtaccattactaatttcttacttaaataaggtgttgttttttgttttgctccaaataataaggtgttgtttaaaaggggctctttcgttttggagtaaaagtctctctgagtagctgtatattatttaagtagcatagtccaattatttgacaatgaaaaaaagtgtatagtccaatgaataccaaatgaattgacgtcaccactagttgagacctgagacaagcaagtgatcgttaaatcaaggagaacgcaagtggacgaggccgacatgatcctaactattggactcccacttgtgaaacttacttgatccatttcccacttcataatttcgtaaaaaaattaagacaatgagaatgaatttatttatttatttttcggtagaacaatgatttttattttgtccaaataaaacaatcgtgaaaaattatgttttggacattatcaactttgtgagtaaaacaaattttgtagtttcttttaaccaatattttcgaagtcaacttttttctacgtgtgagtgtattgagtaaatgatagatatgtcaataataacataactcatcaatcaatctggcttcaatagaactagagaagttataacgtttttttttttttagacaagagggttttataactctagactagtttcatagtccatgaaaaaaacatcaaatctcctaaatg

SEQ ID NO: 31635 - DNA, 3000 bp, Unknown; identical to SEQ ID NO: 8990
  misc_feature (1)..( 3000): 2750-1469P.txt file - cDNA_ID_3044234; gDNA_ID_1971953; Annot_ID_177403

SEQ ID NO: 31636 - DNA, 3003 bp, Unknown; identical to SEQ ID NO: 21482
  misc_feature (1)..( 3003): 2750-1469P.txt file - cDNA_ID_3044238; gDNA_ID_1971953; Annot_ID_177395

SEQ ID NO: 31637 - DNA, 3003 bp, Unknown
  misc_feature (1)..( 3003): 2750-1469P.txt file - cDNA_ID_3044247; gDNA_ID_1971953; Annot_ID_177386
atcctggaataataatttgttgagaatttaattacaaagtaaacgatgacttacatataaaattcgtaaagtcttggtcaatcttaattataaagaacaagttggtcattgcttattataaaaaaaaaatgaaaatgcttgttgtcaagtaacattaactccattttttcttgcatttactcaacttcaccaaatcgtagagaagttggagaaataaatgatcagaaacacacatcaatcgcaaccaagcggtcaataaaatactaaatagacaaagaagaagtagctccagctcctccgccttggattatttttacaccggagaagcaaaaaagaaaagaagatggacatgaaagaagtgcctccacctcctccaccttctggattcaaacgatataagaaaaaaagaagcaaaaagatggacaacaaagaagtgcctccacctcctcctcctcctcctccacctgttctgcctcatatccgatcaagaaaaaagatggacatcaaagaagtgcatctacctcttccacgtcactatcctcctcctcctccgcctcttccgcctcctccgccttatggattcagacgacatcataaccaaagcggcaacgagcttgagaaacgaatagcacgtctaggctttccaactcttcgcccttttcaatccaaacgatatgataaccaaacccttccaaacccaagatgtcctctgtctaatccaacctacccccacacactcaatcctaagttcagcgtaaacactacaaatggttgttttacatgcggtgaaaacacatccccctggattgaccaccataatgtccatttcttctgcaagaggtgccatgtcgagttccactttggttgccacacgtaccctagtgagttaacacatccttatcacctccaacaccctcttattttcacatttcataactatcaaactggggtcatatcagacgccaggatagatgaatccttttgcactacagttttgtctggctccgatcctaagaagtctggctctatagataaatgttcatggtgtggaaaaaatatccaagggaattggttctatcgttgttctatatgcaaattttgtttggatctctcttgctcccaaactgatccacctctgctcgttgcaaacccaaagagtcatcaccattcactcgtattctatgctcgaccactcttgactccgtgtgatgcttgtgggtcggtcaatgtgttggatccaagttatgcttgctttcaatgtaactacatggtccatcaaagttgcatcgacttaccacgagtcataaagatcactcgtcaccagcatcgtctttttcatactccttacctccattccacgattccaccatgtcggatctgctacaaaccagttgacatcaagtacggtcagtattcttgcaaacacgaggatttctcttacgttgtccattccaaatgtgcaacacatgagaatgtatgggatgggaaagaactcgaagaggaaccagaagaacccgacaacattgaagatatcgtcccatttgagaaggttagtaatgatatgatcaagcatttctctcatgaacatcatcttctgaagctagaaaagtatgaccgtgttcgagatgcagagaagcaatgccaagcatgcatccttcctatcaactctcacgacttcttctataactgcatggaatgtgattttttcctccacgaggtatgtgctggtctacttagaaaattggatcatgcgttgcacgttcaccctcttgtcctagacccttctcctcaacgacactataatcaaaatggttgtttgggttgttcgagaaaatctactggtttcaggtacaagtgctccatagagaaatgtgtgcttctcgataacgttcagatagatgttagatgtatcttagttccagattttttcacccatacagctcatgaacatcccctatttatatccacatccgagaaagggaaaagtaagatttgttgcgaggcttgcaaggagatatgtcttgtgtcctacctacagtgttctgaatgcaaatttgctatgtgttatcagtgcgctaccattccaaacgaagtctactacaaatacgacaagcattttctctccctttgctacggagaagtagtgtttggtacgtattggtgtgaagtatgtgagaaagaggtagatccaagggattggttttacgcatgcaacaaatgttgtatcactgtccatcttcaatgtgtattcggatcctctggttatgtgaagcctggtttcacattatatcattacttcacaaaaatggaagttttaagcaacagtaagagcactcgaccgttttgcactgaatgtggtcaacgttgtccaagttccgtctactacaaacttggttggttgggaactagtactttttgttcgttgaattgcttaacgtcaaaagaaaaattgatggtgttgtcaacatgatgagtttttttttaatgtgttattggaattttttttttttaataatgtttttcagagatttgtgtagttattatttagatccagagagtttttcagagattattggattttaatgtgttattggattttttgtttttaatgatgtgcaacaaagagagttttttcttggacatatataattaacattcaatggacattaacgtctgggtagtgtagtcggttatcacgctagtctcacacactagaggtccccggttcgaacccgggctcagacatttttttctccttcatatttacgtttctgccacgtcatcatccgctacacggacgctaggttctgattcactttttctttcgtcttgggaaaaaagcaaacacaaaacctgagaacaaaaacatccgcagaatcgatatccccagaatcactactctacaaattcgaatccaaagttcaaaccctattcttcgattttcgtagagcagattattgtttccctttaggtgtctccatagtttctgaagagagaaggatg

SEQ ID NO: 31638 - DNA, 3003 bp, Unknown
  misc_feature (1)..( 3003): 2750-1469P.txt file - cDNA_ID_3044251; gDNA_ID_1971953; Annot_ID_177382
aagacactcatgcagagcacgtttatctccgatcaaaccagggttggacttgcataaatgttttcatatataacacaccaaaattttatgatatatcattgcatattatatttatgataaaaatcaacattatattatactacttttatgtaccactctcatataatagtataaaataatatgatatttaataataaataaaaattacaactaaatatttgttttttccggcattacagctaaatatatttaaatttttcaaagtataattaatttgaaaattttctatacaagaatttcatttttaattagggctaaacccttaccagaggtagcccatataaatcggaatgggtgaatgcaaacttaagccgattatctttatttttttttattttttttatttttttctcaatgctggaggatttaatatcatcatataaaacattcttttagaaagaaaaaaaaaatcatcagaaggtttaactatcatcatcggacatgagcatgaggcataatcttcagcgacacgcaaagcgaatcctcgcttacagtaacaggcctcgatttttctgctcctacaccaacgtaacactatcgtctccggcgacgaaccaaactctgcagagtcggatcgaagcggcttcacatcagaaagcagaaatcacaacggtgcttgagcaatggctacagcaacaacaacaacaggggaagcagttaaacccttcgttattaagaggaatcgtcgagaagctcagaagttctaaccgacctcgccaagccctagaggtatcagactggatggtcgaacaaaagatgtacaatctcccggaagacttctcagctagatttcatctgactgagaaggttttaaatttggaagaagcagagaagttctttgagagcatcccggagaatatgagattcgagtcaatgtacaattctctattaagaagttacgcaagacaatccggagaaaaagctctgaagaaagccgaatctgttttcaagaagatgaagaagctagggttgctcttgagaccttcaccgtacaactcgatgacatcactctatagctctctcggaaacagagataaagtcgatgagattcttcgagagatgaaggagaacaacgttgagctcgataatgtcaccgtgaacaacgctttgcgagtatacgctgctgtatctgatgtagcgacaatggacaagtttctagctgataggaaagagattacaaggcttgatgggctcacaatgcttgcgatggcaaaggcttatgtgagagacggttctaaacaaaaggctaggaggatgcttcatgaaacagaggaatgattgggtcatgactataaggaactcatgagcctatatggtgaagcaggagagatagaagatgttcaccgtgtatgggacaagtacaaggcgacaagacagaaggataatgaagaatttcgaactttgattggttctctcttgaagcttggtgataccaaaggagcagagaagatatactacaatgagtgggagtgctccggtcttgagtttgataaccgaatccccgatatgttggtgtcgggttatcgcgaaaagggaatggtgatgaaggcagataaactggtgaacaagactttgtggatcagaggattggctacaccaatcactctgttgctggaagaaatggataaaaaggggaataaagtgagtccgccgggcttgagagacctcatcaagaatctacgtgattcaaatcagttgtccaaagcacttgaggcatcaacatggatgtgtcaaaaaaaggtgtttaatctcttttcagaagattatgcaacaaggcttcatctgactgagaaagtgttgggtttggaggaagcagagaactttttcgaaagcagcatcccggagaatatgaaagattactctgtctacgatacactcttaagctgttatgcaagatctagcaacactcaaagtaaagctgaagccgttttcgagaagatgagagagctaggtttacaatccaaactttccccattcaactcgttgatatctctctacagtgggcaagggaaactaagtgtggtcaatatacttctatgtgatatgaagcataagaatatagagcctgatattgtcacgaggaacaacgttttgagagcaaacgcatacatattggccatagactcgatggagaaagtataagagagagtgggatggttttgagagcaaacgcatacatacgtgatcatggtgattataacgtgatatcgtcatctagaatgtcgtttttgttaaccgtactgtcattcctagttctctagatctaccactttgttgatatgctggtattggaacgataccgcatgttctcgaaaatgtgcaacatcgttgaccacttaactcagtcttataattattgtatatgttccattttaataagaggatgttaagataatatttcaatttatttaacatatttctttttaagtaattttactgaaaaaaattaatgctctgttattttaaattcttcatataagatggatctaaatcttgtatatttctttgaatgtgcacagcctggaaacaggtcttgagaacaaaaaagtaatgagcatttattaaaagtaagcgaaagtataaaatagtgttacagaaatgttattactctgttattttaatcctagaactaatcttgatcttaatcttaatcttagtattttattttataatgtgcattactgcattgcacagcgtggaaacaggtcttgcgaataaagttaatgataattctatctattacaaaagtaaacgatgaccgaaatatgaaatcgtattttctggtcattcttaattataaaaacagcaagttggtcattgtctactaggacatatgtgaatgtttgtttattaatatgaacactgccatttactctactccacgataagtggaaataaattagcagaaacatacatcgatcataaccaaaggatcaaaagatg

SEQ ID NO: 31639 - DNA, 3003 bp, Unknown
  misc_feature (1)..( 3003): 2750-1469P.txt file - cDNA_ID_3044270; gDNA_ID_1971954; Annot_ID_177474
gaaggtggtgagctttttgatcggattgtttctaaaggtcattttagtgagcgtgaagctgtcaagcttattaagacgattcttggtgttgttgaggcttgtcattctcttggtgttatgcatagagatctcaaacctgagaatttcttgtttgatagtcctaaagatgatgctaagcttaaggctaccgattttggtttgtctgtcttctataagccaggtttgatttttctcttttggttgattgattcattaatcttgcaattggtgttttggtttgatgatgattttttcgttgcttaagggaattttgctttgtatcttcattgagtctttgaaagtttatgtgttgattggaatgattctgcatttgtgtattttggcttgtatctgtgattctttgaaaccttattgttggtggttcatcgcctaattggttttagtttactcttcaggacaatgtctataaggtgtagttagggagcttgctttggttagttgttactcattgaggagtctttgaatgtgtggattggaactattctgcatttgattaagtctttggtttggtttcttgtagaatcaggttatttgtgttttctatgaatcgaaaattgaaacaaagtggtttcttgatagaaacaggtttgttgtgttttatatggattgcaaatcgaaataaggttttcggtatgtataggtttgatgatctgtttggttggattcaaatttgttaccttcttagagggaacattgtattgatcgaaattaatgtgtatagatgttcgtcattgaggagtctctgaaacttaatgtgtagatcgaaattattctgcatttgtgtgtctggcttgaaccttctcattaatgccagtttatcggctaattggtttttgtttgcttcttcaggacaatatttatatgacgtagttggaagtccgtactatgttgcaccagaggtgctaaagaaatgttatggacctgaaatagatgtgtggagtgctggtgttatcctctacattttactcagcggtgttcctcccttctgggcaggttagtctactaaaaaagtagagtcttttctatttacaagtttcgagtttttgtttgaatgatgtattcttttctcttgggcattgcagagactgagtctggaatctttagacagatattgcaagggaagttagatttcaaatctgacccgtggcctactatctcagaagctgctaaagatttgatctataaaatgctcgaaaggagccccaagaaacgcatttctgctcatgaagccttgtgtatgttcattctttgttgttcatttggaattagcaactgttgtgaattgtttttatggtaaataatgagtattgagtttgctctgaatgttatataggtcacccatggattgtcgatgaacaagcagcaccagacaagcctcttgatccagcagtcttatctcgtctaaagcagttttctcaaatgaataagattaagaaaatggcattacgggtatgaattcgagtaatatacattcgctttttctttatgtccaatccgtatgctgatttctctgaacacaggtaattgctgagagactttcagaggaagaaattggaggtctgaaggaattgttcaagatgatagacacagacaacagcggaacgattacttttgaagagctcaaagcgggtttgaagagagtcggatctgaactgatggaatcagaaatcaagtctctcatggatgcggtatgaaagaaccaaaacaaactctttcctcttttcaaaaacttttgtttccgtttaacatcctctgtgtgttgtggtcacaggctgatatcgacaacagtggtacaatagactacggagaattcctagcagcaaccttacacatgaacaagatggagagagaggagaatctggtggctgcattttcgtactttgacaaagacggaagcggttatatcaccatcgatgagcttcagtcagcttgcacagagtttggtctatgtgatacacctctggacgacatgatcaaggagattgatcttgacaatgtaaaccactcttcttcttcttctctttgtttacctccttcttcaatgttactttactataaccgagagcttttgaattatgtaggacgggaagatcgatttctcggagtttacagcaatgatgaggaaaggagatggagttgggagaagcagaaccatgatgaagaacttgaacttcaacattgctgatgcttttggagttgatggtgaaaaatctgatgactgactcatcattcttccacaatttctgttttttttctctttaatttcgtttatattttgaattctaatttctaaggatacaaaaatatattctggcttgttttttgctttcctttttatttttgtacatgagcaactttctaaatttttatcctcatatggataatttttgcttcatataaaagtttttgaattccaaagaaatgtgatttagggatggcgaaaagaaaccgaaccgaaccaaaatcggatttcataagtaattttcttataatacaaactgtgaaactgtagaaaattcttataacaacccaaaccaaatctaaattcttataacaacccagaccaaatctcaaattgaaaccaaatttggtgaatttgtaattaaccaatattcagaattaatataactaattaaatataaagtacatttaaatacactaaacactataaagagattaagagtagttagaattataatttttgtcaaaaatcgaacaaaaccaaaattgatgtgtatataatatattacttaattggaaaacccaaaatctgaaccgaaataaaccggtaaaccgaaattgcaagcttagaaattaaaccaatttgaagacaggggtacaatggtaattttcaaaggaagtggataggataacactgcggatttattctccgtcgagctccaaagtctcgagcttagagctctctctcagtcgaaaacaatg

SEQ ID NO: 31640 - DNA, 3003 bp, Unknown
  misc_feature (1)..( 3003): 2750-1469P.txt file - cDNA_ID_3044299; gDNA_ID_1971954; Annot_ID_177453
ggtaaccaacgatgacttcttacaaatcattacatattcgaagaaaaaacttgataacaacacaagtgtaccaaagatataatcaaataatcgaattgacggattgatgaactatgagattataagagacaaatttgtgtacttagtttttaaattcagccgtaaacacttacctcggaagacggatgagacgacgttttctcatccctaatatctcacattccaaagagcaaaaaatcattctatgagttgatcgattgctatgattgtagtaatatgtagcattccttctgtagccttcgtagaagatcaaaccggtacaacggttgtgacacatataacagagttgtcgagtgttactattgtttcgaaaaacttgcacctttccataataatcacgaaatatggaaccaggtttcataaagacagaagatccaaatatgcaatgaaggtggatggtgatgcaacatttgttacatgtgtagaaccattcttttggatccaattgtttttcacacacctcgcaccaatacgtgttatccgcgctttccccacaagaaagggtgagaggatgcttgtcaaatttgtagtgtatttcatctggaatgatagcacatgagtaacacatagtaaactcgcataacgtacactgtagatgagcccccaaacatcttttcttgcaaactttgcagaggatctcgtctttactgttgtaggatgtggagataaaaatgggatgttcgtgacttctatggatgaaatactctagcactgagatgcatcgaacatctagaacaaaatcttggcaacctttattagagcatatgtaactgaaaccagtggattctcgggaacaagctgaacaacaaaactttccgggagatggagataggataagagtgtgattgtgcaatgcatgatccagttttcgagaaaggccagcacatacctcgtggagagagtaattgcatttcttgcaatggtaaaattggtgagaaacaattggatatatgcacgctcgacattgcttttctgtgtctcgagcaccatcatgattcttgagcttcaaacggtgtttgtgacaaaaatgctttatgaaaccatcacctaggttcctaaaaggtgaaatatcttcagtttcatcagactcgatttcccactcgagttccttcccatcccaaacattttcatgtgttgcacatttagaatggactacataaaaacaatcttggagatggcaagaatattgcccatacttgatatcaacctctttatagcagatttggcatgacgaagtcaaagatgaacaataaggagtatgagagagccggtgcgggtgacgcgtgatttttatgactcggggtaagtctatgcaattctgatgaaccatgtaattacattggaaacaagcataacttggttccaacccgtcaaccaacccacaagcatcacatggaactaataatggccggggtaagaagacgagagagtggtgatggcttttcgggtttgtaatagtaagaagtggaagagttgccgcacaagagagatccaagcaaaaactacagatcaaacaacgataaaaccaatcacctttgaaatcttttgcacaccaagtgcatttgttgaatatgatatcagacttatacgggacgatatccacgaattcatacttctctggacctgatgtatcctcaattttaccaggacaagcatcagggatgatgttggatataactctggtttcggggtttcgatagaagagagtaagaggatgttggaggtgataaggatgtgttatccttcttggacgttgatggcaaccattgtggaacgtcacctcgcaggtggtgcagtagtagtagagacaatccggcgtcgtagcagctgctttcccgccacatgtaaagcaaccgatacgaaagttgaatctgtatcgaacggacaagttatgagaagggtgagctggatgagacataagacatcttggtccatcttcaaaacccatttgcttaactgctttatgttgcgaacttgcgatctttctaaatctacaaatatttgtggtcttcctttcattattcatctattatatgcttttattattattttatctcgtgaattgtaagaaattttagaaaacaacaaagtttaataaaataacaagctagctccaaatatccatgtaaaacatttgaccaaatttgttttggtcggcgaccaacggtcgtctacatatgaccaactttatttatttagttaataagcagctccatatgcacgcatgctcgttttaggttttctatgtttttggaatttgaattgtctcagttgatttatcatttgaattataattattacttaaataaaaattagtagcaatcaaactgatgtttagatgccaattttcaacatgtatacaataaaaaagatgtctttgaatgttttattgaattaagattttaggatataagtagatgtaataatataaagattcaaataagagaatctacaatagatgaccatagaagatttgataattaactgacaagattatacactgtttgagtagtttatatatcataataatgacatataaacccctatatgcctatcaaactttaagacacatatatgtaaactaacaggtgtgtgtcaggacgagagatatcatatctcttccagagatttgatttacaaaatttttttgggaatagttgtcatattaatcaagagaacaatgctaatccgaagagttgcgttgttttgtttctcattcaactgctttttctatcagtactagtcttatttcgtctctttctctctgtttttcttttttttttccgatgttcaaattgattctccaattcaagtgtggggttttccgatcaattcgtccaagtaagtatctaaatcaaatgcaatttttgtttattgtttctgaattcagttctactttggtgttcctaatttttattttttctgggattgacttttgagatg

SEQ ID NO: 31641 - DNA, 3003 bp, Unknown
  misc_feature (1)..( 3003): 2750-1469P.txt file - cDNA_ID_3044312; gDNA_ID_1971954; Annot_ID_177440
tacatctttaatgctgcaggggaagcgaacagagaagaagatcttgaatttcctcagctttcttcacccatgaggttcagtaacgaattggcaggagagtcttctttccctgagagaaaggttcagcataagtgcaacgattataacattgtgtctacaaccactgaattgagaactcctcagaaggaggtaggtttggccaacggaacagaatgcttggctgtttctcctattcctgaggattggagaactcccttggcgaatctgacaaacacaaacagcagcgctcgcaaagattggcgggtgagttctggagaaaagttagaaactcttcgacagcctcgcaagttgaagagactacgtagacttggagattgctcgagtgctgtaaaggagaattatcctggtattacagaggcagaccatatcagatctcgttctcgcggtaaaaagcacattagaggtaactggttctgtattttcttttactacattgaaatgatctgggagttgacaatgaccgaaaatttacggattctgatgttgcttaacatcaccagaatctccccagtatatgtatgtataccaattggtttgattgattaggaatccataagatcttaatagaatattgccagtgtcatagtgaagtggaaaagtgctgagagttggtttacactttcttctgttgcttttgcgttggtgacaaaaaaggtcaattttcaattaaaatttgagttatttgtggtatacatctgcgttagatcaatgtcttgatgtgctgagagaaatgaaacatttgtcatgttgatctgtttgagtgattgctgcttggttgctctgtgtcttaaggtaagaagaagatgatcatggatgatgatgtccaagtcttcattgacgaggaagctgagtaagttcttctctaatctaaaaataaacatctgatggtctttcttacttccacaaaacagcgagagacaacataacaaaagtagtctttctgactacaaagttgatgttagttgtttcaaacctctctattttgatcagggtctcttcgggagcagagatgtcggctgatgagaacgaagatgtgactggcgattcatttgaagatagtttcatagatgacggaacaatgcctacagcaaatactcaagccgagtctggtaaagttgacatgatggctgtttacaggtacatacaaccaaagatatctttcttctactgcgaggtcaatgagcttattaaaaatcacaaggtatccttccacaggcgttctcttctcagccagtcaccattaccggcgagatttcgtgatttagccgcatcaagtctgagtccttattctgctggacccttgacgagaataaatgagagcagaagcgactcagataaatcattgtcttctcttcgaacaccaaaaacaacaaactctgagtcaaaccaagatgcaatgatgataggaaacctttcggtagtacaaatctcgtcagatagccggaaaaggaaatttagcttatgcaactcggcgaatgcccccgtgattaacttagaaagcaagtttgcagctcatgcacaagccacggagaaggaaagccatgaaggcgtgagaagcaatgcaggtgcgttagagtacaatgatgatgatgatgatgcattctttgcgacactagactttgatgcaatggaagcacaagccacattgttattgtcgaaacagagatccgaagcaaaagagaaagaagacgcaacggttatacctaatccaggcatgcagagaagtgatggtatggagaaagatgcaccatcttttgatcttggtctgtggtgattcttctttcatacgaagatactaagttatgtatatagattgacaaaggagacagtagagcataggcatttggatgtatgttttgtgtattaagtttaggtatatcctattgaagtacagtgcttaaggcagtgcacatggttaaatcaaggttaatgcctcaattcgttgaaccctttaagtaatgacacaaatatgactacatcggccaacactctcacacctctcaaccctaaactgacattacaaagcaacatttaccattggcacgaaaagaaaactaaaataaaataaaagaattagatgtacaatagacgctataaactctagaaattaataatattgggatcataaaattttattaatttataatgatattaatatagatcttataattttatatttattaatttatcgaataaatgaatatttattaatttaaagaaatatttatgcaaaatataatactattttttttatagaattttctttatttagattttctatgctttattgtttgcatattcaattatgttaaattttggttattagaatagaagttgaacttgaagttgtgattaacaatcctagttattagaatagaatagatgtaaatagtctactcgaccatctgagtgcaaatgaagcatgcttagagtttagaagaaattgtagcttatatctataatgttggtgaaaaaattgaagacgataatgtagaatctttggaaatagtgacatataaggaagaaattaccgcgtcaaatacttttcataacttttggattcagatcgaaaagataacaccataattttttgatgcaataagaaaattagagacgaatttcaacgagattctaagtttaagaaaaaacaaacaacactagattcatattatactggattatcttagaatgtatgtttaagatttattcttaatttatgatattattgggaccatatatatatatatatttcaaaaaaataatatcttattatcttatcgatttaggttaatttttacctaggtccgacttgagaccgacaaaatttattaatttatcgtgtttattattttataaagtattaatttatagagtttctattgtattcacttttgagttgtgtctattcatgagctatttccatgtatttataaaaattagatg

SEQ ID NO: 31642 - DNA, 471 bp, Unknown
  misc_feature (1)..( 471): 2750-1469P.txt file - cDNA_ID_3044322; gDNA_ID_1971954; Annot_ID_177433
gaattcctcgaagcttttgtagtattgtgtaccaataaacccagtctgaataaaccaatggtggagtctattatgggaaagtgaaaaagcaaaaataactgagaaaataatagaccaaataaagcataaggacaagaattgttgttttcacgaaaaccacgcaatgtaaatcatcaacatggattgtttcaatatggtatcttcctctatttagtgatctagagattgtttcttgtttttttttttttttgcattctaaggagaagaggtgatcgaaaccaaccacacgggaggagcttatgccattttcctccccgtggaaggtctaacaatcacacgtctcctaatctcgtacgtcttcttaggtatgttctttgcatgttaaagaaactgtatcttcaattcttgtcattacatgataatggttttcttatacatgttttgctcataccttataggttttgaagaatg

SEQ ID NO: 31643 - DNA, 3003 bp, Unknown
  misc_feature (1)..( 3003): 2750-1469P.txt file - cDNA_ID_3044364; gDNA_ID_1971973; Annot_ID_177524
ccagcaagaaaactaacgacgtcaagacttagcactattctttctagagttttctgtcctaattcttacttctttctttttttgttctttagagattctttgatttttcgttttcaaatagagattattgtaaatgttacatgtattacagaaatttacagtagaagtttaggaaaaatgaggattttatttggtaatgtaagtcgaaatgatcaagacttagactatcatcttgtatcgtttcatcaatatttctttgataaacgttaatcagctttttaatttctatgattatgtatcaattttatttagactaagaaagtcttttaagttaaacgcataaaagagtcaaggataccatttgaattgacattgtattagtgtttgggtaacttccaagaaagagataaaattaaaagataagaatggggccaaggcgtaaagaatcaaaagttaggcgaaatatgtataaattgaattgaacgcgttttttatgagacttgactatgatccattttccacaacgcagacacaaagataatgcatttttattacacaagtgtgtatgcattatttcacaaatttcattaatcccaaatttcttcgttataatattcctgtcatatatgtgtcgagtagtgaaaaacgagaaaattagttattgttttattgaaatgaggtaattattataccaataagattccgttttgttttcttcgtagaataaacaatagcgctttctgacaataatagcaaatttttattcttgaaaactttcattgtaaaacaacgtaccacacagctgagttgagcaaatcttaaaaaccaaagagacactgtaagtttgtttcagacaaccttaaaacaaaagctgagctggaactggttcatctccttatgtcatcgtgtaaacgattcagttgttttccttctcataaacctcgcttgcatatttccagttgatcactttccatacattcttcagatactcaggcctcacatttttgtactgaatgagagaatacagattgattagagagcttaatcttttaagctaactcatgagacttaaggtatcaaaagtgttgttacctgcaagtagtaggcgtgctcccaaacatctatacccaccagaggtaccaagcttcctccttttgtcactaatggatcctgcaccaaccgaaacaaactctttttctttaaaacccattattctcacagatgttcatgagtaccaagaaatcttttgaacatattcaatagcgcattcctgatcatggataagttacctgattggcagttgtgtcaacaactagcttcttcagttctttgtctagtccgagccactgaattaatcaacagaaacaagcgaatcaaggaccatggttattatacgtaaagcaccagagtcgacaatgtgagcagatgaaataaaaaggtgaaactagactacagaccacccatcctgagccttgcactgcagcaccctcagcactcatctttttcaccagaccttcaagggagccaaagtgagcgtcaatggcactaccaagagatccttttggtggctctccaccaccttcctgttatacattaaaacaaaccatcaattacagaacaacaaaatcgaagaaatacacagaaactcaaaacacaagctcacactggaaggagcaaggttcttccagaaaatcgaatggttgacatgacctgcacgttagaaataaagtcgatcaattcccattctctagcacacaaaaaactcaatttatttccaatagtttctctgccaatttctcttctatcaatccaaccggtccggagctcaagaagcaacaatcctaataccaaactatagtcatcaaaattaatcaacagcttcaatgttcctaacaaaagttctatactaaatcaactggttatgatctcaagacccagcaaacaaaagtagctatctaagaaagcttgcattaccgataaaagtttcattgattcttacagaagtttcatcccaattcatcaaaattactcatcagcttcactgttcaaaccaaatttctctcctaaatcaactacttcatttgctaatatcatccaaacacgatctaaacacaaaccaatcgatcaaacacatagaaatcgagatcgtaaaaaaaaaaaaaaaagagagtcagacacacaaacacacctccgccgttgaatttgatggcgctctgcaacttaacaacagtggaagcatctcccttgttcacagcttgatcaagctgctcaagagcattattgtaattagtaacataagcctggtgatgcttctggtgatgaatctgcatgatctctccactaatggccggttccaatgcgccataatcgtaaggaagatcaggaagcgtaaaagtctgaatccctctgatcctcaatagcctcgatgatgtctccttcaagccggctagggtttttctactcgctacacaacgaatcgccattgttggaatgaagatttgtttctccttctagtggtcgccaaaaatgaacatgtgtataagtggagggttatgataatatcactgcctgtcatgtatagagaaaagtgactgttttgacacgtagacatgtgatttttatttatgggccgtaatattggattagtgagcccaaggccttaatataataaagcgtaatttttaatattttgtgacggctaaatgttacttttttgtttgttcacaggaaaaaaataaagaaatgaagaaagttgactagaaacggagaatttccaaatgttgaatttgttggatgcatgtgaaagccaattctatttggttcctccttgataatccacccaatcgctgtcattctcccatcaatctagctgctttcacaaaccattgtactgagatcgtatctttaaggtaaatttcaaatcggagtcggcgagatcgaaataggaacctggaagtcggagaatttgtgtaaattcggttttttttttttaattctccgatg

SEQ ID NO: 31644 - DNA, 3000 bp, Unknown; identical to SEQ ID NO: 9021
  misc_feature (1)..( 3000): 2750-1469P.txt file - cDNA_ID_3044371; gDNA_ID_1971973; Annot_ID_177515

SEQ ID NO: 31645 - DNA, 3003 bp, Unknown
  misc_feature (1)..( 3003): 2750-1469P.txt file - cDNA_ID_3044392; gDNA_ID_1971973; Annot_ID_177497
gagctcagtgaagagaagaaggaatcatcgtttccgaagaaatggccgctaggctacgaagccgatgctgaaacgccatcgttttgccttgacgccgactgttcaaccgactcgagcgagttaaatctgagttcgctccgtgagttcactcggactctagagaaagttggactgaagacggtagagatgctggcgaatgcacttgggtttggatatgattcaacccggtttaatactctgatgtgggttaaccaaggtgttcctgatgatgaaccggaggtaaccaacggattttatccttttgttgtttgtttacagtatcagataagggaacagaagtattgtttgctaaccgagtctggttgggtgtccgttttaccccgagttgactcggttcttgtgacgttgggtgacattgctcaggttagttctcttttgcttttgacaattgacagaacacatatatctcttttatttatctataattaattggttagttgtcttccttaaataattatcaaattatcatcctttgtaatggaactttattccactataccgttaactggctgttttaatgtattttaaacattatccaaaataaatgttttccaacgcatcgttcaaaaagagaacaagaatttggatatttccgatatttattgttgacaacaacaacaattgtggagcataaccggggaatgtgttttcacttttcgtttgaaacagatttatggcattgggaaagaaataagaatttggaaatttccgatatttaaatacttatacacatcacatcgcaattgtacttagtgtcctatagaattcaacaattcttttttttttaggtcaaaacctaacagctttctacaatatagttttcaacttttgaacagctaacaaacaacttaaaattggcaggtttggagaaatggagaggtcaaaagagtgaaatatcgaccagtgttgtgttcaggacaaaaagatggtccagtaaagtgtgtaacaatgacattgatgcttacacttcccatggacagtatggtttcatcattgaaggatatgatcagtgacggcgacaaagaagaagagtatgcagaggaggaggaagaagatggaggagcaagaagtgatgagagaagggcatttaggccttttagtttcaaggagtacgcatggagagtgtaccaagaacgtctcttcttcagggatccacttgacagatacagaatcaaatctttaaaagattgacgaaccgatgtttgatttgtttgtttctttcttgggttgaattggtactatagttcttgttgttactttttttcccccataaaatcttttgattttcagcggattgttagcattttagcattgagatatttttgtttttgttcgattcagttcagagaatgttctattttgatagtcactccatcattcaactaattttttcatatatactcatatcaaaactgtcactatttcaaaatcaaacttttaggttacaccaatgactctatcacactaaactcaactcctagattttatatagaagaatctatgactttgatgatgtactttaaaactgagtcttttgagatcataaccaaattctacttcataacttttgttttccaatgttgattatttgttataattagaaggtgacacaaacgcttatagcatcctgtttttgaaaatgaggaaatacagtgttggcttttaatctctcattgaggcagaatatcaatgaatgacttcaaatctacgtatacatgtttacttatttagtgatccatattggtgttgctctttaattttcttgtgagaatgaattatatacatcaaaattgattatatcatttaattcgagttaaaattataagtaatacaatcttcactaaacactaattaaatcgacgtaaatttcttatacgattttttcatgcaacacttaaatcgacataaatttaaatattttggtcttcataccctaattttgataagatataatagaaaatttcgtatatctttttttttttttggtaaaaagtttttttttttttgtttcatctccatatttagaaaatttatttcaaacttcgttctcgtttgtgttcatcttaatttttaaccatgattgagtcattgaccattgctcaaaacatacgcataaaattcccaaaaagtagtgtgtgtcgtgacaaaacccgacccgtcgatttacgcggtttgaaactcgacccgaatactatccgaacccgtaactttggcaaaagcacatcgtacagctcaggcacttgtagcacgtcgtctctcctttggtttctctccttatattcgacgagtgactccgattggatcgctatttcgtcatttctcactttccaaaaagaaaaaaacgaatctctctccaccatcatcacctttctccttcacttgcctcagatctggctgcgatttcaaatcttccttagtttctctcgcatcgctcggccgttgacggtcccgtcctttccgtggatctgattctggccccggattctctcgccgcgatctgaggtcaaacatggcggctgctaacgcgcccatcattatgaaggaggtcctaacggtgagttctctgtttttaaatctccgggaatcgagctaaaattttggacgattaacatgtttctatagttgtagtctctgatttctatcgatttggttctgctcacactgttatatgattgattcaagtttcattctgttctcaattctacccgatcgttgagatcaagttctctgatcagattttctctgcggacgctcagatctgtgttatctgaatgtatatagtccttagttttaagttattgtgttgcgcaatgtgcttatctactcggatcttgtaactaagttaatgaactatgccaattgattacttttgttttggaaattttccagcttccgagcgttgggatcggtcaacagttcatcacctttacaaatgttactatg

SEQ ID NO: 31646 - DNA, 3003 bp, Unknown
  misc_feature (1)..( 3003): 2750-1469P.txt file - cDNA_ID_3044414; gDNA_ID_1971974; Annot_ID_58697
ctgcaaatactctttatatattagtacacaatacatacatgggtatgcatctttatacgactttatcaatatatgcttacacacatactatggatatgtatatattgttgatcaagaaaaagcattccactttaatttgatagctagattaatgcaatatgagatcggtaacaaactgtcatccatgatatacgtacatataactaaatatgattggcctctaaatattaataattacactttagttataagaatttcctaaattacttaaccatcataatataacatttttgtgcataacacttcctcattccaccgtatttcttccgctgcagttaattattcaaaatcctcgtattcctatttttcgattcaacggtaaatatattaataagaatgatgttttatatataagatatacagatgtgaaaatatgcttaattatgatattgtctcctttcattccatgtgttagccagttggatatctatggacctttccaataaaggaatatctttcagcatccatataagaataaaagaggtaaaaaaacatttgatttaaaaataaaataaaatagtagtagtacgtactgaagaaaaattaaaagataaaaagaaatttgccgttctacgaatgagtttttttttttcacttatccccaaaagataacaatcttacagacttacacacacacacaaataaaagagagaataaaattcataatcattatatgattgatatgtaacccaattccaaatttaaacctctctgtcttctaaatagattccaattttttttctattatcacaattcacaagctctaattctacatatataatatcttaaattgtcattagataactagtaagttgactccttaaatcctatgatctcgaaatgtttttttagaaaataatctttgataggtacacgtatagcttataattgaatgtatattgttttcattaatttctcaacttagccctaatttcttatagaggaaaaccttgactagtttttgtgttcatttagaaaaatctcaaatcgaaggaaaaatatcttcatcttattaagatatatagcaacacaaaaaagaatccatgtttttccttttgttataatttttcttcacaactaagctacgaggccttgaaaatggtggcatctttttcattggatagtgtcttcagaggttttcctttttatttttccaaaaataggggactttttttctttatacctctattatttgctttaccaaaaaagatgattggcacaaatagttcatgtttaaagcattaaagtacaaaattatggattaaagaaacaccgggttacaaaaacggattatatttgaagaaatagttttgcagttgtggatcgtcgtctatggatgatttaatgttgttcatttcagcaaaaactgaggcgtcgataaaattttaatatggaaaaatggtgtttaagaagaaaggaaagaaaagaaaagaaaagaagcagaacacctgagaggaacaatgactttaggacgtgttggtagtggactgtgtcgccatgtgtgtggttctctgaaaagaagatcaatctataaaggtgtgagcaccattcttagtttaatagttttccccactatcttttttttccttcttctatatatttcttaatacgaaaatactaacttaaaattcaaaaatacaaggaaacctttttttttgtaataaagggaaactttcactggaatcgtaagtcgtaactatctgtcatgatataatcatattttagcttctttatattaattttttttcagggccacgatgtcattttcagaaagatgaaaaggatataactattaaaatttatatataaacaaaagtatattcagtcttttcgtttgagaaggtccattcattatggtatgggttttcaattctcactgtacgcgaacagtgatattcaacttcatcatctcaagccacacacgtatacacatttaactttacagatacttacatttatagaattgtacaacagttcttgttacgcgtatgtacattcgtcacgtaaccctttactaaagcatatacagtgtcagtattagtatatatatcatgtcgaaactatttttgatttctagcaatttcttttgaaagtgataaattctatatcgtcaagcaatatttaataatgaacttgcgtttcctttttaaccttatacgtatttatattaggaaagaaagtacatgagcaattgagcatacatctttaagtaatcaactaatcaaaaaaataccttattaaagactggattatttatagcatgaataaagtaccagctacaatattagccccctccccccactatatttatatgtaaattacgtttgtgttgacttcatttaaagatgtcagtatgtcactaatattggacgtaaggtgataatgcaagactctaatgaagtccacttccaaacaaatgaagaaaatgaaattaacattttcatcacaaagaaattacatatatgtgttgtgttagttttttttctttcagaaaagtcgaaaccgaaatcacataacggattcactatgattctataactaacagataatacaaacaaagcccaactaacgacccatcatagtaaatcacagaaaaagatgataactaaacagatcgtgcaaagaaagcccaactaacggcccatcataataaattacaaaaagaaagaatccggaagaaaattgaaatcttatccagagtgtagagagaaagaagcggagtcacaaaaaccccttatcctcttcttcttcatcatcatctctaattcaaatatccgacgcagacattttagacaaagttactctctttctttctcatgttcttttcggacagaacaaaactccctaatccaaatgtcaattcctttggtctctctctgaataatcatctctcttcaaaccctattcaattttaactatcgatcttcggctaagtctccaatg

SEQ ID NO: 31647 - DNA, 3003 bp, Unknown; identical to SEQ ID NO: 21497
  misc_feature (1)..( 3003): 2750-1469P.txt file - cDNA_ID_3044422; gDNA_ID_1971974; Annot_ID_177581

SEQ ID NO: 31648 - DNA, 3000 bp, Unknown; identical to SEQ ID NO: 9270
  misc_feature (1)..( 3000): 2750-1469P.txt file - cDNA_ID_3044430; gDNA_ID_1972047; Annot_ID_178239

SEQ ID NO: 31649 - DNA, 3000 bp, Unknown; identical to SEQ ID NO: 9054
  misc_feature (1)..( 3000): 2750-1469P.txt file - cDNA_ID_3044430; gDNA_ID_1971974; Annot_ID_177578

SEQ ID NO: 31650 - DNA, 3003 bp, Unknown; identical to SEQ ID NO: 27969
  misc_feature (1)..( 3003): 2750-1469P.txt file - cDNA_ID_3044434; gDNA_ID_1971974; Annot_ID_177575

SEQ ID NO: 31651 - DNA, 3003 bp, Unknown; identical to SEQ ID NO: 21499
  misc_feature (1)..( 3003): 2750-1469P.txt file - cDNA_ID_3044438; gDNA_ID_1971974; Annot_ID_177574

SEQ ID NO: 31652 - DNA, 3000 bp, Unknown; identical to SEQ ID NO: 9043
  misc_feature (1)..( 3000): 2750-1469P.txt file - cDNA_ID_3044444; gDNA_ID_1971974; Annot_ID_177558

SEQ ID NO: 31653 - DNA, 3000 bp, Unknown
  misc_feature (1)..( 3000): 2750-1469P.txt file - cDNA_ID_3044448; gDNA_ID_1971974; Annot_ID_177552
aaattaactgtattatttgtcgtggttttcaaaatctgtaataagcagcggcgttgacgcctttttccctcttatgtttgctgcctttagaagcactttgcttgagcccatgcacgtgcgatgctgcgaagaatcacgtgcgccgggctcaaaggccgccacgtcgatgctcctctttaattctttaggtaacaaagttttcaccgtccaactgtcagtatgtcagtgacacgtacgcacacacccaacggtcttcttgcaacaagagtcgcgttctcattctgctgcgtttgcgtcactgaccgcaatatcttcttccgttttggacacagagtatgtaatgtaatgacacgttctccttttttggttgactttaagaagtcaacggcgttagctgtacgtgtgttgtggaccgcatttggataacccgtaatacaagtaattttattaatcacggacaatatactataatgcaactagtcgatctttgtcaaattactggttttgatatgtgtgacactaatatgttcataacttcatatatacgcgttccacggccggtgacggactccattatgaatattcttcttaaatttaaacttatatgcattggaccagaagatgcatgttgacaaaagaaagtgatcagaaagcatagaagagaccaaataagttggtttagtcgaatacgtattcaattcatgttaaaaaaaaaaatcaaatatacaaatataatcattgtcatgattaatcacacatgagaaaattgatatttgatagcacaaaacatccccatttctgcatttctggtttttgttggttcttctgttaaactcttaatgcttaaagcaaatatggagatgttgatctgatttaattagtagtaacccgaaactgcgaagaattagctccggagaaggccggccctgaatttgggcaaatttgggcttgattaggctacaaatagtatgttcaaactcgaactgaaaacattaattagactctattaaaaaatgactatggttaagctgccaactcattgctccacatgaaattgagaaatgtaacatggagatcgatctttatataatatttagtgataattaaaagaagcaatctttggattattcttcgaagaatatgacagattacaattccaacagcaatgtttaatttatatggcagaacatgccaatatggacttcaatgttgctattcgttgggaaatggatattggcatgtggtacaattatttaatcatgcttgtttctatgcctaattttatcaaataagaatgttaatttggccttgagtcatttgtcagggagattttagtgccgacgggttcaaaagacaatatgtttattgcaaagttgttatagcaaggttcggaaaagtcatttataaattcgctaaaagttgcgtttgattaaattatgcttattttgtttaatcttagaggataacaactattggactcctagtgaaagtgaaacatatgataactaatttattttagttattttgactaatcatttgtttgtaactgttaaacttggaaattattcagcaaaaaaacatttcttgtatttgcaaagtcacagaatatgatgaataggttttattataatagaataaatcacgagttcacacaattctttaaagaattacagaaatcgtaaaatgattatgccaaatctgatttcacgtctaacatatttggttggttgataagaataaaatcatactttaggttaccccctcatcgtcagcattgacgtttataatttcaatattctcataaacaaatacctcgaaagcgaccacgttttatcgcctagtattgacgaacaagctaactaaaccactcccacatgttacatgtaatgacattatatatacagacacatagacacagcaagtttacagggacgcgaatcgtaaacaagacgtaaaaaacaatgcaggatttttcttcaacggtgtcgtatagcccaagcttcagttactacgcttccggtgaattcgccgccgctgcagttaaagtttcccgcgaaaacgaaagctacaatatcagagatcatgagtccgttaaagtcaactccgtcaatgacgaagacgttgacttcgagtttgaaacgtcgccgttacatgaagaaaccttcgtccacttcccgacgttcaaaaccaacgtcgtttccactactaacaagacagacaaagaagccgccgctgaaaaaatatcggagcgtttccccggaaattgtctgtggagtccactcagatctccggctgcttcgaaacactcagaatcatctactagcacaccgaaacggtgccgtttgaagaaatttctaacgagaagtcatagcgacggtggtgttttgccctcaagtgcatcaaaacggtgctatacttttaaggatcttaagcggaggagccacagcgacggcggcggcgacaccagtaagaggagctcgccgaccgtgaaagttaagaacaaaacggtgtcgtataaggtcggggaaggtgacaagagaagaaaatcttatttgccttaccggcaagatttgatcggagttttcgccgtgattagagggttacgtcgttaattgaagctcaattaatttgtatagttttacacaactggacaaaaaattactataatagcaattaggtacttgtttaaatattgtatttataaatatttccatgtaacttttgtttcgtgtattgaagtccaattcaatgcgttgactcaaaggaacgtttgatattttttttttccattttttttttctcactgagaggaaaagacacgtgtcatgtgttgataaaaaggaaattagatacttccacgagaaagcgggacctacgtgaagacacgtggaccactaatttctttcttaccttcctctgccgcctcgttttctgctcacagttccaacttcttccatacacacacattctcggaaaaatctctattggatcggtttaatg

SEQ ID NO: 31654 - DNA, 3000 bp, Unknown; identical to SEQ ID NO: 9073
  misc_feature (1)..( 3000): 2750-1469P.txt file - cDNA_ID_3044454; gDNA_ID_1971974; Annot_ID_177550

SEQ ID NO: 31655 - DNA, 3003 bp, Unknown; identical to SEQ ID NO: 31646
  misc_feature (1)..( 3003): 2750-1469P.txt file - cDNA_ID_3044458; gDNA_ID_1971974; Annot_ID_177548

SEQ ID NO: 31656 - DNA, 3000 bp, Unknown; identical to SEQ ID NO: 9086
  misc_feature (1)..( 3000): 2750-1469P.txt file - cDNA_ID_3044527; gDNA_ID_1971979; Annot_ID_177668

SEQ ID NO: 31657 - DNA, 3003 bp, Unknown
  misc_feature (1)..( 3003): 2750-1469P.txt file - cDNA_ID_3044555; gDNA_ID_1971984; Annot_ID_58736
aagaaggtgaatagagacttatgatttctcaagaatgaagaagaagattgtagagtgttagtgtttagttctgttcttctggtaatctgtgttttttttaatgtaaattacacaagtatgcaaaacttttgtaaggggctactgttatatgatgtaatgggatttataagaaaaaatgtaaaaatcaaacatcataactgggtttacacaagacaataagaagaagatacaatgtatctgatacatagttacaacttctaccaagtaagcaacagaaacaacataattttggtattgaatgagtttttcttttgcaagtattaacacacaacagcagaaacagaagatgattgttcttttgtctctttgatcagagatgatggtacaattctgttgagagacaccatttttactggtctgtaagcaatttggaacctggataagaaaacaacctcacagaattcacataacttaactccgcaagctcttccttcttcatgtttgacaggttcgcaacataatctagtacctattcatcacggaaaagattagacaagtaatgagctgaaataagcaaaaagtcagatgatgataagaacatacagcaagaatgtttgcaggctcattgagagttggttttggatccgaagaactctcatctgattttggtaacccgtcaggtgaatccgtctccaataagagcctatcggaaggaatctttaccagaccaggtaaaaagaattcaatacattcgttttccagaagtttgtataattacagaggaaaaaagcaaaccgatttcaaagtcttcttggcaattttctcatcaatgtaagtgaaccagccagaaaaagagaagtatgcaccaagctcagcgagtttaggaacaacttcagctgaaccattgaatgaatgaagaatcaccccagcaggaaaaggccctatggatctgcgtgtatttattttgagaaacttagtgctatatctttgtaaatgcaacatgtagatatacatacctcattatctctaggagatcatcaaatgcatcgatgcaatgaactgctactggtttgttcagttcttttgcaagttcaagctgtgggcgaaacacgactagctggtctgagtaatcaattcctcctgctaagggacctttgtctaaaccaatctgcaaaacacacattaaattttatgaagatgttaatctaatgagatctcagccaaaaggggtttcattacaacatatcattttgcagtttacactaaatcttgaaccaacaaagcaaacatttcagaattcaaaaagaaattgaagacaaagattttagtttagatgaataagtgataaagacacaaacttctccaacagcagcagtaggagtggtctcaaagaacttcttcaatgttttaaaccaatgagggcttctatcagcaataaacctgcaaaccaaaacagagaaaagaaaaagaagaaactttgatctgaaacttttgtgcatcaattgcaaaaaggatcgtctgtacataaaacccatatataccaaggatggagtccaaagcaaggaacaacagaaggatacgtctctcccatctctttcaccaagttccaatctttctggctccattaacaaaacctcttaaaaatatgtatacgtttgtgtaatatagatgacagtgaccaagcgatcatgaaaatttgggaacaaacctcggaggttccattgactgcgaaattggtaacaccgacagctaaagcagcagatatgagctgcgaggctttgtcgatgaccctcttgtcttggaggtgacaatgagcatcaaacaacttcattttcaccgtgaggttcttggttctaacagatccctgtgacttctttcttctctttgaggttcttaaagtatatggagatatatatatatagataggttatgtacctgtgtttatagcttaaccctaaagatatggtttgatcatatgatcaacacaaagagttgacttttgagatagtttgaggtttaagagacgctacaaaactctgatctggatttacttgaacttgaagagtaaaatgactaacctttgtgtttaatagattatctacagtaaacaaatacttttcgtattaacctaacttgtgtcagattagagtaaggaataaaaataagagttatctctatctgtgatattattaagaacaaagagtacaagtcatatgttttgtcaaacgcacatacaaaggcaggcatgtcttggtttctagaccacctgaagaccaaaaatagatgaaatgtgtacaagataatagaagtgttacctgtctgaagacagagtcaatgaaggcagaaacatcttcttagctgacattttcttcagttactccagaataattggaagcaagattgaagtaacacattgttggcattgaagtttcgaccaaataaagattcgaatcgctttagtcacacttgtgtaagctttgttctgttttcatctgagcaagggcatgaaccacattctgaagctcctcccatatggcttctttatacatcatccttcgactgttcactgatgatttccccttgaacgccgctgataccaccttaatgctgcatcagaattctgatttatagtttggttagcttgttcttctcttctgtttctgttgcaaaatttgatcaattttttttgaaaaatctttttttttccttttggaaaaataaataaaataaaaacaaagtgatctcagccgttgggtcgagtactttggctaaaaataaagtgatctcagccgttggatcgtgtactttggcttcaccgcaactaaaagaagcgtcatcatataaatcaatcgcaccgtctgtgtcgaaacaaggcaaacccaaaagaggtttcttcttctgtcaaatctttctctcctctctctctctgatattcttcgtcgtcccatctgcgaattgtttacacagagatatagagaggaagagaaccgcctaaggaaaatg

SEQ ID NO: 31658 - DNA, 3003 bp, Unknown; identical to SEQ ID NO: 31657
  misc_feature (1)..( 3003): 2750-1469P.txt file - cDNA_ID_3044555; gDNA_ID_1971984; Annot_ID_177681

SEQ ID NO: 31659 - DNA, 3003 bp, Unknown; identical to SEQ ID NO: 21515
  misc_feature (1)..( 3003): 2750-1469P.txt file - cDNA_ID_3044586; gDNA_ID_1971984; Annot_ID_177698

SEQ ID NO: 31660 - DNA, 3000 bp, Unknown
  misc_feature (1)..( 3000): 2750-1469P.txt file - cDNA_ID_3044591; gDNA_ID_1971984; Annot_ID_177695
taaggaaacactggacttcacgaagttttatatagattgtatggttatttgatattttaggtgaacaaggaatggttgatgaagcccagaaagccctggaagaggctgaagctcttaagaaggtgtgttctctttcttatttctttttcttttccccctacttttattagtcactaataattgttgggcctaaatttgtttcagcttacagttagacgagaacctccagcagattcaacgaagtacaccgctgttgatgtgcgcatcgtaagttaccatcactcctcccaatgatgccttaaagattcacattccttctatatttatcagtttgttttggaaagtaccgttgaatataggaatgacaacagtcatatattaacgtttaggtaaagagtaatagtttatttgagtaaacccgtttgattgctttcataaaagttactatttggaccaaaagtataacatcttcgcatcccctgtttaatgtatctacacattggtttcatcttctaacctcacttattgttcctatatcttctcagacagaccaaaagttgcgtctatgtgacatatgtggagcattcttgagcgtctatgacaggttaagttccttgctcaaactttctgcattattgtttcccttttggattgaaagagaaaaaaggtagaaatagtcttttgactccggctattgtacctcctcctttcaccagcaggctttttgggcaggattacttttgcagctataataaatgtgcgttcttttcttgattttattgtgcttgaaggatcttactagtagagattaactaatggagtttttaacgttatactgttttaatatgctatcgtcaaatgtttagcatttggctatgctaattggaacttttgtgatgctacagtgatcgccgtttagctgatcattttggggggaagcttcatctaggatacatgctagtccgggacaaattaacagagcttctggtaaactaataacacaatctactttatctgatgatggatgaaactgccttcttatatttctcttcgtttacttcaggatgagaaggccaatatacgcaaggaaaggttaggttttagttctagcttcttgtttcattgttttattacggtgttgatttgaaattgacttcatagtgaatacttaaaaccatacttagatcaaaggaacggaacagtaaggagagagaatcaagtaaagaccgagagaaagaacaagaaactagtcgtgaacatcgaagagattatgatcgcaggagtagagatcgagataggcaccatgaccgtgatcgtgaacaagacagagactatgatcggtcacactcaagaagcagacgtaggtcacgctcacggtccaggtcaagagatagaccaagggactatgatcgccacaggtataaaaccagagtcatggttgtcttcttttttccctaagaacttcacattttccttacaaatggttatgtcaaaattctttttgcaggcgtcacaaccgctactagatcgatcggtcttgctgtctaacagggtttacaagttacaaatggttttaggatctatcaccgaaacttttttctgtctacatgtatgttactcaagtatgttagatgagtttcagaaaatttcacatctttttcttttaccacaaactaaagacttggaagaaacaagatgtggtttatgtttttaccacatctgagaagcgtgtatgcactatcatcgaacgaaacaaccgcgcgaatagattctcgaactatctatgtaccttgattacaatcgtggaagtaattagaaattatatgattttgtagttatctatattggaattcagaatttgttatacttaaactagaccagttatttcagttaggaatttatctacttgtctcgattacaaacaaggacctttgataacgactttttaagattgaaagcggatatttattaactttttcacgtacattattactttagtaatcaaaatattaaagttcttagagaaatacagaaaaggaagaaagataagatacaatataacttagaagtgagtgatcatgaagtcaataagtcatcataatcatatgggaatggaacgagagaccttgggataaacatgggtggccggatgacccataatgcggcgacctttggcgtgcttaaagatataaaccaatgctccgaccggccattcaactattccggctgctacaaacgccacaagccctaacgtcggtcctaccactttgcatctacaagggtttccgcccgttccgcactgcacgcatatcggaatcatcgttggttaaaaactgatcaagccgatgaaatgtttgttgatgttatagggatatgatgtatggaatatgagtagaacaagaagtggaagatgatggagagttggattgtgatgtttatatagagactcaagcgaatcatttcactctctttttaaattcttcttcttaattgtttttatcaagtacgtagggtcggtccgtattattctcatctttcactttaacacgtgttgtgttctagagtatacatgtggtttaaggtggatacgtgttgcttcgatagttctttatgctcccgaaaattttcaaacgaaattaaaactctttttttagcttcttcactgaaaaagagatgggccttaaaacaggccggattcaaaagcaaccaggccagtccattacaaaaatcctataaccttatataggactaatggtaaccagaaaaaattgacctcgtcaatctaagacttattcaaaactgaagaaccttacaattttgcattttaatgtgtatgatctggtctccaccaaatgcatataggtgatgtagagatatgacgctgcatatactttacatgcacatgcatttcgtttatatatgtatgctttatatgtgttattttttgcaaatcttgaaatcaaaagacatttcccattaatcataataatcatgatcatg

SEQ ID NO: 31661 - DNA, 3000 bp, Unknown; identical to SEQ ID NO: 9097
  misc_feature (1)..( 3000): 2750-1469P.txt file - cDNA_ID_3044595; gDNA_ID_1971984; Annot_ID_177694

SEQ ID NO: 31662 - DNA, 3003 bp, Unknown
  misc_feature (1)..( 3003): 2750-1469P.txt file - cDNA_ID_3044612; gDNA_ID_1971986; Annot_ID_177747
gtgagtaatgtctttttagttgacggtgatctcttcttggactcatcacagcatttaacaacatctttcttgaagcacttcaccagcttagtgagcttggtgaggagtgaagggcgagagtagagtgtgtcggagatctcatccagatagatctttgtccttgtgagtgagaccaccttcgagtagtctcctgatctttccgacactatcatcttaccgcctctgttccctccagccgagattggtttggcctcgggcggcggacagcagtagcagggtttccactcggactcgaagaagaaatcaagagtcttgtaggtaaagcaaagcaggaaatcaacaatgtcgaggatgaagaagacgaagacgcccacggtgcggttgagcgaccgtgagaatcccatgctgtggagtttgagtcttgtggaagacgtgtatgtatgtaagttgtatgtatgtatggtggtgatgttgcaaagacaaaatgcgtgagagagagaaattaagttaatgaagagagagaggaaaacagatggcagctgcatgaatttattgatcgcatttaacatacattgttggctaaaatgatgaaatttggtggccgttgaatcttcttcctttttttttgcaacactagaccacgcatatccagcacataccgtaatatcttttttaacttcaaaacaggaatcaatactaaggaacatgtgatgtcgattggtccggtgatgatccaaaatgccgctatagctacatacacacaaagtcagtcaagtcattatggatgtgcggttccttccttagggttacaagaaattatgtttaataatgtgaaaataatatgctaagaaggcatgtaattttgtatttgaaaacaatcaaaaccctagatagtcccaataattaatgatactcatatatgctctgtttggtaaggccactattgaggattttggccggttgatgacttttggggtctaaaactacaaggagggcaactaaactatatggatataaatgtgttttttttttgggctatggatacaaatgtgattacgtaccgtgaaagtgaaactaatacagacatcaaataattgaagtaatggcacagagtagtaaatgtaaatgttgatagcgaaataagataaagaatggacaagtgatatgatggcatgtggccacaacttatatccatcactctgaatgcccagcagcccatctaaacagcctagctgacctgtttttagacaattctataatatgtatacacattttggtaaaacaggagttaaaagagttagtctgtcagtatccatatatagatagtagtattggtaatatttcatgaggacaaggacgtgtgcgtggcatcaagcaacagctaatcgcatctctttactcaacataccattctctctaatctgttagggtgaaaatattaatgaagtagaaatattcgagtgtgcttttatgagaaaagagtgatatacatatatagtagtatggtaaggaacgtgagaccatgtgctatgtttaataggttttcaaaagtcttgcgtcacacaatcttaaagagggcctgagagcttatttttaataatacttaaccaaacgagtggcttgattctaactagatcccggtatgtagtatagatacgacaagctactgatggagacagatatatatagtccccctcaagtcaagccttctatattcattttctgtcattgtatgtactcttcttgcaaccttttcatatgtatcactataatttgttttttcctcttgaagacttgaacaatctggtggagcaccagaagattcactaacagccaagtatttttttgatatcattcataagttttagggtaatggagtgaaattagctagaggaatttagtctaaagctcaaactgcgaccacccgatggagttgttttggtagagcagaaaaataagttgaaatgtaagaaagagaattagttacaactgtaagttacaagtaatgacacaattgtaatgcagaggtcaacgacgactgacatacatataagtgcactccattccaacatgtagtagcattcgaattggttttggactgacaaaattgagtaactacaacaaataataataataataataaaagtatgtgaaggaaaaataaaaaagtcaaaagaccttaaatgcgtagttgatggaggttggtagggagtgtctttaatttatagttttacatattttgaaacttgaaaagtgctcctctcctctttgatttatccctacttgctaattattttactcatccacgttaccatatcaatgtaatgacactcggtatatgattggccatcgacatgtatacatattgaaaaaatgtcaaaaacaagtttcacctatcaaagttggataagaaaaaaccccgtttaacagctcgatgcactacaatatcaagtgatttaacgacatggctaagttaggtttagtcaaatgaaacttcgttattacatatttacattgacaagtcaacgaaaatttaagagtttaggttcttagccgaaagttggtgattatttttattttaactaactttgaaaggtaatctttttttttttgtgatatttttcccataactttaagaatcagtatatgttttacacataattgatatatataacttaaaacataagcttatttgggcaaagttaaattaaataaaaattcgaaataacttgtaatctaacacatattaaataattgaataaatatttgaaaaaaatattctcaatgaaagataggcctcagtgaaacgggccaatgttttttgtgtgggcttatatagtccacccaaaactttacttgtttaagaggcaaacaaagtggacacttgtaagtggtaaggttgtggtcacgtttgtgtggcccttaatgcagtaaaagcagagtatgagatgatggtggtagggaagaagagcaacgagggcgagagatatcttcttatccatg

SEQ ID NO: 31663 - DNA, 3003 bp, Unknown
  misc_feature (1)..( 3003): 2750-1469P.txt file - cDNA_ID_3044630; gDNA_ID_1971986; Annot_ID_177727
gtttcttgactattctgcttttgtctcccaaggctatactattgttgatcgtatggattctctcgttgaagctagactagatcttcgattgtgggtgtcaactgattcttatgatagtgattatgaagacaaagattttgatgtctatcgtccatatgatgtttttggtgatgttacaagcctggtttcagggatacgcaaagttaagacccttcacctgtctcctgattctcttgaggtcagttctgttctgctactgctgactgatgggtggttttatcggttttgtatcatgtctatatgtgtttactggttgtgattataaaccaggcgtttttcttctgctgcaatcacatgccggtcttcaacaacctccgtaatctatctcttgagagcgacgaagaaaaaggatggcaagcattgcctcttctgctcaataattctctaaatcttcatactctatctatcaaagtatgacatgtttttgagaaattaatacacaatgttctttttggctcttatgtaaaagaagtttgtctgatttgttgttatggtttttagggtcttgtgcacagagttactagtagatgtggagacgcatgcgcctgcattagcgagaggaagacaggaatgtgttgtttatcggcatgtcgaatcaaggtgctagagattacagggtatggaggaagttttatagagctgaaacaaatgaggcattttttgggaaaactgcaatgtcttgaaactgtgagaattggtgttgaaagggacggcaacaacgagcacctgcgagccaatctaagctctcttcatagagcttcatcagagtgcaacatccagttcatttgatctctctttaaacaagttatagataatatgagtttgttagtaataaaaatatgacattttgtttaatttggtaaagttttgcactgattggcgaaacaattaagaggtctagttttggtaaaatccaaattgctaatctatcatctctcaaacatgtgttaacaaaaacaaaattgaggacttttgatttcacaatggccttgagccatgttaagagggaacaacgttaaccggattaaatcataatatttggtttggtttagtaaattagaaaacgtactgtatactctctctgcctgagggagaaggttccaaatagccctaaaaagcttcgccttctctccttgccttcatttcgggtgtggaggaaagttatcaaatcagtttttgtggaattttgaatctcgtcgcttctgtgttggctatgactgaagttgcgagctcagtggtgtatgaagtgctcggacgcagagctcaggatgtggacgagccgattatggactacatcattaatgtcctcgctgatgaggatttcgacttcggtgaggaaggtgaaggcgcctttgatgccgtcggtgagctcctcgtcgctgctgaatgcgtttccgatttcgaagagtgccgtttggtaagtaaccattcgcagcttgttgcttggctttcttcatttcaattatcgtaattctagattcgttttatctttgcttgtttgtatttatgggattttttcgttagggcctctgtgactgttgaaatggtttcaataaggtctcgcttttgaatgagctgagatatttaattggatgtggtgtgtgtaggtttgtagcaaactgtcggataagtttggaaagcatggattggtgaagcctacacctactgtgaggagtcttgctatgcctgtgcggatgaacgatgggatggatgatggacctgttaagaagaagaagccagagcctgtggatgggcctttgctcactgaacgtgacttggctaagattgaaaggagaaagaaaaaggatgatcgccaaagagaggtatacagtaatggcagtttttttaccggttttgaactgagaatttgtttcttatcttgtgtttatttactggtttcttgtttatgcagctacaatatcagcagcatgttgctgaaatggaagccgctaaagcagggatgcctactgttagtgtcaatcatgacactggtggtggctctgctatcagagatattcatatggataactttaatgtttctgttggaggccgtgatctcattgtcgatggatcaatcaccctctcttttggacgtcattacggtgggtttgatcttcgtttttatttgttttagctgtctgtttaatccaaggaatagacggtatggaaaatctaccttacaaatgggtatttgctctctttggatgactttacaggtcttgtaggacgtaatggtaccggaaaaacaacttttttgaggtatatggctatgcatgctatagagggtattcctactaattgccagatattgcatgttgaacaagaagtcgttggtgacaagacaacagccttacagtgcgttcttaacactgatattgaaagaaccaaactgttggaagaagagattcaaatactagcaaagcaggttagacacaagctactttactaatatgtattagcatttactcactcaggtgttttaccttttcgtataatctgtctttggtggtaatgttgacttttgtttggttatctgaagagagaaacggaagaacccacagctaaggatggaatgcctaccaaagacacagttgaaggagatcttatgtctcaaaggcttgaagaaatatacaaaaggcttgatgcaattgatgcttatactgctgaggctcgggcagctagtatccttgctgtaagttgctctttaccattataaattttctgtagccctttagagttttcatttgatagcatagatataaacgatatctggacccaagtcgtgacccatcactacataaatcatataaaatgctagatttgggtgatatctcctgttgaaatcgttgcatgttcttttgttaccttcaacttctgagtactgctaacttgcaaacgttcgctgtgcaatattttcagggtctaagtttcactccagaaatg

SEQ ID NO: 31664 - DNA, 1831 bp, Unknown; identical to SEQ ID NO: 9109
  misc_feature (1)..( 1831): 2750-1469P.txt file - cDNA_ID_3044640; gDNA_ID_1971986; Annot_ID_177713

SEQ ID NO: 31665 - DNA, 3000 bp, Unknown; identical to SEQ ID NO: 9126
  misc_feature (1)..( 3000): 2750-1469P.txt file - cDNA_ID_3044666; gDNA_ID_1972003; Annot_ID_177778

SEQ ID NO: 31666 - DNA, 3000 bp, Unknown; identical to SEQ ID NO: 9132
  misc_feature (1)..( 3000): 2750-1469P.txt file - cDNA_ID_3044670; gDNA_ID_1972003; Annot_ID_177775

SEQ ID NO: 31667 - DNA, 3000 bp, Unknown; identical to SEQ ID NO: 9136
  misc_feature (1)..( 3000): 2750-1469P.txt file - cDNA_ID_3044676; gDNA_ID_1972003; Annot_ID_177766

SEQ ID NO: 31668 - DNA, 3000 bp, Unknown
  misc_feature (1)..( 3000): 2750-1469P.txt file - cDNA_ID_3044680; gDNA_ID_1972003; Annot_ID_177765
gaaatgattacacagatccctattaagcttaagacttttgttgaattaacaatggatgttacatccgcttcacctcgacgatacttctttgaggtaagaaccctttaatttcaatcattcagttctaatgcatttgaatttcaaatctatgaaagtcctttgagttttatgagacaagtatttgatggacacccttgtaatgtatgatgtatcatctctgttcagattatgagcttctatgcaacagctgaacatgagaaggaaagacttcaatactttgcctcacccgaggggcgggatgatctctacaattacaatcagaaggaaagaagaagcattcttgaggtaaaatagcaccagatctcacaggttcatgattcgtcttgaatatgcattcactctcttaaccaatcgtattgctaatgcctatgtaggtgctagaggattttccttccgtacaaatcccttttgattggctagtacagttagtcccaccgctaaaaccaagagctttttcgatatcttcgtctcctttggcccaccctgccgcagtacatttgactgtaagcatagtatcatggatcacgccttataagagaactcggaaaggtctgtgctcctcttggcttgcaagcctcgcacctgaacaaggttagaagtttgtttcttctttaccataactgtgaatggctcagttctctatttctgatatgttttctttgtcttcggttgtggttagaggtaaacataccggtttggtttcacaaaggctcccttcctgctccatctcagtcgcttccgctcatcttagtgggacccggaaccggatgtgcgccattccgtggattcatagctgagagagccgtacaagctcagtctagcccggttgcccccgtcatgttcttctttggttgcagaaacaaagacacagactttctataccgcgatttctgggagtctcacgcaagagaaggaggcatgctctctgaaggaaaaggcggtggcttttacacagcgttctctagagaccaaccaaagaaggtttacgtgcaacataagatccgcgaaatgagcaagagagtttgggatttactctgtgatggagccgctgtttacgtggcgggctcgtcgacgaaaatgccttgtgatgtgatgtcggctttcgaagatattgtgtcggaggagacaggaggaggatcaaaggaggtagcttcacggtggcttaaggctttggagaagacagggaggtacaatgttgaagcttggtcttaactctctaacttccttcatatgtaatcttattacatatatgttctctgattattttattgctggcacattaatttttatttttattttgataattcatacaaattaattaaaagtgaagatgatgtgtcgaaggttaaggttgatatagatttagttttgaaatacatatttttttgttggtttgtttgtttttcaaaatcgttaattggataacactagatattaatttctgtttaaatttaaatatcaccaattaagtaacatgtgtcatgtgattctaattaaagagtaaaactgttcatttaggatttttttaaaatcagattttataatcaatgcaaaacctcaactagtctaaatttctgaagaaagtagtttgcttttactttttgtatggaaagtagatgacactgacacgaaaaaaaaagagattaatttcagtattaaacgaaaaaataattgcagaagcacagaataatcgggcatgcgtgagtaacaaaataattattcgtcctccattaaccccataaaagcagtgagatttcgataaaaaaaaatgtgatttggaaacagaaaaaggagttttcaaacttacagaaaaacatttcttatacgtctaaaattcaaaaagttcaaaatacaaagtcatctatataataatctaagcgtaattatattatgttctttgattatcattattatatagaattttgttatttttaaaggtcaacttattttctgtttgaagctccattggcatccacaacgaagctctcctctgtctctctcacccactttcataacaacaacaatcatcattcatcttcatcttcttcagtgttcctcactttttccgcaatctttctttttatcaccgacgagaaaacaaatagtaatccttttgaagtttttcactttcctgggaaattgcacaattaatgagtttctatatttatattaaaagttgaaaatttaaagccttgtctctctttcgtcggttaatttgtttcatctgatcgaaaaggaatcagtttaggtctttgcctcctctctccggccagctcaattctcgatcaaaggtttactctttctttttaatttttcgattatttgaaaaattactagaaatatgttttcatcaataacgatcctgatcgttatttgatctcacaagtttgttttctgatcaaattttactgtttttttgtttgtcggttgatacactctgtttttctcagttctttggattaatgcaaatggggtttttcacttttcggtgtctcttatctcaattgagtttgtctgtttctctgttgaagcaaagtttttatctttttcttctttttgtgtggttatatatgtggttgtcggaaatttacctaatttagggttttttcctgtgtaagtgcttgcatttcactttaacaaaacctcaagttagagttgtgagtgttcagagttcagatcgattgaaactctcagttgctactcaacagaaattggacttttggtttgttgagatgtattgtttgaagttgctttgttccactagtgtaaaataacattctcttctctgcatctttagacttatcaaggaatcaaacccattttatcattgcaggtgacgtggatatatgaagcagatgttttggggaaccagagttctgtaaatagaaaccttcacgcgacgttgaaaggtttttgagacgaatataggaggagaagatg

SEQ ID NO: 31669 - DNA, 2862 bp, Unknown; identical to SEQ ID NO: 9139
  misc_feature (1)..( 2862): 2750-1469P.txt file - cDNA_ID_3044701; gDNA_ID_1972008; Annot_ID_177816

SEQ ID NO: 31670 - DNA, 3000 bp, Unknown; identical to SEQ ID NO: 9140
  misc_feature (1)..( 3000): 2750-1469P.txt file - cDNA_ID_3044708; gDNA_ID_1972008; Annot_ID_177808

SEQ ID NO: 31671 - DNA, 3003 bp, Unknown
  misc_feature (1)..( 3003): 2750-1469P.txt file - cDNA_ID_3044728; gDNA_ID_1972013; Annot_ID_177836
aaacaaaacatatcggttgtgtgtgacaaaagaaacatacgtgtcaaatgggcctctttcatatatgttccacataacatgataacattaatatgataattattttatttctttcaattattggtcttgtcttctatcttacaacactttaattggcttccaaatacgtccaaaccccattaatgatcttctgtactctatatatatgttttttttaatcgaaaaagtctttaatgtatgaactaaaactgaaagatacgaaccaagaatggttattgtttcatattcagaaatttttatcagaaatattttcgattctcatgtatatatggactgaaaaatcactatacaccaaaaaatagcttgtacccatgaatttcgacgtacattcaacattatttcaaattgaatcttccatcattttgaactgcatgttggaatatcaacattacgtttttttcaaaaaagaaaagaatatcaacattccgccgacaaaacaatagggcgagaggaagtggagaagtttgagaattcaaacacatacatatataacatcaaggatatttcgctataaaaaacactaaaaatatcccaagcataaatatataatatgtccagtttagtgtccacatatatgttttatgttaatatattttgacaatttgacatttctttttaatgttaacgtacaccacaccttacatgccaacaactcataatttcatgaattttctctgtgtaatttcatctgtagattaccaaactcactgcattgtgaagaaaataacaaagattcatcaattttctcttgaatttaaccttgtaccaaaaaaaaaaatattttctttcagaagattcagtttgtttttttcaaacttttggaaatgacatgttcaagataagagtgttattatcacacaatcaaaacttaaaggaaaaaaaaacagaaacaaagataataatttgagaaagcagagatgtctagcaagcagagaaaaaaaacgacagttcgaagataacgagggcattagaaagggacacgtgggttagagggtggtcctacgtaaactgattttttatcagcagtccagcttggcacttgtgagattctcttctgtgtttgcagatgagtggtgcccacttctcagaaataatagatattattcatacacgtgtctatttcaaaatgccactcaataatagttggtctactaacaacttcaaatttgagaattgagttgacactattctaacctcaacactttgtatcgttgtatatgaacatcgatcacccactcttatggatggtggttaaataaaccgaagtacaatagtatttttttttataaaaaaaatccatacaaatttaaacaaattcaataaatgtactaataattttagtttgaagttctaacaattaacaatgtagacaaagtgccaagacaaattccgtggccaatatatataacttggtttagttaaaacatttgttggaattaaaacatattttcaaaatttcatgttttggtggaagaagtcgttttcaccttttaaatttgtttcagacatggagtgatgtgtcatcttgtttaatattattgtctacagaatgttactaaaaggtgaaaaccaaatcttgataaagaagttaattataaaacaaaatcttccggttacatttttttggtttttttgaatgttatagatttggtcaactctcttaattcatccaatcacgcgtcgaaagctataataacacttggttgcttttttttttttaatacaattttgtttttaaaacgtttagaacaaaaataaaaagaagaaaaagaaagagtgaaaaacggcaggggtaaaaacgtcaaagaagaaatagagagagagagtgaagaggagtacaacagaatccacgcggaaagacagctgttcccatgttggaataactgtgcgggtcccactttcattacactcactcctctcgcacatcttctaattttcgccgccgttaccgtctttggaattttttttggtttaccacactaatgttacatttttcgttagagatgattttgttttttgattacaacctcctacgacgtttgagttattgagattacttttataaatttccttactctgtttctttgggtcaacaattcaaacaatgatggtaatggagtgatcaattgacaaaaaaaaaacacgaatcaaacaatgatcgattatataaagctgttatggtctaataactgaataataaaatcatcataagtaaggaaccaaattcgaatactcgcaataaaccaataatagtaatttagtggataaaataatagttatgggttcggtgtcttaaagatttgagtttgatcatcgtaattcgtaaacctttgaaacattttctgtttttttcacaaacttttgggaatatttgttttggcttgacaaactctccaaatagctctttcgtcgtttaaaatctcttagttacaaaacaatgtattgaggtttcgaactcccaaaaccaaacacaagggaaagatgaaaaccattaggccgatcaattactattaagttataactagctaaattaccaataacgtgtatggatttatacccaaaaaaataagtaaacgtgtatgagtctacgagacaaatcgtgtcggctgtattttgacaccttagtcgcgaggtaggtcatacgtgctgcattattaaattcttaattttggtcgaattaattagtaaatactcctaaataatgacgtggcaaattcggtgcaggccacaattctattatagtgaagcactagagtacaacaacaacacttgtgcctcttcttctctcttcctcatatttattactctctctttcacaaacacacagaaaataaataaataaaattaattaatgtgagaaaatcaattcaaaaatttggacatacgtatcatctgagagaagaagggtttggtgaataccggcgggtggaaccgacggcgatg

SEQ ID NO: 31672 - DNA, 2052 bp, Unknown; identical to SEQ ID NO: 9146
  misc_feature (1)..( 2052): 2750-1469P.txt file - cDNA_ID_3044732; gDNA_ID_1972013; Annot_ID_177862

SEQ ID NO: 31673 - DNA, 3000 bp, Unknown
  misc_feature (1)..( 3000): 2750-1469P.txt file - cDNA_ID_3044742; gDNA_ID_1972013; Annot_ID_177856
ccaatttagatcacacatttggccgctggactacatgatgacaagcttaacttgtgagctgccatgatatttggaaactaatattttgggatatagtgagatattactggtcattaaatagcaacaatgcatatgtggtgagtcaaatctatactatcagtcaaggtatgcccttgcacaagaacccaggttaattcctattttgtgcagacacaactcagattccttgatccaagacgacagaaaaaaacaactacgaagcaccagaataaaatgtagtcttaatcataaagccaagcaaaccttaccttattccagaaagaaatgaacattggagaattttcatcgctatcggtctaaaagggagaagtcctaaacctgaactaatcccatcctgcaacacatatttatcatcagatatattgaattcaaactggatcatctgatagagatggggaagagagaaagagattaaaaaacctcaagaacaagcaatgattttggatctccacgccaacgctgaagaagttggacagaagggccaagtcgcaaactccagtgagaagcaaatacgatgcatggttcctgccaactcgttctgttcgcataacttaaaaaatcagtgcatgctgtaacatacttcttgatatagaatcacatcatcccaatattcaggtttgcagattccatgtgaggtatattactgatgtctctgaaccaagcaatgatttaaggtgaacagagatgatattttcatgacatgtgtttgcaaactatgcatttacgcaaaataatccatcactaatgataaaagagataaaacttataacctcttcttacattaagttgggtgaatgaatggcaggaaacaaatggatcttcttgtttttgatgaatttaagatggccaaacgatggttctcctgaaattaactgcaacatcaatcaatatacatacttttaattcacatttcaataccataaaataaaacttatcctatttgattcatttttctaataatattgtcattgataaccaaacaattggcagaagtataccttctcctgtcgttgttcgcacagccattcgggtatggtgtttgtgtatgccaatagctcttctgccacagaagatattacaaagattggaacctaaccagagccaaactagagttacttagactcacacagctaagaatcatttcaactaaaataaacttttttctgtgcttcatatcctcaagaaagtaaaactaaagaaaaagaagaaagagacatcaaacctttagagacgaggattcaagagaatttgacaatagctctaggagctgcagaactatcccaattctagtaatcgttatcaaggttgagccaccagcatcagcagattctgcagcacatgaacaaacaaacgctagtttctccatctcttctaagctgtcttcagtgtttagtaatgaatccttgttgtcactgctaaaaatgttaaacagtaaagaaagatcccccactttaagatctaaacaaacatcctcttataaatgtaaagaggggtcttatatgatagtacctgattgttgatatataattattatctgagtcaggagaaatacaaccatcctcagtcacttctgcagattggagggatgagaaatctgagtaaatcaaaacatcggtttctttgagaccatggaaatcaaaacttcttgcatgatgtgaaacgaagatggagtctgacacataacttagacttccattaggtccgttgatcaaccaattacaagccccaatatctagacctgaacttagagccttaatgattaaggtcccattgtaacaaacttcttctgcaaactttacgccttgaaccttcttcatgcaactctctatatcatctaaactgtggaaaagattgcacaaaacttaaagaagctatcaacagtacttgaagatctagcaacatattgtttgagaagccaataatagttacctgtacagacgcatccaactgcccagatcatcaccactctcgccgaagacaacttttttaagcaaggctggtacttgttcactatctaaattctttatccacccaggaaaactggagttgtcaggtccatgaaagcatctgaattccttgtgcatcgagacaatatcttccatcatgagctgtccaatcttcgctgttacttcagtcatatatatctacatcgtagcaacaataacaactcagcacaatacacaccccaagaaaaaaaaaatcattcagaaaactcaaaactttaggtcctgaacacgtataccttggcaaaaaatccagggttttgagtaaggaatggcaatccgagcaatcccatagggttagagatgagaacaatatcaatgaaagaagcctcccacaaatgcaaggctttcacagttttgtaccacggttcttcacacaccaaatcagcacaagttagctgtctctccagtttttgcttcttttgaattggattctgagcatccaacgactcatcagatagatattcagaagcttcagaaccaacaccagatggaacaggagagaagattttgattgccgaaaggtccaaagggcagtcaattaaaatcctgaaaccacatagattcagcatatgacaaggcggatagtgaaagccatctcctttgctcagacatgtctgcaaaaaaacacaaaactttcatacttacccaacccgaggttttcaataactcacacgaaaagtattagactttcattaaccaagagaaactcaccaattccatggagacaaacaacagtataatctgtttaaaaaactgaataagcgaggtttaaattcagagcttttccaaacaacgcaacctaaaaaaacagccagaaatatgcgtatcatagaagaggttcagtataactccataaaaatttccgtcttgttttttagagagagactaacagatgcggcaaggaaagtacggaggtttatgcaaggcggcgatg

SEQ ID NO: 31674 - DNA, 3000 bp, Unknown; identical to SEQ ID NO: 9144
  misc_feature (1)..( 3000): 2750-1469P.txt file - cDNA_ID_3044745; gDNA_ID_1972013; Annot_ID_177855

SEQ ID NO: 31675 - DNA, 3003 bp, Unknown
  misc_feature (1)..( 3003): 2750-1469P.txt file - cDNA_ID_3044749; gDNA_ID_1972013; Annot_ID_177853
aattctctgacacctttcgggaatatccccgaaggtaatccgtttgccaggaggatctcgtatatagtctcagtctctgatatcgccgtggagatcgagatcccggcgacgagaacgagacatagaaacgcgatttgaacaatacgaagcatcatcggcttattcttcccgaattcacggtttgtgattttgacagatctctctctgctcgtttatcaggaaattgaattaatgggtttaagggaagacgaagaaggagaagaagaagaagacgacattctggtgacagcttgaaacagagtggatcaaaattttatcaaattattgaaggcggaatttggaatggagcagtaatcttgtgcttctcattccatagatggaacagaccaatgaacgatagccacgtcggatgtgtgtccaccaagcagtatttagttaaatgtggcttgtttcgttaagcctttggttctaacttcctaaatttcttacgcgttattggaaaaagtaggtggaccgtatcacatgggaacagagtggatctggccggacttgcggctattcgaatgtttatagatttttttctgtcttaaatgcctcataaaatacatagaagcaatgttttcttcaacccaaactaaaccaaacaaaatatttggattaatattgaccggttcgattgaacggtccagttagaaatttgggcttgtaagtatgtaacttatctttgggcttataaagaagcccatctccaaattagcgtttcaccctcactcacttttccggtttcaaccattagcacaaaaaatctgagctccgaccaaaaattggggaacgacgatggcgacgactcttcagaaactctcctctcaaatccaccgactctctccattcaccagatctctaatcgttcgcacatccgcaacgtctgctccttctccgtctctgggatcgaagaaagtctctgaccgaatcgtcaagctttctgcgatcgatcccgatggatacaagcaggacatcattggactctctggccagactctccttcgtgcgctcactcacactggtctgatagatccagcatcgcatagattggatgacatcgaggcttgctcagcggagtgcgaggttcagatcgcagaggaatggctcgagaagctcccgccgcgtacttacgatgaggagtatgtgctgaagcgtagctctagatcccgtatcttgaacaagcactcgcgtcttggttgccaagttgtgttaacgcaggagcttcaaggtatggtcgtcgctgtccctgaagctaagccttgggatattccgtaagtttttgttcttgaggatctcataaatgttgggttcgttctcaatttggctaataaaattcgctttggaaatttcggtactctgaagataactccatttgaatctgtaattttcgtttgcttacatttaaattttgtaatgtggtaaagaactctgcttgtttaaacgattccctgcttcaagtatgggtgaatgttgttttcttgatttcattttcgttgcttcttcttccattagattggttagagactatggtgttatatctagagattggtaaaagcaattggaaaatgctaggaggttattgaacacattgtgttgaattgtggttacctggtgttgatatctgttggtctcgagctcaatttgccaacagctttaagcatagagaaagagagtatatagaatgatgtgacttcttagtactggaatgagattctttttacagaccatatagtaatcttcccggtttcggtatgcttaggattaataggccatcctttatattctcgggtctaattgtctaaggaggtgtttccgttgagttagaagaattagtggagttttgatctttcattctcataaccactgcatctttggtgaggctgagataacattaaatatactctgagcattgtaatcacagtttctgcttttagggaaagggaataaggtagaatggatctggcatcttataccaatggtttagtagatttgatttgagccttgtaaacagaaactctgtttgtaggatcgattcttgttcagggtttgattcagtaacaaaacatattgagtatactgtttagatattattttcctaccagtagtttctaaacacagcttaggcatctttaaatgttgcgaatagttttctaattcttactcgtttttcaaaatccgaaaccaaagcaaactgaaaaatggatgctcatctctatctacctgaaaacgtcgatatcaaaatcaatttctgcttgtggtgcacttaacacaataatcattactctcagtcttataaggatgtgcaatacaacataatttaaacctgttaacagactatcaatctgttaagaagtgattaagaccttgactattttaaaggctatctcttttattttaattttattattgttcaagttgtctcttctattttcgaaacatcgccatgttcaaatcgacaaaaaaagaagtgtatagaacaaatccacttagaataagttacatcttatgtagataaaataaataaataagttttgtagaaaattaaccaaacatatacaaacagacgataagcatttgaattgaattatatttgtctataccataaattgagtctcaaaagatttaacctgaaataactatcctaacggaaaactgttttgaagatgacaaaatacgagataatgtgtagattccgtgtgtatctctattgatagactttagtttttgtgtattcttgaaggacataaacctattttaagaccagttcaacagaaaactggtgcagaccacgatcacagttgtaatgagttttctaaaatggtaaccactccttttcctttaagaagcagtccttcttgtctcctgccctaattctcttcttctctataaacccatattctagttttgttctcattcattctctgttcaaagctcataaataataaactccaattaagaatg

SEQ ID NO: 31676 - DNA, 3000 bp, Unknown; identical to SEQ ID NO: 9143
  misc_feature (1)..( 3000): 2750-1469P.txt file - cDNA_ID_3044753; gDNA_ID_1972013; Annot_ID_177851

SEQ ID NO: 31677 - DNA, 3000 bp, Unknown; identical to SEQ ID NO: 9148
  misc_feature (1)..( 3000): 2750-1469P.txt file - cDNA_ID_3044755; gDNA_ID_1972013; Annot_ID_177849

SEQ ID NO: 31678 - DNA, 3003 bp, Unknown
  misc_feature (1)..( 3003): 2750-1469P.txt file - cDNA_ID_3044761; gDNA_ID_1972013; Annot_ID_177842
atatattcaaagttgcccaacaactaggaaattaaagaaagaagaaaataacagaaaagaaatgaattttggctcataaccaattctcatgaaatgacctcaaggaaaattccgatattacccgccattgttccacgttattgacgctgtgtcgtttggagaaaatcaaatatctcgtccctagacacacattattcctttccaaattcgaaattgaatgtaagctgtaactaacaaaacttgtattatttggaaaattatcgatcttttttttttgttaaaggaaaattatcgatcttaatttatcgatcttaatttattttctcacattgcccacctctataaatttcacacacttcaaaactagtataatttatcaattttactttaacactggaatattttcatcttatacagacttcgataacaaaagaatatatactaattttaaacgaaagacttttccaacgaagctacaatgaaaaaagtcatgcatgtaaacaaaaaaataaatttcaacccctttgactgatgacaatatatacacaagaaacaggttgacatatatgatgagtatatgacttctatctatatatatatatatatatatttaacacatgtaaatatatttctataattcttaataaattgaaaaaaatattttcttctaaataaaactattaataaaataaaaaaacatacgatttcttacctagcgatgcagtgaaaatatgagagacgccagttgcagtcaacttccaaaagaacacgcactctccacatgctctacccaaattcctccttacctattataatcacctccgacttttaattataacaaaccaattcacatcgtgaacgtgacttttctatagctagtggtcaactcgacacgtggcatcatctcaacggtctccttgattctctcgtcatagaaacgatgcactgaatcaatctccataacttcagggcattgcccttctatataaacatcacatgtccctgtgtcttaaaatacctcttatcaaacaccaaaccacaccagaacagaactcagccatggcttcttcttcttcttctcttctaatcctagccgttgcttgtttcgtctcgctaatctcaccggcgatttcacaacaggcttgcaaatcacagaacttgaactccgccggtccgttcgatagttgcgaagaccttccggtactcaattcctacctccattacacctacaattcctcaaattcatctctctccgtcgctttcgtcgccactccatctcaagccaacggtggctgggtcgcttgggctattaaccctacggggactaagatggctggttctcaagccttcctcgcttacagatccggcggtggtgcggctccggtcgtgaagacgtacaacattagcagctacagcagtctcgtcgaaggtaaacttgcttttgatttttggaatctacgcgccgagtcgttaagcggcggtaggatcgccattttcacgacggttaaggttccggcgggagctgatagtgtgaatcaggtatggcagatcggcggcaatgttaccaacggtcgtcccggtgtacatcctttcggtcctgataatttgggctcccaccgtgtgttgagtttcacagaagatgcagcaccgggctctgctccttcgccgggatctgctccggcgccgggcaccagtggctcgactaccccaggaacagcggcgggaggtccagggaacgcggggtcattgacgaggaacgtaaattttggggtcaatttgggaattttggttttgttgggttctatttttattttctgaatggggatctctctctagtctctcttctcttcttgagtctctctctatttttttttttttttggtttgttcgaacaataatggtgccccatacttttgtactgttttagtcttagggccatttactttgtttcaccacattacttagagttattggattgtatggaccattactatcatgagattgagatcatcttatcttcttaaaatatctatttgccatccactgtactattttcattaatctaattagtcgacatgtatttgaaaaaataaataattcaattgacaaaccaaacaacacaagaaatttttattactaccgtgttccttgttaaggagacaatcaaggagttgattatgtcaatttatttcaatcaaatattctgtaattatgtctgattagggcaacattagactctctagcttgtgaatcattcggtaataaaatcacccgattctatcctgtgtttcttttatttcatttggtgatatatatatattgaagctttagaacaaaaagttattgtttgttctatttgctgttgtccacaataaacatccataagtgataaagaaatattcgttttgttattgttggttcaaaagtgtgctgacaacgttctaatttcacaacgaagttttcatccttggttagaagaaaaaactagaaaagtttactagtgtttaattttaatttagctagctaaacttgccactgaatgtatcaatgaactaaacgttcaaattttcaactcttaaaatatttggtcactagtattccaaagttttcgtcgaattatgtttgctaaatcaaaacataaataaaatcctaaaacttgttcccgcgggaccatctatacaaaataatttgggcctaaagcccaatagtaagataagtaacaagacccaagaagtatagacagtttcgaacaaggagacgcatatgcgcgttttgatgctcaaaatctctctctctctctctctcatccctctgcttcacgttcgcgacattactctcttttaaggcgcttccttaattttatcatcttctcaaatctcaccctgagtattcccattttcaaatttcgacgcggtttcaatactcaaaactcaagcgctccaaactaattccggtctttactttcgatttagaggtgggtattgaccaaaggttgtagtaatg

SEQ ID NO: 31679 - DNA, 3000 bp, Unknown
  misc_feature (1)..( 3000): 2750-1469P.txt file - cDNA_ID_3044773; gDNA_ID_1972013; Annot_ID_177830
atccttcttcttttttttttgtcaagaaaaacaagggttatccatgaacaaggaaagaaagataaagatagaatttacatgaaaagaggacacgtgacagagaggaaacacaatgggaatatatatgatttatggtgggggccaaataggtcgagagatagatgattgcgaaaggaagcgtagggccaagaaccaaccaaagagcctttcacctttgtctccctatcctgttcttttcttgatttaatccatttcttttggctcttcatgaaagggaaaggtgtagcagcgtctctgtaatttttaaaattctttttaaaattaccaataatcttgttttatgccaagcataattaatgatccgttttgtgatacaagaaaattgtggctgaaatggagaacaagtccattaaagactcggtcctaattggtggttgaacttaagatatgaatgaggtatactctccagtccaggtccacgatattatgaaacaagcaatttcgtgggagagtgagagaacaacaagtactatataataaagtcattgtcgactaagcatgcaccaaaacttacttcaaatggtattttaaccgatgacggagtttttccaattttgttagtctcaaacataaatcgtcttccattgcaattgctgttttcgaaacaaaatcaattaattggaacatcatagagctcatcagctcaagcaaacaagaaggctaacatttgtgttgtattataagacaatcatcattgatttagactaatgatcataagtttttccttacttggaaggtttcgagtttttttttccaacatcaaaagtgaagaggggataaaatacaccaactgaaactcatattcgagtgaaacagaacctgaccgaacaacttttcttaatttaatggaaggaaaagttgggatttgggaggtgtgaagagttctttagaatgaggtaacgaacaagtgacaatatctaataatcttttgtaagaacaagaacatgacaagtgggttttgttgtttggtgtctatttatgctcgtcgccccatgcagtatagtagtagtattattaataaaagacccaaatccgtttttttgtatgctattgaaattttatctgaacgcgaagagtcaatggattattcataattctaatgaatacgtgaaagttctgctcgtcttagaacaaagtacttgggataaaatgccaaaaagccggtttaaacgaaaatcaagcatctttcctaaaccatgttatatataatgtatttttttttttttgggtaaagaaaataacatatgttgtacataatgtattacaaacaggaattttggcaaacaattatgcatcacctacataattgtttgtgtaagtggtgatgtatatattttattctttcgaacaattatgcgaatattgtcaccaaaatatgaaaatatcgatgttatctattcatcattaaattacccgatccagagatttataagtatttaactatttatcaaattctaaatcgatgttataagttgtagataatttttagcaaaaaaaagttgtagataattgatattataggggagcccattccaattctctcccgaggatggatcccgtttaaattcgtaagtgggcttataagttgaaagcccatacttatgttagaagttaaaagcccagctaaataataatctctgtagtgtttatagtcgatgttgggctattgaccactattttcatcatgcgtgacgtaggcgtgggaagtattatttgtgtgatccgagatctgatccgaatttgaatgtagctgtatgggagaaaagccgaacgtgtatattatccttttgacggcgcttaaggttatcttatactagtatatgtcatatttttcttacgtaaaaagtcggtgatatgttattgaaacgtgtcaccacaaacgtaaacctatgatctgggacatgtttgaaaccaatgaacttttcaattaaactcggacatctatttgtatctttctgtaaacttaaatattagatatatctattgatgtattatgttgattttcttattcttagacgactagcaatatacgtaatatggtcaattagaaatttagaaatctcaccaagtcaagcactaatctatacagaacggcaaatccttctaagttctacttctaaccaaaccgtatgatccacatgaccatatgagagtaatttccaagagactatcatgatgcaagaacgaacataaaaccatctaactaaaaatttagctcacttacatgcatgaacaaaccaaattgcctcattgaaactgcctacttgaaacatgttataaaatcaagatttttccttgtctttttcttgattcgaacaaagaaagagttaaacatgttgacatacaaatcaacaaaagaaccggcgatggttaaggaacttcgacaagggaacccattcgtcaaaagtagtttgttattcgtttaccggtttttgatattagtaccagatttgtttttgacatcttaaagaacgttaagattgtttcgtactatttaatagtttcacacttattttatactgtatttagaagcttgtttctccaattatctcatttggtaaagacgtttcattagcgatatcgtgttaacgtcgaaagtcctcctctcgttacggtccggtccgacacagaaatttttatttaatatttactttattttttgtccatttattagaaagaaagtcattgattggtgcaatttattaatataaatttattaaacaactatataaactcctcattactgcccattaacgagcttcccttttcctctgttcttcactttaagaaaattacaaacttttatcttctattggacgaatctttgatctggttttaattaatcacacgcttactttaggatttttttacctgaattcgaatatatacttttgattttcatcttccgtagtccgtaccgtagaattgaggagcttcatg

SEQ ID NO: 31680 - DNA, 3000 bp, Unknown
  misc_feature (1)..( 3000): 2750-1469P.txt file - cDNA_ID_3044777; gDNA_ID_1972013; Annot_ID_177828
aactgttccgtttgtgcttctttgacattcttcggtcaaaggtgaaattgagaattatattgagactgttttcctcttgctcttccttgagaatattttatgtttatgaagttttcatattgatagctcggtctgatcttaatctggcatttttttttctctactacaggtgagtgctgccaagaaagcaaatatgatatttctcttcttcttgctacggaagcttatcttgccattctactcattcacgctcttctgcgtcattcttccattaacgatgttcttcccagaggctaacttaccatcttgggttgtttgctatatccctgggatcatgtccatcttaaacatcatcccagccccaagatccttccctttcatagttccgtatctccttttcgaaaacaccatgtcagttaccaaatttggagccatgatctctggtttgttcaagtttgatagttcttacgagtgggtagtcaccaaaaagctagggagatcctctgaggcggatctggttgcatacgcagagtccggctctttggttgagtccacaaccatccaacgatcatcctctgattcaggtctgaccgagcttagcaaactaggagcagcaaagaaagctggcaaaaccaaaagaaaccgtctgtacagaacggaaatcgcactcgcgtttatcctcttggcagcctcggtgagaagcttgttgtctgcgcaagggatccatttctacttcctcttgttccaaggaatcacgttcgttattgtcggtctagatttgatcggggaacaggtcagttagtttatataaccctttttctcagtttaaaactacattgaaccataccaccagaagaacgaacaagacccaaagatcaagtcaggaaggaacgaaccaactcactcgcaggtcttttcgttacagatagatacataaaaacaattcatttaaagtttctgtcttgggaacatgattttatactctacttgggttggtttagattcttcctttttttacggatagtattagagaatggcagaaacaaccgtcggagaggattccaaagacttgcctacctgtctttgttgtggtattaagccaaaccttggtttttttgttgtgcaaaaattgttgttaggttgttggttttttgtttcggatgatgtggcagaaacatattttaagctttgctctaatgccactctcaaattctttgttgttgttgtttctctcctaagggttcatttatttatatacacacttctgaattgaaatgtaccatttcttttttaaatctgttgtcttcatcttttagtatttgttatgctaattttgggcctcttctatcttaagttataaggaccagaatctgtttgacaatctcttgtatgatttaaggcccaatttccctcagctctcttagatcaagcacaaatgattcgagttttgtgattgaatttatacgaggaactttttttccataaaaagtcaaaacacagatgttaaaaattgtccgactgcaaaatgtataatgtacaaacatatgacatatgtttcgacctaacaagtctattgcatgtattcctgcctcggagggcgtaaacccagataaatcattgcaggcttgaaagaaaatcgttgataaaaaacactgttgaaaacaacttatcaaacaatttacattgaagacgatatgctaaattaaatatttcctgacagatataaacccagacctaatattaatgtactccagcagagaaaatatctaacaaagtggaaatctcagagacaaagaaaaaaggataaaaggataaaaggaagaagaaagagagagcttgtccgagaaggactaataatggcgttttttttgtttccgaataattatggaaatcttctctcagatattcatatctctatccgactcgtacatggtacacgtatctatacccgcagaaatcgaaactatcatacctataaattttagattattccggttgaatataggttggtcggtttaccggaccagaaatttatgattttttaatcattattataagaaaaatgggatctagagcataatgtcacgtcacatcattaaagcatgagaacgttactttttcgtttttctcaacgctcattaaagcttttttagtttctttattacaagacgaccgttgagatttgttcagaattaagacaccaataaacagtcttgtactacttaacttacataaccttttcatcacataaatctcttcgtgccaactcgtttagagccccgacaatcacacttttaatactttttctaagaatcaacgtttatagtactacaatgaacagtcaacgagagtttcctgagaatctgtcaatattttgttccgttcattaacaacgagagttgaactaaaaaaatccatagagaacaattcttcatttatccacctacttcatttcccacgaagcataagggtccataaataatctcaacgacatgttaattattagaccatgaaaatttctttaattattaacctttgtagacaaaatgtgagaaatgtttttagcaatagtttatatcatttaagatttaaaattatatttaacaccaaaaacagaaagaatatttttcactaaaacataatttattttaaaacaacctttaagaattggctagaaacagagtttttcaattaatataaccattcagactaaccaaaaaaaaaaaaaagagaagacgtcgtagtaatcgtacacttaaaaaattgaatataactagtaaatacaaaagttagtaatacattgtatcttttgttgatttaatactcaaaaacaggcttttgtacaggaacacgtaacactagccattaaatatctccactcttctttcttcttaccaaattactcaatccatctccctctcttcttctccttctccaaacaacaaaccaaagcttctctcttttcttgcttcagagagacctagaagagttatcaacatg

SEQ ID NO: 31681 - DNA, 3003 bp, Unknown
  misc_feature (1)..( 3003): 2750-1469P.txt file - cDNA_ID_3044781; gDNA_ID_2684211; Annot_ID_191501
gcttgctcacaggggaataatacctgtgacccgattcaacgcggaggcccatgtcagaaacctgatttgaccgttttgcacgccagttacgcctttagctcttattgggcccaatttcgtaagatcgggggaacttgctccttcaacggcttagctacacaaaccatcaaagatccaagtaagttaaattccaaaatccaaatcataattaaaccgattcgtaaattagttccggttcagtgatatcaggatgttaaaaccggtggtggattttgggtttgctaaatttttgtactctgttgtcgcttgaaaccaggttacggacgatgtgagtttccgagcgtgacattgtgaagacttacgagttacgaaaatgcatggtcgagaagagacgcacgagggaaaaccgcacgatgttacggctttcattaatggaaacagcacgtgactctctgtacgatgttacgtagcttgattatttagaaacggcacgtgattagtgtttaacttgctgtttatttattttatttttcttttcccgcgaataatgaaaactcatgaaataattaattcgttttcgggtaatgcaatcgccaatcggtctcttatgtgtgttaagctgaacaaaacaataaaattactaatgttctaatgggaaaaagtttgcaagtttcagactgtttccttgtttttattgctaaaattattagaggaacaaaaatatatgatcttcttttgttaacaaaaagaaacgtttgcaaaattgatcttacttttgaaaaagcacatgtaactattgagaatcggatgccatgattctcttctctgcatcgtgactcgtgagaataggatgtcgtcatagctttctttctcactttgcaaagaaaatgtttgaccttttgcagctaaaaagtacaaaccatgaagttgtctctactttactcttctgcatgtataaaggattcgtatgtggtcaatacattcacaactccatttcaacttcataagcggtaaaaacttgttacacaattctctcttggttgattgattgctcttctttcttgttaccaagtacaactttggatgtaattagtgatgagattgttatttatttgatcgttttgaccatgttttcaaatgtcgaaattttcattttaaccatgcgttcgtacaccttctactctctattgtatcatttcattcaatatctggtatatatatatggcgacatgtgttgtgctccatagtgccctcatatatatgttcgcttttgcttccctttttttcttctgctaattagctttaattacatctactaaaaaagtaaaaacacatttatgaaaaaaacatagtaataactagactatgacacgtaaattagtggtttaacttgtgtttgtaccattgttatatcaccatggagatttatcaaaatatatatatatttttaaaaaaagagtttagtttaacaactatatttaacaactatatcgaacatacacttagacttacatctatgccattgtctcatctattcacatttgaaatcttttagaacgatgggttaaaactctagattaggctgtggaccacccaagtgatagcaaacaatgtacacgccgctatgataggagcttccacttatcctaataattaaagtattcaataccacgattcagaagtcatccaaagtcaaaacctcgcacgagtcatgggctcatggcttacccgctccgcggttgtactttgtatatgtttcaaaagcaggaaaacattttttaaagcaattgtaaaataacaaaacaaacataaattatttgatagccggaaactatatatgtatttgttacggccagaagttgattataaccaaagtagttaaatcttgaatctgctttttcattctaacttttttttttaccacacatcaatccaaaatactgccgatgaaatttgtaattagtatcaacttctgtctaaaatacaaatttgaacttctaatttagatccaagcgatgacaactacatttcaagtatcattgtagtttgatagactagtgttacactaaacctaataaatataccaatcaacacacaatgaacccttgttcaggagtaataagggttcaaatttgcaactcttttgtcaagggaaggaaataaataatcaaattgttagccgatgcatgattgacgaaaagtaggggtgttttttacaaataagctaagatggctttagaggaccaccaatcggtccaatcctttaacactcagagcctgaggcagagaacacgatgggtcatcttatatttgtttataaaattgccaataattgagataaggtatcatgattcatcaatctagctagactgtgtgtaccatacataaactataacccatgtgtataaaatatacaaatatctgtgaacatcaaccacctaactataatgaatatgaaaatcatacgactaaactaatttacgtaaactatactactttgaaacaattattcatcaaattctcttatactattaattgtggtttactaaacttccaagttttatgttttactaatcctgtaaaattagactttagccgagtccgtttgaatctaggatttttgaaatttccaggtggctcaaagctaaagaaaatgtgaatgagaaatgatttcaacgaaaataagatttacataatagccaatgacatatatgcacttgtcaagttggagttaaacaataaccacacaccgaattgaggagcccattggaaaaaacagaagcaaatatatttttatgtaaaaatagaaacggaataatatagtaacaaaaagatactctcttcaaccttatccattcttcgccacttctcccactaatccgctaaatcattcttcttcatctctctctcattcacaattcccgaaattctctcaaatcacagatccttttagggtttttccactgtttctaggttttttttattgctcaaatctgatcaatg

SEQ ID NO: 31682 - DNA, 3000 bp, Unknown; identical to SEQ ID NO: 9153
  misc_feature (1)..( 3000): 2750-1469P.txt file - cDNA_ID_3044781; gDNA_ID_1972013; Annot_ID_177826

SEQ ID NO: 31683 - DNA, 3003 bp, Unknown; identical to SEQ ID NO: 31681
  misc_feature (1)..( 3003): 2750-1469P.txt file - cDNA_ID_3044781; gDNA_ID_2684211; Annot_ID_137329

SEQ ID NO: 31684 - DNA, 3000 bp, Unknown; identical to SEQ ID NO: 9158
  misc_feature (1)..( 3000): 2750-1469P.txt file - cDNA_ID_3044819; gDNA_ID_1972015; Annot_ID_177893

SEQ ID NO: 31685 - DNA, 3000 bp, Unknown
  misc_feature (1)..( 3000): 2750-1469P.txt file - cDNA_ID_3044827; gDNA_ID_1972015; Annot_ID_177888
tgttaccaaagactatggagataccacgaggcaaaattttccagaaatcagcttttctgataattctagaggaaagttctatgagcaatatatgcagaaaagagacgcaaagctgaaggaagactggagttgcagaaggaccgagaaggaagccaaattgaaggtgatgcaagatatacttgatcgcagtaacgctgagatgaaaaccaaattttctcagtctacagggagacgtgattcaagtgcccgacgtgcagagaagcttgtatacttcaattctaagttgagtgccaaaaaggatcaggtatagagcatttccttctgtggtagctaaaactattgagtgggtgtaatattatccttggtttcctaacagtttaacaatgtgatgacttgacagcatccaattagttcatttcagagtgaggaagatgaggatggttccaggagcacccagaataaaaagctacaacaaaataaaaataatttattgattgctcgaaccactgctacgtcagcgtcacgctcggcagccaaagtttctactctcagtgctgttaggcggagagggcaatcagaaaaacattttgcacagtcagtccctaacttctccgagatcaaaaaggagggcatgaaaccagcctcgggagttggaaaaaatggtgtccgcacccaggtgagaagctctatccgcccaaaagctgtaaatgaagaagaaaagttgcgaaggccgaaaattttcagaaaaggtgctgctgaagctgctgagttggctacagacttttctcaattgaagtcagaggatggtgtttctgtacctctgtatcttgaacaggagcaaagcgggagaaattttaatagtcatggcactggtatcagctctgataatgcgcagctaaaggcttcagaagaatctgaggcatcagatgatatggagaaagaggggatgggagaagcgcttgatgacacagaagttgaagcttttactgatgcagaaaacgaaatgccaagactaagtcaggagtctgaagaatggggtagtactggggttgcaaatggtgaatctttttctcagcttgacgctggttcaaatactgaattacctgctgctatggcttctaggcatcaaaccatgggttcaatcctggactcacccggtgaaagcactagtccatggaattcccgagtgaagcatcgatatccaaacgaggcatctgaacttgatgcttcagtggactctccagttggtagtcctgctttctggaacttctcttcccttaaccatacagagagcgatacaactcaaatgagaaagaaatggggagctgctcagaaacgcgctgctggtggtaatccatctcaaaatcagtgccaacaagatgtgacaaaagggttgaaaagacttttgaattttggaagaaaaaaccgtgcggctgagagtttggctgactggatatctgctacgacgtctgaaggggatgatgatactgatgatggaagagatcttgcaaatcgatcatcagaagacttgagaaagtcgagaatgggattcttgcagagccacccctctggtgatagcttcaacgagagcgagctattcactgaacacggtaactatttcaaataccatagtattcattcacaagaagcaactaaagatcttacaatctagccaaaactgatgaccttaactctagaatacatcagtactagagttatcaactgcttagatatatttcttgttttttttcctcttgatctgagtcatggaggatgatctaatatggtgtacctgatttcagtccaaaccactggcacaccattgagctttaaactgaaggaggatcagacgacaggagcttctgtaaaaggtaatcaataaagtgttctacttttgaaaactctccatagaatctaaacgttgaagtatgcatatcatcatagaatcgaaatatctagcatccgagttgttaagcctaatccacagtcacttatataaccaagctgtgagtttaaactcagtaagatctttgctagatgcttttttactcactcttaagcttcttgtttactgcagcaccaaggtcattcttttcactctccaattttcgtagcaaagggaaatgattcgaaaccaaagattcattacagaagtcatcaggatccaagcgaatgaaaggtaacaaattcgcaatgcaggcacaacagacacgagtatataagtgaaatgttcggagatcgcaatgtgctctttgtttcggatcaatgtatcattgagaatagtccctctcttcaatatttctttgttaactttctgaagcctacattgtaaaatgtaaattgtatcaaacctgaaacatgtcatcgatgtgattttggtagtacactacaaacaaacagaaaggatggcaatgttcatttactattttgacccttcagaggaacatagtctgttgcttaataaacgtgattatgtgactgtgaatcatgtccaaaatgaaactcggaagcttttggatagacattaaagaaacacaaagaattaggttatacgacacgaagtttactacatttaaataatcatgattttgtgatgaaaacgtcaaagtgggacggataaggtaagattctcaccttccctaataacctttctccatcttcctcggaaagtgacgtgaattcgaagttgacgtaacacagtaagaaatccccaaaaagcccctccccataacgtcacaagtctctattccgtcaatggcacattagtcattcaccccaaaaaagttaaggaaattgggacaagaaatcctcaagagcctaagtaacatgatcacttgacttcaaagccaagtgaaatgtgatgatgttacttagctgacatgcaaagatagcgaagatgctccatcatcaaggaacaaagaatccaaccaaaaaacagaaacgtttctttattctctctgttgtaaaattcaatttcacactgttcaatttccaagaatg

SEQ ID NO: 31686 - DNA, 3003 bp, Unknown
  misc_feature (1)..( 3003): 2750-1469P.txt file - cDNA_ID_3044846; gDNA_ID_1972015; Annot_ID_177883
gttgtggaacttacaactggctcatcaggttgtctttctattactgtgcaaattcttatgtttttttctccttctcctcaaatggaatttacgaacctacattgattttccctgagtaatatgaaaaactttaagttaacaaagccatattggtcgtttgattgtgcagaggatggtaaagagacattaaatgaggaaacacctgaaaataattctcagtttaccactgtttatgtgggaaaccttgctccagaggtacattatccactaggaagtgctccttgtaatactatcacaacaaaaacagtttatttgaggttctttgatgaagttttacattagtagatttcgggtacatcgttacagctatctatcttgcaggtaactcagcttgatctacaccgttacttccatgctcttggcgctggagttattgaggaggtccgtgtccaacgagacaaaggctttggtttcgtgagatataacactcatcccgaagctgctcttgctattcagatgggtaacactcagccttacctctttaacagacagataaaggtacttttaagtttggcttaccactctaaaccctctctatttgatcttactgctcccaaaagttacttcatctgaaacttagcatgcaatctgacatttgttatcatgttaattgtagtgctcatggggaaacaagccaactccaccaggtacagcctcaaacccacttcccccacctgccccagctccagttcctggtctatctgcagctgatctcctaaactatgagaggcaattggcacttagcaagatggcaagtgtgaatgcgttaatgcatcaacagggtcaacaccctctaaggcaggctcatggaataaatgccgctggagcaactgcagccatgtatgatggtggctttcagaatgtagccgccgcacagcaactcatgtactatcagtaataaacctcagttcgtggcgccgatctcaagtttcaatctctttgctttttctcttttttttttgtttgtctagaacttgtttgtgtgtgtctgtttgtctctcacttaagttatctatataaagttttatctgcagttgtatgattagttatgtattcccatggattgtaagacaagcgaattacattcaataaaagggatttggatatccattctatgtgattttacatgaacataaacagacaacaaagaaaaaaacattgcggaaggatcagtcagtctctaaccgagcaatgtacgtatcatagaactttccagctttctcgagatctcccagctcggtataacagtctgcaatagctccatatgcttcagtgattccagaatcttcactttccctctttgagatggctagaaccatggagtgatactgtatggcttccctatacttcccttggcgctgcagcgaggcgcctaggcctcttgcagccttcttttcttcggtggggtctttgagactctgggcaagttccaaagctatcttgaactctgtataagctttctctggttcttggttcctaagaaaggtttttcctgttttcaacttggaaatcaactcttgtttctttggttccacaatgatttcactatctgggattcttgctcccactggagcataactcaagcttggtgcataagactcgattttggcttgtctcctaagagctgcgttaatctgtcgtagttgttcattcaacctctgtaactcccctttcctctgccgagcaagcaaccctgatttggtacaccacaaaaaaagtgttgtcaaaaccccaatgagtacagttcatagaagcatagattgaagaaaagactagtcactacctccaacggtggctccaataagagcaacaagcaacaaaataggcatgctgaacatggagctctcaggctcacatatctcagcagccaaagcttcaagaggtgtagccatctgaagggagtttgtcaacaacactgccatcaccggtaatttgagcctcccaattccctgccacatccatatctaaaagcttactatcactaagaaaaaacttgacaacaaaaaataaaccgagtcaaacaatataatgtgttttagctggatatagctagacatcccggaattcatcaccaaactacctcaaaagctgaaaacttgtcaagagatcccacactggcaaatggcgtttgtaagattccctttccttgtcgctccttaggctgtgaagacgaatgtataattttggagaaaggaggatgatccccaggttttctgactactgagtagccaatagatgtagcaaattttccaatctctgagaaaacgttatggagaaagatgacttcagaagcgacaaagaattggctaatgttattgaaatgaaccaacaaactattgatgcctcaaacaatttcgatctagaagttctgatgcctcattaccaaaagaggatcactcatatagcaacagtgactctgaattggaaatctgattcagcgaatgagctatgagctatgagctaacctggagctcgagacttgtcacgcggcggtggttggccaccggaagtatgagagaaggaggagcaacaccggataagcgccgccatcactaaagaaagctctctgagaggataaaacaaacgctttgggaagcttaaaactcgtttccgctggtctgttttttatgaaacttgtacaagactgcccctgtttttctatttaattacagttaaacccttttttactaagcttcaaagatgaaacgcagcgtttaaggagcttttgcttaaactctggtggcgactgttctgtgtcgtcgtcgctgtctttgtctcagcggagtcttctactggagcggaggattttaaaagggttttagatttttgacgactacaaaaccctaatcgagctcaacttgagcattgccgcgctcttctgctattctaagatttgatatttctgcataccacttggggttagctttcgttggtgaagaaatg

SEQ ID NO: 31687 - DNA, 3003 bp, Unknown
  misc_feature (1)..( 3003): 2750-1469P.txt file - cDNA_ID_3044850; gDNA_ID_1972015; Annot_ID_177881
gtctctatagtgcttggatttctcttctaagttgaaatgcaagaccacaatcaaccatatcaaatgcaaatccaacggagatttactatccaactccgtgaaatccatatccggtgtgtttggatcagaaccagtagagggattcgacatgatgagatcatccaacgtttgcttataatcagagatcataacaatgtagttcatcacataccttgtcaatggatgaatcgttcctccagggacaggaactatcgaaggttcgcgaagaaccgcattctcaaactccgaaagtatacctctcgctgcttccgctaacctcgattgaatctcaacagcctgagctctaatagcatctgatgaatctgagtcaaagattgcttcaatatccggcaacatatccgttaaagcatcatgtaaatcaagaatcttgaacagcttctcaggtgatcttctactgatacttatagcttcagggaaagtgaaaagtctcagagcagaagccttcactgtctccatgaaacaagtctcatccatggcagtgcaaataccatcaaagagctgctcacatagtctcttctcactagagaaaacaactctaatgcaaactttagcagcacgaatccatttcctgatctttccttcaacaacttcccactcaagcctttgaacatcaccaatgcttatcttcacaatcccaagctgcttaaatattgcttccatggctgatttgcgaacagttccatagacttggatacattcacgagagtaaccggcggcgaccattcgttgaacaatcgatcttagatcagaaactgcttccggcgaaatcagatccatttctcgtatactgctagtggatctgtaactgcttcttctacgagttaaccggcttgaaccggaaccacctggagaatttaattcttcttcttcgggagttacggtggtatcttctccaacttcgacggttaaagacggagagactgatggttcctcgaggaaaagtgaatcaggctcgaaagtagttgtgtgggagagaagaatgttacggaactcgtcttcgagtctagccatagcgatttgaatagctgagttggctttgacctcgtgttcatcgactacggtggcggcggaggtggcggcggaggaggaagaagaagagaaagagacagaagataaggaccgttggatttcatcaacggctcgaagaaaccgatccacctcatcacgatcgctttggaaaatcatcttccctcttgctccatcagtcgctgctgagtcccaccggagtattatcctctccgctgtctctaagttcgaaccatcggaatctaaactattctccggcggttccatctaataaatcaatcagacaacaacaaaaaatcaaaaacagtataaagaaaacttcaaaattcgaaagccaatgaatgattctcacctccaccgattcaaattcttctcagatggaaattcgtgaaggagattggttgattttttggtaagaaaccacttcggtttttttttttttgcttatcggaagaagtcttagcaaaggcaaagctgtctgtttgtattgtttttagttttaatttttggaagtttctgcgagaggtgggaaatcggaaaaaataagtctttggacttttcaactcctctttgtgtgtacgttgccgataaattttaaacttttttattccgaattactcgccggcggcgtaaaatgcccggtaaaaacttttttggtttgtcgaattattgggtgagatctagtcataaatgctattatgcctaaaacaaagtcccactttctcgatataaaaaaaaagacacacatcatgtcttattatgatctttcatttccatagtgggatcacttaagccagtaattttggaaacttttttttttcagttatctaaaaatatatatatatatatatatatgacatatacattttcaaatatacaatactttcaataaactaaaataatgtagttgtttctgtgctactaattcggattttttctttacataatttttgttataaatagtttacctaaaatgttatgacgtggttggcccatgttggcatggcaaggacatcaatttgtatatgtaatcaaattacctgcggataagagagtaccaatttggacatgttttttttttttgtatatttttgaatagtcgagaaaataaatgtagattgtcaaacctcataatgagatgtggttggtggaccatacttgattttaatcgagccgattaagtaaaggagataatacaagttgtagtcatgaatatttaaggttattgaattgtttgaacaattaggttaacttaacaataaattgaaaatttgatatatctcacatacaagatcataataatacaattttctttttcagttctcaatttgtttctctttcacacaaaaaaataatcctcattttatttgagtccttaaataaattcatctaatcagtcacaaagaccggactaatccaatatacacgcttgggtccacagaacaagttagtcagaaatactggtcctcctttgatatctgcaggataaacgacgtcgtctttagatatgggcttgggcctaagactgggctgtcagtaagataaggaacggacaaggagtattattggcagtcactaaaaatggttgtcacagtgccgtgacgttagtttcacctgacttgttctctgaaaattagcaataaaataaatcgtgctataaatagttcacttgtgccgcacggtccctctcatcttctacggacagcttctttctctttcctctctgattttttttttctctttctacctttttctttttttattttctttcttttttttttgttagtttttttttttttctttcttcatctcgtgaacgatatagtacctgaaccctagcggaggaaaatcaaaaattgtctaggagaaacaaacagagatatctttctttctttttatcagtggggaaaaaaaatg

SEQ ID NO: 31688 - DNA, 3000 bp, Unknown
  misc_feature (1)..( 3000): 2750-1469P.txt file - cDNA_ID_3044854; gDNA_ID_1972015; Annot_ID_177878
attgatcacagaaccaataagtaccatgtaaattttgcaatgtgcgacgtcctctactcatttgctccatttttgttccgtttggtagtagccataggcaagctccttgtttaaaagttccaaaatagagaaagaaattgcttaacatttttttcttaaaaaggtaaatagatccaaagacaaaagtacacagatttattgtcatattcatccaaaatgaaacacaagaattgcgtcgatcccctaagtcaacacaccaaaaaggctcatcataaaacttgcgagccaaagcagagcatcaagccaataatgaatggggatacaatctggtttaatcaaagtcaagaaactccattctcttcctcattgttcctctcagctcactcgcttccctctccaccttttgtgcctgcatcaacagacagattcccgaaaaccaaatcatcagcacgcacacagcatcacaaatgaatcaaatttggctaatcaaaatgaacatgttatgcgatgtcttacccttttaatctctgcctctgagacgcgaatcatatgtggaggaagctcttctctctccgtgtcctaatacatagtttaaggtcaaactcagtgaattggaaaacacgaggtgacacagcaagaaaagacaaacaaggagaagtcttaccagctcaccaatcaaaacaacattctctccacggattacatagaggcctaaaggaatgtcacagtattgttcaccaacaattaccctctcacacgcaccttctagaaccgcattggctgtgtatttacaacgaacaaaaaaaagtcaaatctctcccgctcatcaacaatatcgtaaatctagaaacatggaaagaaaagtgaataccgaattgatcaaaggaacggagtgttcccattagctttctaccatctctaagaagcacaagtagttttcctgcatcatcaagagcagagccaacatacataagtaactgatgcacattgattcatatctaaaaaagaaaacggtacgccaaatgagattgagaactaactcatagcccaaaaacatcagcaaaagaagatcattgacttttaaactcaaagaaccaacatcaaaaagccgatagtgaattaaatttcaacaaaggttaaagtttatacttcgtaagttgaataaagagtgagccagcaacctcaatcacatctaatctctcacgcatgctaaaatttagcttgacaacaataactgatgaacagttagatttgacccaattaaaaaaaaactaaagctttgattcaataatcaatatcttaatcaatgaatgtctctttgagacaattcaacaccaaaattgacaagctttggatacagccacaaaatagtacagcctatatatcaataagaagtcaaaatcaaacgtcaaaaaaacagagaattgtttgcaaaattgagctcccaaatgcgtacagagccatcacggccaattattttaactacatgcattcatacggttcaacaaatatgtgaaacagagagaaagagagacggatttactatcgagataactagcgagtgatgttgaaagataaatttcttcaggaccagcccacgacatcgccactgactttgaaattgaagaaaactttcggtctttctatagaacactaccgatgataataatgttcgtcagattccagctgaagagataagatttggctattgaacgcgaactttgacaggaaaaaaaaaaagtgaagacggaaagagaaatctaaattagggttttgaccaaagggtttaaattgataaagtgattaaaaaagattgagactttcgacacctgatcgaagacggacacgggttcttcaaaaaaatataaaacccagatccgatcgaactttggctgagaaaatttgtttgtggaaaattcgaagagaaaactagcgagcaaatccgtccactgtcccttttttattattttcaagcaatgtccacgatttcttaactcgatagataagacgttgtactttaatactttaagcactttccaatttaatgttaaatttcctaataattattgtgactgaatgtttcttaaataaatgagactaatcttccaagctaataaaatatctgtttcgaataaattttaatttatggaccaaaaaagtcgatttaacactattattatttactgcttgatttatgttaaaacgcttttatgggtaagtcatccaataatatattcccacgtaagcatcagatctcggcggcgcgaaactacgcggcgttcgcttagcacaaaaacgtagcgcagtttatttaaagcaaaacaaaaaattctgttttcacacttttgcattgcagcatcttgtagctaacaacatcatcggagagaaagcagcttccccttcccggagatatcgtacataagctaaagcaaccttaaccttccttctccactgtaaaaccctcaaattaaggtcacgatttcgtcttatttttccaggtttgattcacaaagaacttcgtgttttaacgatgctattcttggggtaggatttagggttttgtttctatagttcaccgatcctgttcaattttaagctaaatcacattcaattttatgatttgcatcggttaaaagacgcgatagttatcaggagtagggtttgttgtggtattcgagaagtttcaggaaagtgagagttttctattaatggcttcttttttttgtatcccgaattctttggggttaattggtgaaaagaatgttctttgtacgaaattatatccaattttccagctttacatgtttttggagatttctggaataagtctgagatacttaagaacgcatctggagattgaaattgtggcatccaatgtagtttcaatcgattttgtctttaaattttgtattcttattagattgagtttcgtcttggattgagcgaatttgtttcattgatgattttagggatagattgatcatggcaactgcaactatg

SEQ ID NO: 31689 - DNA, 3003 bp, Unknown
  misc_feature (1)..( 3003): 2750-1469P.txt file - cDNA_ID_3044875; gDNA_ID_1972016; Annot_ID_177930
acactgggtttggtctctctatttaaaaactaaaacagccagcataagtcatgttgattttctttatagataaattctctcatatgtttttttttgtttcattggtttggatgtgtagtgaatctactgatgtcgctatagttacgttgtccatgacatatgaagaagtcagaaattggatgaaaggcctctatctatgtaatgattcaactaagaacgaataaaatgaaaaagtcacatgtgatatgtatcaccccgaagacaatatgcatacatctattcacacgatcaggtcaaggatacattagtaccgtgtctatatatataattatttatacagccattgacgaacgaatcattttgtactctccaacaatccacccaattaactcttggattagaaacgttcaaaatcacataaccaccgcgatttttatgtgacttccacatattttgaaatacttaagaattttggtatgcacaccaagagattatgaagaagatattcctccattattcaaatttaacatttattttattcaaaacaaatttaacatttatttggtatgaatcatatcatatgtgatgtgttatcatcgtatattcataagtttgtacatgaagagggattttcaaaaagattctcattatgttaccaataatggagtaacattaaacaaaaaataatatagatgatacgataagaaaagcttgtggctccacctcctttcgtatggtcataaccatcatatcactattatcatacttacttttctccatgcctaaatttatatcgctccataaaatcaaatcttttacttgcttttctccctcctttaatcataccctatcacaacgtggctttttattgcaattatataagttttggatagcctttcactttaccgaaattccggactagtcttagcccatgtgtagtagtcgaatttagataagtcatgtagacacatattcggggatagtttcattgttctaactatatgagaaaagaaaagaaatagtgttttgcctaataaatttgattacaaagttcggttctctaacttacatcccaaaatcacaaataaagacgaatccattagaaccaaaagatagctacaccattgcaaatgcataacttctccccaaacttcctgatttaccgatttgtttctacttacatgaatgttttggagtaaaactaaagtagctctgagctaaaccgacttgaatttaaacttcaactctacaattcccgacttcggccgtaactaccggcacatacatttttacttagatttcggtgatacaccacacacacacattttgtcggcgtatccaaaaaactccaagtattatattatgttttctctctcttaatttcaaacatcttccttgtcatttgtcaatacgatgctacacgttaataattcttctcaaagacatgcccaacatgttttcataaatcatgcatgtacttccacgtaattatattagatgttaatgcgacaccgtgtgatgtaataattgcatacataatgtatgtttgcggtgttttaacatgtatatgaatctaactacgtagccttccaatgctgctaatcaccaatcatattgctatctaatttaattggttcattatttatttataagtctcttatactaataaaacgttttgatggaagttaaacttttattattgagcaactgatggaagttaaactaagaatgtcaatttatgaaaacaaagcatcactgcaaaaattgtatgaacaaaaggaccaataaatctccacaatcatttatgattttgccctaaagagatactataataattaggtagagagagagagagagaaactcggctttctttaagacaactatatgggttccaactaatttcacattggattctacgattttatgaccgttcgctagacttccatttcccattgttcttgttcatgttcagtggccataacctgacacgtgtacggtggaagatgcaacttcacgcacgtgtgtgagctttgcctaaacacagacagattacgtgcgatctctcgtgtgcgatgctactagagtagtagttactagctgtcacatatacaaaaaagcgtggctcatccatggttggctgacgtggatttaacgacggtactcaagattttaacgcctcaccgtttaagttccccattcaaagaagacaaaaacatccttgttcccaagggggaaaataacatttttgctttcatcgagaggggtaaaacagggaaatttgggagattaatgtggaagagatccccaaggttgtcttcaaaccataaacaccacgtgacagagagaccaattatactcaaaaaggtaaagaccaatttgaaaaacattacaattttaataatgctcatagactcatagttaaagattacaagaaccaactaactaattgacattatcattatcaaaataaaaaccacctaattgcgaatttatagttttacagtgggattggtaagacgtttctaatatgctttcttttcaactttagaccttcttctctcatttctcacaaagcaaatcaaaagtaaactataaattgctaatcatgcatattagtatataattaactaactaaaaaagggaatggggtggggccattggagcgagaaagtgagcaaaaaaaagagagagcctccactatctctcaaagcagaggaagagagagagagagacagagacagagacagattgagagaaagtttggattttgatatgtgtggttggatttttgttacaaggcaaaaccagacccaccttcaaacttgtccccacgaactacattatcattgttttgttcgaacttcttcttcttctcgttagggttttctttcattggctctgagctactctttattgcttaggccttagtgtgtgtgtgtgaatcttctcagcgaaagccaagttcttttctttgttggtgtttctgggtttattgcgacaatg

SEQ ID NO: 31690 - DNA, 3003 bp, Unknown
  misc_feature (1)..( 3003): 2750-1469P.txt file - cDNA_ID_3044885; gDNA_ID_1972016; Annot_ID_177926
gttaacaaatttggaagacttgagcggctatatatatatgccagtaaagcagacaatggtgttcattagcaaaaagaagtttggaaagacatcataccgtgtagtgagaatttgagcggtagttttgattcctcgatgaaggtactgtgctagacttagaataggaggatgcaactccactaccagaaacaggtctctgcacatcagagtacttagagccatcgtgccacggcacaggagcataatacccttcataggcatacctggggtcctgataaccagcagccaaacctcctcctggagcacccataccatacaaattacttgaggtgttaagggtagcctggttagttggtttcactggagctgatccattacttccttttgtgataccagcagcagaagcaacattattgctatccgcaggtagtgtcttcacaccagcaggtttgtttgcagagagatccggctgggtaggtgtagccacagatgaagcatacggtccactgtttggaaaatagttaggatactgatactgctgagcaccgtacaactgcccttccccgccaagctgtggagcagggctagttgctggcgagtaaggatacgctgcatacccataaccctgaggatacacaacagtcccattctctccataaattccctggtaaaatattgaacctgttaagcaaagaaaatataaagacgatgaaaggcactattataactagtcagcacacacttacagaattcatgtcaacaccctcaggatttgtgtaagctgggtagtcagtccactcttgaccactcccatatactgaaaagttacaaaacgaaaaacttgttaaaccagtggtgacaatttagtgaaataatgtttctagattgtaaatgatttgaggatgaagctaccattgtaatactggtagggattgtaaggattaggaacatagcaaactgaagggtcagcagcatcactgggaagcattggtgtcaaagatcgatcataagaaggaacttgaccatgaacatcaacgcctccatactggtagacggcagtctacacaagacacaaaacaaaagcgttaaaaaaaactggaagaagcaaaagttgtgacaacagaaaaccaaaattcaatctgcaaatcaccttcttgttaggctcagggatctctgaagcttttgctggcgagtccaaggatagtttctgcaacagatctgtagcttctacaaacaaggtgagtcaaggaagcaaagaattacacaattaaccattagaatagtggaaagcaaacattctcaaatcaatcaaactcgccacaaatgaatcgatttgaatcaatatagaaacctaacaatcgagaaatatattgagaaacccgaaactgaatctaggcaatatcaaatatatctgaacaagactcaaaatcagctcactggattcaagatccaacagattcaagatcgagaaatcaaaacacagatcgagaaacataaagaaaggatacgatcagcaggaggagcaacggtagccatgagaggagattcgacaaacaaagatttggatagatccttctcggataaaaggggatgcgaccaaagagaaagaagaagaagaagaaaaaaaagaagatagagaaaccctaaatggaatcaggaaaaacccagatcaaatctagggtttaagagatagaatagaagagagaaagaagaaaaaaatggccgcagccgccaagaaggagaagggttttgcttcggggaagaggaaaaaaagggttttgtctctctacctctccctctgattcaaatagatccactaatcaaccacctcaccttctctcttttttttttctttctttttttttttttttcttccaccttaagatatttcctcttttgttttaaaagaagactatagaccgtgtggttttggttatttttcctgcaaaatctggataatatacttttccattttcttaaaattggtaatcttgtaataaaatagatataaatctcaattctgttaccaaaatataattcaaaagtaaatttggtcaaatttaaaagcaaaagagggcatgctttctattataggtgtgtttcttctataaatttaccccaatatacattgaaatatctttaaaaatatatattaaacttttttgttttgagcaactatttaaaaactaaaagcaaatcattaagataaaaccaaagaaagtaaaatctatttttcagagaaacttaccaaaactagctattcaagaaaatatactttacctttaggataaaaggaagtaaattaccttagcttaaaaaagctattattaaataaaaacattttaagatcgagagtatgtaatgggcctatttgattaaagattcataaacaggcccaaatcaccaaacaaggccaccggaaataaacccatgatccgattacccatccgacgttctagagagttctaatgagaaaacaatgaagagtacatccaacggctaagattagctcgaagtttcaagagctaaaggctcatatcgcctttatattcaaagaaaaaattatcagtagcaagtgcattcttcatttcgtcattggagaaacctacttcttcctccttatccggaataaacctcttcggcgccatctctctcctcacctccgtcgttccaccgtccggtgagtgtcacttttcccatcaattgagctcacaatgttggcgcctatgtaattgtgtgtgtcgattgattgttttgttagaattggaattaacaagtattactagtagctgagaaaaagtatgttaccttgttttcgtgttcccggagatttgtggctattggtgtagttgtggttttgagtatttggggattgagctctgattttgaaattcatctgttttttgttttttgttgccagttttaattggttagtacttttggtgaatctttcgttttatgtgaactgttggattgattttcagtgtttgagaagtgaaaatg

SEQ ID NO: 31691 - DNA, 3000 bp, Unknown; identical to SEQ ID NO: 9165
  misc_feature (1)..( 3000): 2750-1469P.txt file - cDNA_ID_3044889; gDNA_ID_1972016; Annot_ID_177924

SEQ ID NO: 31692 - DNA, 3000 bp, Unknown
  misc_feature (1)..( 3000): 2750-1469P.txt file - cDNA_ID_3044897; gDNA_ID_1972016; Annot_ID_177921
tcgaaaagtcctcgctcttagctccagtacagacctaattggagattagtcgccaaattcagaagagaattcaaaccaatgtaattaaatttcagaattatgaaaaagtattgccaaccaaaataactataccattttccctgaggcgaatattaatgctgtagtcttcggttctctgatcctcattatcaccgcagcaaaacgctggaaacataaaacacaagaggtattacataagacgagcttagctaaggcaaattagtttagcaaaagccaaaaacagataatatcttagattctaattaatcagtacacagtatatagaccaatcagatctcaggtaacaataaggtcaactcaaggagagagtactcttccaaacaacttttctaccgtttattaaaacaaaaagtcacaatataatgcaaataccttgggattatattcagcattccgagcctgcaaagctatggctttaagatctagcttgcagtctaagttcaccgtggagacaatgtttctgaaacaaaacatcaaagatgtcaacaggggtcaaacaaacacttaatcccaagagacaaaaaacaaatacgaaggcacaaaagaactcactgaagagtaggaacaatccctgaaggatgcttgctaagatcaactggattactcccttccaatccttgatcagtcattcttctatagttacacaaaaccaaaatcaacacaatcaaaataagcaatagccagaaaatataatagacactagacacgatccaagacaatatgcttaaaagtcttatcagatagacttatcattcaaaagggtttcaattatttgagaatacagagccaattttagatttcatcttccaaaacaacgagacttatcctcttaaggtgatgaaactcataagatctaatcgaaaaaactcaggaaaaggattaaaggtcagacctttggatagcgaagaaatccgaaatctagggtttcgtagctttaagacgagaaggaaagattcgagggaagagtttgggcgaaaggaagccgaagaattgagaaaaggagaagccttttatacaaagaattgagaatcgaagagggaaaaagatttataaatcggtgcttatataaggggagagtgaatttgtttctctcgcttctggtttttagatctgtgagagagaggaggtcatcgacttgcgtttcggatttgggatccttaagcccctttatacctatatatacatacccatgctacccttgaccgtccttgttacatcgagggtaattttggaaatttatgcggtaatgctacgatgacggctgtctttcggttttatgtgaaagtccactccttttcggccacgtcagctttagtgttataacgctattatatttttgcatatttagcgatttagtgaacattttttttcaagtagaaatttataatttttcattgattttttcaaatcacataatgtggaattgaaaatcaaaatttcacatcagttaaaatccactaaccaataaccccactaaatcaaatcactgttacgactacaccaccaacacaaaacatgattttcataaaaattaaaacactagagaattcttggttaaacaaagcatgcttatgagatctctagccatctttgtagtatcagcgccattgtttctccataagcgaagataaggatttcgaaaactgcgaaacaaacgatgatgatgatgtctctttgtcctggctctcctcatccttgtctctccagaactttaggataacgagattctcctcttctgttgatctctgaactacgattctcgaagcataacctttctttctcatcatcagacaaatctctgctgggaaatttgaagttaatgtcactaagtagaaccatcctttctctgatagcaaaagatcaaccacaggcaagattttatcgatgactgtccggccattttcccctcctgcccaagcagaggcaataccttccattccaacttcatattcaggtgttggcacataaggcggattcaccacaatcacgtcgactgagccagcaagtctcttctctagaccagtagctaaatctgcgcagataacatcagcattaactccatgtgcttctagagtttcttttgtcactcttgtagctatcgggttagtgtcaatggcgagataatgaacaccaggaacttcgttttgaagaagaagtataagtgaagttatgacatatccgcttccgcatccaatctccatacaaatcttagggttgtgctctataaggttggtgcgatcagcgagtaatgcatcaactagcgcaaatgaatcatcacatggttcatagacctcacgatgcgagcttacaagacggatagcagcaattcttggtggcatcttgtaaatgacttgactactaaacaaacaaacaaaaaccacaccattacaagttagaaggttttaactttgagaaggtgtattccatatttcaaatataaacaagcttgcagtctaaagttcaccatagacatcaaacaaacactaactcttaagagactaaaataaagacaaaggcacaaaagaactcactgaggagtaggaacaatccctgaaggatgtttgctaaggtccattggattactctcttctaatccttggtcagccattcgtctaaaacaacagacaatcaaactaagcaaaagaactcagagaagataattgccactagacacgatccaagaccacaagaaaacttatgcgtaaaagtctgataagatagcttcatcaaatgggtttcaactatttgggaatacagagccaattttaatttcatctgccaaaactacgacacttttcctctaagctataataccgatacgagaaatcatatctgaacgattaaacccatgaaaaggattaaaggtcagacctttcgatagcgagcaaatccaagttttgaacacgaaatcgaggttttcgtagctttaatacgattatg

SEQ ID NO: 31693 - DNA, 3000 bp, Unknown; identical to SEQ ID NO: 9177
  misc_feature (1)..( 3000): 2750-1469P.txt file - cDNA_ID_3044913; gDNA_ID_1972017; Annot_ID_177965

SEQ ID NO: 31694 - DNA, 3000 bp, Unknown
  misc_feature (1)..( 3000): 2750-1469P.txt file - cDNA_ID_3044916; gDNA_ID_1972017; Annot_ID_177959
tatataaaaaaaaaaaaaaaacttcacgtcagtctttgcgttacgaagaaaggcagtattgctaacagtgagcacaattttatgataaccattcaccatgcaatattttatttccataacaagattagaaaactaacaaggcaccaacaggtccggcccaaatgagtagggccggaggccattataaattttaatttttttctaaacttctcaaaccaaatctaataatttaggtattagtgaaagatccaaaaaaaaaaaaatacatttcctaagatcttatggtccgtggaagaaattaaacacattttgggccaggtatgaggtatgcaaattggagatttatataccaaaaacttcattatcaaaagaataagatttaagagtaattgtcgtggaatattataaagggcagtcaaaattacgaaatttcagacaaataaaattttaactactacagtatattatctagagtctagacagaagaaagacacaaatgaaaacgcaacacttttttttttccaacaaagcctattggcctttttagtttttaattactcgcaaaccctttacaaggaagtgaaacagacagaggtgaaaaacataaccgttaatatttgtggaaaaatgaagaagaaaacggacacgtccttttttatatcagagtcaacgtaactacatatatctctctggaagactttgaatagttttctagacccaatatatctttagtaataaatattccatctaaaaatgtttggttgggacaatattctattgggaaagtgaaagactatcaaacatgtccaaatactcatcagaaataattttaagataagctttttatatcacattgttcctacatatggagaggacgatcaacttggatagacccgaaaagagagaatgattagaacgtgcaaaaatcaaacacgaccactctgccaattacatatcttatattatatttctggtgtcaaattacatatcaattatatgaagcataatgcatgttgaagatgatcaaatgtaaatgggtgtctaaacttatagattagaatcgataattgtagttaagtttttacataaaaagaaagaaataatctttttaacaaaacacagtgtgaaaacgaaacttatattaccaaatacctcgggtcaagaaagactctcgcaaaagtctataaaagtcgtatgaccttttttcgttgagagaagacaaaattagcaaaatatgcgtcaaaaagtaagattttgctgacttcttagttcttaccattcattttccaaatatatttctctatgtgaccaaattaaagtcgagagtaagtagtcattgaattggtagtctctcacaaaagtacgcaaaaaaggacatgcaataaaaatatcttattgtagtaactaaataagtagtactaataaatccgctaaagtgtaaactttctcattgaccttactataatgctgaaaaatgttgcaatatccatgcggccttgtgaaatcaaatagaataagactttagtcgttggaaaaaaggaatataaagtcaaataggttgaatatttccatgaaacagaaaatgccgtccacgtccaaaactgcaatatgctaatccacaccgtccattaacttgggaaaatcaaatctaaagcgttcatcagagtaatggtttatagatgaatcacgtgtcgagatcttgacgcattaatagcgtgcacttagctctagtggaatcaaaaacaccacgaccgcacaccatgcgagatcgaaggaccagagtgttcaaagtcctcaaaagcagcccacgcgttatttggccacccacttctattttgtaattgctgccgaagtaactaatggtgtaatttagttaagtagtaatcaactatttggtcttaaagtatgttatcaaaagacccaaatcatcaactaatcatcaaatgagaagaataaaactatataaatgctttattctctctttatttgccttttagacagaataaatattttctcatagattttgttttcctaataaatggcttacaaaaagaatatttgaaaacttaagatttgtgtgatgtcatcgatcggtaaaatggttggttaagaacttaggaaattaataattttcatgttaaatagataccgttcaaacatctacatattttgcagattatgttattgttattacattgccgtgctaatatgtacaaaattataaaacattatctgcagtcggctagtactatttaataattagatcacgaatcatgatgatcatgtaatgattagttgatcattttgaaagatacttttacaactatcttcaccagaagatttgttgattaactatataccgatagatgttgtttagtccccacataaaatctaaaaaatcataaactgtgtattttgagtatttgaaaatagtactatataagatataaacaacaatatacaaaatgagaaatttaggttacatgtcagtttcatataatttagacacctacatcactactctacctctttttatttcctttagatatattgtcaaattgtgcacacaaaaaaaagatatatttcacaagtcattctgaaattgttttacgaaaaacattttgtactaaaaccttttttgaatattttaatatttgtattaaaattttatacttcataataatatttttttttttccactctctctattttttaaaaaaatatatatttatgttgatatattagtatgagagaaaagagttgatgtgggagtcaaatatatgttgtgatccgttaacttcaaagcaaattactgtttattcacagaagcttggacgcgtacggcttcgatttccttatatatatatattacacataaatctgccgtcttggagattggaaacatatctcaagcttcttcttcgtgttacgcactttcttcttcttcttctctctctctctttcttcttcgtcttcgatcacagaagacagaattcaatg

SEQ ID NO: 31695 - DNA, 3003 bp, Unknown
  misc_feature (1)..( 3003): 2750-1469P.txt file - cDNA_ID_3045000; gDNA_ID_1972020; Annot_ID_178051
tacttgtctcctctaaacagcccaggaagaagatgggaaaagagctcaactgctcacaagaagtctgcttcagcggatttcataaatcttgtgaacatcaagaaagaaactcatgcgagccaaccagaggaaaatactgatattcaggtctgcaatctaagcaaagaacctgatgattctatccaaccaatcgcaagtgaacctaatgagaaaagtgttgacattgaggatgaaactgctaacgaagataacatgttttctgcaggtaataatatttctgtctcatagtaaggctctctgttttgagtaacaataatttattttataacctttcttccaggttctgcagatgatgtgatgattcccaatgagctagatgaagttccagaggaagcaagctctacattgattggtgacttatcaaaagttgaagctcaggatgaacagagagatagtataaactcgaaacaggcaagtcattttgattgacccctagaacattaccttttttgtatggactttaaaatgaggaaatggtggaagacttaaattggttttgctgcttctttttttctacagacctctcttgaagagagccaaccaccactgtcttcctctgtggcctcaccatcccactgtttagctcaaactgaggagtgcaaatcagctattactgattttccggagtggtcaagcccaatatcagttcttgagccactcttcgtcgaagatgatataagcccagcaaaaatgcgatctcagtctggtatgtagaaaaagatcccaacatctactactagacttggattctagtacttagttcttcaatattgactcatttttacaactcaggtgaagcagaggtgcaaccgtggtgtatccacttcgatgaaaaagatcctgcacctacataccgagaaaattctgtgacaagtgacaaagaattggtgtttaagtatgtaaaagctgtcttggacgcagtagactcagacatcgaagagctctatctaaaggcgcaattctctgaccagcttcttgaaccagcacttatcagcaatataccattctgtccaaaccagctttgtcctgaccatgagctcctctttgactgcatcaatgaagctctcatggagttatgctgttgcccaccttgggcttcgtttgttacaccaagaaccagagtcttctctaccgtcaaaagcatcatccatgaggttcaagaagcggtttactggcatctcttgccattgccactccctcacgccttggatcagatagttagaaaagatatggctagagctggaaactggttagacatcagatgtgacattgactgcattggcttcgaaactagtgaactgattctcaacgagttactcgaagagctcatcctcaacaatactgagcactctctggtttcacctgagttgaagacggatgggagcatccttattctagaaaggtcttgaaagctgaaaactcttttcttaaagacaaagccattgttgatacactctgaacatagtctcactgtcaccattgctaattttttttagcacagaaccatgtagatagtttgtattactcagtcagacaaaaacctcacggagctcctgtctgatcagaaactactgagagggagaaggaggaaatcagatcctttcaaagaccagaccagaaactgttagtggtggggtcatcagagaatcactttcaaagacagtcttcttcctataggctattatatagtatatgatttattattttattttagagtgtttgtgtgaagatggagggatgtgatagtgtttgtttgaaatcggtttgtgtaacattttcagagtttgacataacaatgtattatggattaggagtatgacaaattcaaagtttttgttgttcatgaaaacaaaaagatataaattgggtatgttgattactagacatgaaactagaaagttttgttaataaaacctaggaagagtgttgtaaattgtagtctaacaatggtgggttgataacaggacaggataaatatcaatggagttttttttaagtaataggaaagaagcagtcataacacaaatctgtagagatttttactcaatggagaaatgaattttatggatcatgatatatgtatataaagttttggataatgtttttgtagttgttgcactttatgccctacttagtgaataacattttctttgatgggatatggttatgtggacacaatggacagtacacctgataaagatggattttaagaaattaacaaaactgaatgaattatatacaaactgataaataataaagggtttattctttttaatataaatatatttattttaatagttagtaaaattatttcattttgtttttgtaaaaattatgtataacacttatatataaaagatgtataatgcaaacaatcaacatgtcacttatatgttcttgttttagtattgatcctttggttacattattatgtgatatacaagcttattctatatgccattataaatgcttcttggggggatgcttgtaccatttagtgagtcaatctccgatctaatataacgaactgaacgataaaaataattattatcctttaaattatagtcgttgctatttaatatttcttaccttcattttcttattatctcacgttctttgatttgaataataaaaagcgaatgaaagtaatagataatattaaataataacggtaatttaaatacaaaaccaattttttattttatttttattttaacatgattctaaatactgatgaaaaaaacatgaatctaaaatactttcaactataaaatcaagagaatcaactctctctcaagtgctcacaagatcaacacaattaccaacctgcaaacaacacaaacacagtagcattctcaagctctggaacattaggcaaaggtctctctgctacacgagggtgtcgaccgaccctttagcaaaagagataagggctttgaaatg

SEQ ID NO: 31696 - DNA, 3000 bp, Unknown; identical to SEQ ID NO: 9196
  misc_feature (1)..( 3000): 2750-1469P.txt file - cDNA_ID_3045007; gDNA_ID_1972020; Annot_ID_178040

SEQ ID NO: 31697 - DNA, 3003 bp, Unknown
  misc_feature (1)..( 3003): 2750-1469P.txt file - cDNA_ID_3045007; gDNA_ID_1621157; Annot_ID_173563
tcaagcttttgcctctccagttcagttagtgcttcatgtttttccaattgtttggcccgagactccaagtcccgcatcttacgatccagttcatttcttagcttctctttatcatataggattctctggatatggcgaagtgacatctgctgcatcttctttgtttctgagaggagataaagtacaaaaaatagtcagataccctaaatgctatatgagtcggaaacatatcagtgtgtgagtaaataccttcagcaaaagcttggtgcaagttttttttctcatctaggaccctttgcagtgacattgccgtcctgttgtaactgtgttgggccttgttcagatcttcgtttgtcatatcaatcatatttgaaagtacgtccagaagagtgtttctatcctgcacattgttttgcaaaatatctgaaactgttcttagcgttccctccttggagaggtactcacctattggaccttgagattgaaagtcgtctgcacgtgcacaccaaccataagcctttgactctgaatctccactcctctcagtccactcttttttgcaggacccttgggtctcaaattccttttcaagctctgtggcagcagcaaacccactccagtcactgtcaaacttagcaataaccccaacaatcgaatcttgttcgacccaaaaggcattcacttcaacaggcttgaatttggaaagggtctgcagccaatatactgaatcaagtagaagctccttgtcatccgtttctttcaaagggttaacaacaatccccatccatggccagacatagacgttatgaggatttggttcagtctcgtctaacagaggaggaacaaccggagggcgtggaagaggttctgcataaccagcaagatcattctctaaaaacttagctaaagcaagatgattagacttctgtaaagcacttctggtggcagaacctttggaaacaccagtagcatgtgcatgcaactccttgtacttgtaatcttgcttcttcttgcctacacaaaaggggcatctgagccgtccattcaccttcaccttgtagtaagtctcactgcgtaaaaggtggtagggtgttttagaatactcctcaatctctgactcgctgatctcagactcttcatcagaaatgtccatcgtacctgctttacctggagaaaaagaatgttacaaaaacagagaagaagaacaaaataaggcccaaaagagactcaatttctaggcaatcccacgagcaagagaaaccctaggcaacaacttaacaaacaaaacaaaattgacactggataaagcaaaagagacgaaagtgatacagcatttacaaaattgagctaagagagtgacgcatgcatgataaggaacctagcgaaatcaaaaatatatttttaagtaacaagtgagtaaaggcgttaaatcacgaaatgcataggggaatcgaaaaaattcattaaacgagagatttcactgtgaaaacagagaatagaagaaatctggagcttacgctagagagggaaggaaaaggaacaacacggcgatgactcaacgcttgatgaagagtggagtagagagagagtgagtgaggaagatgaagagttattttattttggaaaatatatcagaaaaattagagggtgatttgcaagaataacacatttttatacaagaattaagaatatagcactattaattaacaaagtaatttaaaaatagataaaagagaaattttcacaaatagcataattttaagtttttttgacaaaacctattttatactatagttttttgacaaaattttaagtttttttttggacaaaattgatgaataaaacctatgatccaaattgtgaatgatttatactataagcaatatagtggccacaaaattggtcaagaatttttagtggctttatcaaatagccactgactggagatttttttttaaaaaatatgtgtctggtcaaagtatgtaattatatatctatgtgtaaaattgtatcataaaacattaaggtttccaggattatttttcttctcaaaatttaatatagtgactttgttttactctaagagcttatagtcaccaaagttgttatatatattaatatatgtctcattttttttttttataaaaagaatcaattatgagaaagccacttttgaaagtgacatttgttgattttgcaattttccatatagtttgtgaatttgccatttttagttaataatagataccagttaatacgtggatatagtcggttagatttgtttttaaaatttagtatttggtttaaagtacatattttgcaaaaacattttatatatacatacagttttaagtgttcaaaatgacaaatcctcaagattttagtaaaaactaatgacattgttgtacaattttagtgcttaattttagtattttagttattttatgggctgcactttagcaataaatgtctctttgttttcacttttcagcagttggaactttgaacaaatggaaacaaaaaaatgtagaagacaattttatttttaagcccatcaaaaatacaaatgagattgtaagcccaatatattaaccaacctacctttttcttttgtcagctctctctatttctctaaaggtgacgtcatcttcggcggtaacggctcagatattttccacaataacttccaataatacccctgccattaaccaatagtacccatgtttcctctttgcaacgtgggggtagattcatgaaatgagaacagaacggaggttccaacgagtagaagatgatgtgccacgtgtcactatatcgacccccctttcctcttccttccttccccaatagagagggattttcccgcttcagcgtctctcagtctctctctcggctttatccaaaggttccttcgtttactccgcttctatggaagaagcttgaatccttctctcttcttcttctccttcttcccttgacatttttgttctgagaagcaacatg

SEQ ID NO: 31698 - DNA, 3003 bp, Unknown
  misc_feature (1)..( 3003): 2750-1469P.txt file - cDNA_ID_3045012; gDNA_ID_2926128; Annot_ID_196764
aggacttagaaaggaatattcaaacctttttggcacgtttcacagcaaaggttttgccatctctgagtttgaccttgtaaacagtgccaaaaccgccttgtccgatcctaaaggacggagagaagttcttggtcgcgtcgtagatttcatcgaaggtgaatcttgtatgctctgtttcgtttgcatttccataactcctctgtacactactacttcctgttgagctacgtctactacggatattattgtctgctcacacagagaccaaataaaatcatcatcaactgtttccactaaaagtctaaaatctaagaattactgatcaaactataccggaagaggactttgaattgtcgatgtagttggaggaaacggaatcgggaggagtgaagcagttgatgaagataccggagatgcgacgagcgatggaggtggttgtgtcggtggatgtacgggcaggggttgtcgggaaggaacgatcggtgaaagtagtgttactgtaattggaagatgtggttgcaggagatccgacggtgtagctatgtctccgacgactgggcatcggaaagttcgtggagaacgtgtagcaatggtgaacacggaaggaaggaagagtcggagagactgactttacaattttttcaactttttcttctccgttgaaaaagacgactgttttgggtatttattgacgccagctgtacaacttgacgttctctgattaacaaaatttaaactcgacaagctaagataattaatgtgtataatttcctttttttttattacattttgtctaatgatttgtaataagcttttttattccttagatttaaattcgataattattaattttgaaaaaaaacgattggtttcaaattttattgaataactaaatactttgtatataatagtagttctcggcgttcagttatccattccgttatcgattttttcggttttaaagtttagtatccattcggttatttgaaagttctgttcggtttcgattttaaaatttagtatccattcggttatttcatttaaaatatttcggttattttgaatatttttaaatatttttagatatttccaaatatttttactattttatttatattttcaagtatttttagttatttagtctagaaataattaacacttttaaaaatatatttatactttagatattttacccaaaatattttggtttgtatttattcggttttatttcagatatttcggttatagaatttaatatttattcgactagtttccaatttttggttcggttcgatttaattttttttttcttcaattttggttcggtaaattcgattcaatttatttacagtagtactttaattcggtttaaacgctccaaaacagcacgtacatggaaaattgcatatgtaagattattaaataattttagtatttagaacatctactaaattctgtcattattgaatttatagaggataattagttcaatgccagacgtaatctatccgaatgatttgaaaattttcaactaatatcttgttagcgattattccgccgccaccatattaaatgccagatgggtctatctctattaatgcaataatcgaactcgcatttaatttgtatttttttttacaacaaagataccaagaaaaaggtataatatttttcttataaagttactattagatacattttatatgaaaaaggcttagattagaggaaataataaaatggtagattaaattactttgattagaagtcaatcaatattaggttacggttaacaaggaagattcataggcaggtgaaggatgatgagaattgagaccttaccagcaaaatattcaatagcctctgatagcgacagagggtttgaccttctgtagaatggaccatggtctaaaatgtttatagcccatgtttcagaaaacaaaagcccaatgattagcccgtatccttaaccgacgtcgtactatttaaaaggtatttaatgagatttgagaataattaggcaaactaaataaagtaaagtaggattacagtataattacttactatgatgaggttattcgactagagaaaaggagctctgtgtgtcgaaaccctccgtcgccagcatttattcttctcacttttcttcaccggagaatcacgacaacatcaaattctccggcgacatctcaggttatcttcgtttactgctctcatcggttaattattccatctctttttttgtttcccggagtcggctttcgtgtactttttgtttttggtcttttcggcttcttcaattttagggttcgcgtactgtttagtgttgtttagtttctgatttagatgtgcttactgtgttcatgttgtcgtctattcttatgagaagatcttatggtagagttacatatcaatgatgttaccaattttgaaggttattgtgttgtgtttgattaaaattggctcaagtgtgaaatgcttttgctcgcgtcactgttttcattgcaacttgactgaatcctagaggttgttttagaatatagattcaagtttcagctattgatgggacattacaacagagcataaggaacattcccatacctttgtgtttcttatggataactttggcatcagatcaactttttcttttgtcattttgcttattaacactgtaataatcacttgttattgggatttctcaagtctgctttgattaatcttgtttcgtaatgttcttctcactattcactcttcccatacctttgtgtttcttatggatgactttgccatcagaccaacttttcttttgtcattttgcttactaacactgtaataatcactttttttttattggggtttcttaagagtacttttgattaatcttgttgcattcaagtaatcgttgttcagttcactcttttcctgcagtggcagtgcatctgtaaaatgcttcaaggactgttgttcgctactcttgcttaattattactatagctggtgaaaatg

SEQ ID NO: 31699 - DNA, 3003 bp, Unknown; identical to SEQ ID NO: 31698
  misc_feature (1)..( 3003): 2750-1469P.txt file - cDNA_ID_3045012; gDNA_ID_1972020; Annot_ID_178034

SEQ ID NO: 31700 - DNA, 3003 bp, Unknown
  misc_feature (1)..( 3003): 2750-1469P.txt file - cDNA_ID_3045028; gDNA_ID_1971748; Annot_ID_175256
ccacggagatctgctgcctttatctctgtctacggtttgttaccgctacggaaccagtctcacgctggtttactctcagtaggagaagtggaagtgttttggttccttctgatcattctctcccatattcaaattcaaccgtaacgatgggttcgaaaatatatggtgaacatatgggtgacgcttttggtccgtcttcagctatatggatatatgactgttttactcgctcgtggggcgatgtccccaacatgaagatgaagagggaaaacgcctccgcatgtgttttggatgacaagatttatgtaatgggaggatgtgactctgggggcatcaattggttcgaaatgttcgatgtaaagactcagtgttggagacctctaccggcgaatcctgacgttaaggtgatgacggaagataatgttcgaaaaatcgatgtggtgggaggaaagatttacgtaaagactggggctgagtttatggattggatttatgatgtgaagcgaggtaagtggagtgctgcagatgagtatatgagtttactatggtcgaactcttggtgcgtgatagagaatgtgatgtattgttactcttgctctagatataggtggtatgatttagaggctagaatgtggagagaagtgaaaggtttgaaatatttgaaaagatacagtagtgctagtaatgataatcgtaatcgtatggttgaattagttaactttggtgggaaacttgctattctttgggataggttcgagcggcctggtcgtagtgagaacaagaatatttggtgtgcgatggttgcgctcaacagagactttgaaggtgaaatttgggggacggttgagtggcttaatgttgttcttacagtccccaagtcatataatttcttgcgtcctatagccgtttcggtttgatgatctcttagtcaccttgtagagtcatccttttgcttttaccaaacttaaatgctttgtcttgtgtttgttgtgagtctttttttcttttttctttctacaatttgttgtgagtctgtaaaatcctaaatgaattcatctgatttctagactttgtattgtttcaatttgcattctgcattatgaccatctcctatcgttttgttggtttaattctggttacagtaaacactaagtccttgtgaggcaaatctctttgttctttctaggtcttcatctaaataatgccagtagaagaatttgagtaccttttgatttcactttaaagtgaagtgagattctcctaaacttaatatattattttatatatgccttggtgagatttacattcaagattagatggtttaacatttcagtgttccactttaatatgcttttcctctcttcctctgtttctaagaagaaagagtcatctcgtattcggtcaagttcaaaaccctttagtggctacaaacatttgctatattgtacgtatggttaagacttaagataaaatggataatggtttgtgttgtttcgatatgtagagaatagttgttacttgtcaccggctcataaaatatttagttttccggccgactaatcccggactttccagtagactcttgatttaggtttagctaatcatattttttcatctttttgtggagagtggaaatgtgcagagcaaattcgtcagttatacacttttgtcattatgaaattcgccaaaatggtataacacaagtgagacaaattgagtaatttcgtaagcttttacgttttatgtgttctgtttaatagatcatatacgattattatatatatcactagttcgttagatatctttttttttttttttaatcaaatttttgaaagtagtttgggattcaccgttcaagaataattgaaactttggaaaattaaagatttactagattttcacccgcggtataccgcgaggacaaattatattttaaagttagtatatataaaagtttgtaatttgtaacaatctatgtaactatctataaatatttttattttatagtttagaattgttattaagtaacgtcctgtcaaacccgtcccgccaacccgtcccgtaaaaaaaactcatttattttattaatgttgatcttatttatcatatgtttatgaatcattatctaaatattttgtaattttgtagtaattaaatgctatcaaatatttctgcggtttgatgattataattgaattgtaatagtcatgtagaaaaacaataataatgataattttgtagtaattaaatgatattaaatattttgaaagttttattttaataaccaatcgtgtagttaatgtagagagattttaggaagattgttaaatgtcaaatatttaattcgaagattttttttctaattatcaaaaacaaatattaaaatccagtgacaaccattgtaaataagtcccaactacaagatttatttcacaaaatggctgcaaaaatgtatatatagacatttgtaaagaatgtgcataattacagttataaccttaaacgatgcacatcctttataaaatttacttaactttgttttattatatagttctaaattactaaataagatttcatttggaaataacttacaattttctagtaaagttcccaatttaaaaaaaataaatagaaaaagtgaaaaagaagattttttttgtttgtggaaaaaaagttcagattttttttgaaataaatacaaaagtcgtaaatctaacaaattaatatttttatacatgttaggaataataatttttgtaatgtaatgttaaactaaactaattaagaaatttgtttagaaacgtgtcgaattggggttaaactcatccaaactataaaacaattccgaggaagtccaaaacacgtatctttttcctccgtcgccggagacgattctctttatcaccggaataatcagattccatgttcgaattcagctgagtattataagttataaccccaatcgaaggacaaagaattttaatttttaaaaagtcttcgatg

SEQ ID NO: 31701 - DNA, 3003 bp, Unknown
  misc_feature (1)..( 3003): 2750-1469P.txt file - cDNA_ID_3045036; gDNA_ID_1971748; Annot_ID_175252
gcacttacctctcttgatgttcataagttataggacaataaaagccttttggtaaagaaaagagagagagatactattattgaatggattattgcaaaactttagtaccctaattgatttaaggaacgtactatttgcttcactgaaaatgattcattgccatccataatattcttttgatatcttctgctctaacttggatatatgttagccaaaaacaataaaaacatctcgatcacgtgcaaagatcttgaaatagatatgtctctctattttttaatgtctatgaaaggacgtaacaagtttctcttctatttcgcatttggtaatacattaatgttttaagaagacatttgcccaagttgctaattttttctttttttcctgatgaatattcaatgcatctatggctttgacaaaaaaagagataaaaaatgaaggaaacaaaataaccaatgcatgtaagtaataatactcttctcgcaaatgaaaacaaaacctcgaacaatcaatttactagctatgcgctagggccaagctactatactaggcactaggtccgatttattcagaatcagttttgatatggatattggtcggattcgttcaacccactgattccaatttggttttgaaaaacaatgttcggccatttgcatccagagttatttaaatcacgaaaaatatagtttgctatttatcatatacatacggaatttgcatgttaacactattgatcaactagatttttctaatgttatattttttttggtggggaagtattgaacttaccttaccactctttttcgattcaaatactaagaatcacatttatcagttgtgagtttagctaaatatgtgggtggttttaaatttgtgagtattaaatttgtcatttctatcacaaaacaatgggagaaaaaaacgaaaaactagtttcccgacattaaacatgcgaattactgaaacatggataggtccaccatttttgccatttgacaagctcggtctcttgttttccttgttcataaatgattttagtttgtttgcttttttaaacgcatctttctatcacttttttcttttggttgcaaatatgtcgttttctctcctccctccttttccgggatttaacttatcacaatgtaatgaaatttgcatgttcctctctcgccattggcaagttccattgcgatgtctctatcgataggtcaaacaatccaaaagaaccaaaaccttttttcttttcttttccactcacatttaatctagggaccctttaatcttattcattttctcaacgataatgtaaaaaagtatagttagtaaactgttaactgtgtagattatacatgttttttaatcaatcatataattagaaggggtatttagccgtccaaaagctgttttcgcgtgactatgcatgaaacccacttacgtagcctccaacgtaacgaccaataaaaagctctaacttaggaacattacaacgaactaatatttaataagttatataaggtcatgaaatgaaatcttataacgtatctaacaactcacatgatctataccatgtcacattttttatcaaacatatgttaaccacctaagcactaacactactctttgatcaaacttatatttcgcatatactccaaaagaaaccaagtggcatattggcatatctcgtaatgtggtgccaaaaatgcttatcaacttaattatagttcagatattgtctccgtatcgtatcttaatatttgtattcaacaataggtattatgttgtattagctaggtgtgatttgtaacgagaagagatatctcgttctattgtgaggtaaaaataaaataaagcagtacaagaacataacggtataaacggtttttactgttaaaaaacttgtaattgtttatgtaccaaccctattgattgtgtttaagaaattatttttaaatcttgagattcttattcaaatataaacattgaagatcgatattgctcaatatcacaataatctttctaagttatgaaaagaacgtctactactatttgtttaaaactacataggacaacatcaaatcagttttgaaattcattgtaaaattcttttaatactaaaattgtttacagttaatgagaaattacaatattatttttagcagattataattagaaaatacattattattattgatcaatttaccttgcagttccacgcaaaaccaacaaaataacaaataacaaagcattgtgtggaatgacgtaaggatgagtcagcagacaaggagtgagatcgaatcgggtcaagattatctggttgggacccgtcacatgcacatggaccctctcccgtacctaatccaggttaaataatcttgattttctgtttaattaccttaaaaacacattattattgaaactaataataaatctcggatctttggttccgaccatacttgcgaaagatcattgctttaatgctaatgtttctctaattttgatattccttgagattagattccctttgcattgtcttttcttgttaatttgttagggttcatattcttacattattttttttggcaaagaaaaaaacatttataaacatatctaattcgagcctgatctattaatgggtcaaataaaagcctctttggcccaattcaataaactggccaactggggatcatcatagagacagactactagagagtagagacgcatcagaaagaagagaaattgatcccacaagtttaaacacgattacaaattaaaacgtgccacgtattcaagacggtgaattaacacgacgtggcaaggtatgattggataacttacgcagctgcctaacaaaaacaagtgatttgagttttcagatgattagaaggaaaaaaaattctggaactttcgagcttctgttttgcggtgctctcaaagcttatatcggatctcgaatcttgaatcggactcagaacctcggatcttcgaaaatcgacgaacatg

SEQ ID NO: 31702 - DNA, 3000 bp, Unknown; identical to SEQ ID NO: 8339
  misc_feature (1)..( 3000): 2750-1469P.txt file - cDNA_ID_3045044; gDNA_ID_1971748; Annot_ID_175238

SEQ ID NO: 31703 - DNA, 3000 bp, Unknown; identical to SEQ ID NO: 8339
  misc_feature (1)..( 3000): 2750-1469P.txt file - cDNA_ID_3045044; gDNA_ID_2926195; Annot_ID_201388

SEQ ID NO: 31704 - DNA, 3003 bp, Unknown; identical to SEQ ID NO: 30007
  misc_feature (1)..( 3003): 2750-1469P.txt file - cDNA_ID_3045090; gDNA_ID_1971751; Annot_ID_175319

SEQ ID NO: 31705 - DNA, 3003 bp, Unknown; identical to SEQ ID NO: 24863
  misc_feature (1)..( 3003): 2750-1469P.txt file - cDNA_ID_3045094; gDNA_ID_2214546; Annot_ID_185440

SEQ ID NO: 31706 - DNA, 3003 bp, Unknown
  misc_feature (1)..( 3003): 2750-1469P.txt file - cDNA_ID_3045094; gDNA_ID_1971751; Annot_ID_175317
tttaattcttttaatcaaagcatgatttaatgtaaaattatactactgtatgactacttttcttaaaaatataacctaggcaacttgttcatgtgggtctactcgttaggtgcttcattttgaatgatcatgtttaattgcgtaacgagataagtaaactggttaattgcttgtgtgacaaaagatacatatcaaatttaattaatcattaactttgattaaagaagtaggcggcatccccaaagtcaacaaataaaatcaaaggtttctggtttaatccacgcgttgccccatccatattccctttatttctaaacgaaagcgaccgccatttccgtattttgtctccctagcaccaaaattacatgaccatttatttacttacgtggttctttttttctttgcagcagaattatataaatatgcaacactggttagtctaacgctatagatatggatgatattttagatatctatatatacatttttgcagccattttgtaaaataaatcctagagttagaatttatttacagtggctgccactgacatttaataattgtttttgataattaaaaagaaaatctttgaattaaatatttgacaatcttcccaaaatctctccacattaattacacgattagttactaaaataaaacttcccaaaatatttaatcttatttaattactacaaaattatcatttttgatattgtttttctacatgactataataattcgattataatcatcaaaccgcagagatatttgatagcatttaattattacaaaattaaaaaatatttagacaatgattcataaacatatcataaataaaatcagtgagttttttttacaggacggattgacgggacgagtttgacaggacgttacttaataacaatcgtaaactataaaataaaaatattttatagataaatataatttgcaaacttttatatatagtaactttaaaaaataaattgtcttcgcggtataccgcgggttaaaatctagtaagacctaatagagtaccaaggctagaacaattaatacgagtatcgcgtatgaaaaagaatatacatgtattctgataactatataaagtagtagatgaaatgattttgattcatgaatctctatgttgagtgagaaaatgaatagcctgagacaacacaagtgtaatagctttcacgcttggacttgtgtctgaattttggaactgatgatgtttgctgctctttctagaagacctgttgaaaaaagcataaatacgctctgttttcaaatttggcaattgatatttgtttttgtacgtgtctatttaatttttggtaaagaacgcacgttgtttatacttacacaccgcccttctagaagaacaggctctcacgtcatttgcatacaacttccatcttctggaaccaatggatccctgttacaaaagttgctcttaaaacataaacaaaaacaaaagaaaagaaaacatttttatatttgtcgtcaataataatggccactttctgcttacatgtatatgaatgtatatattactataatacgtagctgctcgtgtttcttgtctaagttctctgttatagttaggagacaaataaagagaattagagaacagaagaccagaaaaataaagatgaacacaaccaacaacgtgtttgatgtgtcaccgttcttgcttttagaagcatctgcagattccgaagctggccacgacagcgttgacgatgataaatgcgttaaggattacgatcttggtcatgagtcttctagtgccagttcttgcgagacgtcttgcgtgagtcagagaacgagtttgttaggttttgacctgcaggacgatacggtgaatcatgaagaaagagacgccggagatgaagaagacgaagacggagaaggagaagtgaatagctacataagatgtgggagaagccaacgtgaaaatctggctgtggattctgctgcggyggtgagtgagatggatcaaaatcgaatgttctgggaagcttgtctcgcatcttgatctgtctttattaattaatgtcatctcatcatcaacagagaaaacaaaatagtatatatctagcttagcgtagtgttcttgtctgtgtttcccctttggcttttaatgcacaactaatcgatatgatatctacccattaaccttaattagtcccctttagcgtagtgtaaatttgttttgattcgtcaagagaaaaaaagtggtctaagggactgactagttggagaagaatccgtataaaatctgttaaaaggagaaacaatatactatactagtcttttctcgtagaggaggatgttatactaacattactaatttatgctcacccagtttaaataaaataaaatcaatacttttttggtttgtactaattaacatatatatatatatatattcccaaaattaaagattccatggctaacagacctaaagaagaagaagaacaaacacaataagagattggtgtagttttacttttactatattcatctttgtctttattgaccaataaagtaatttctcccctttatctatttgatagtggtatactttaagttgctttttaattgctggtgtacaattatattggactcaccaacaagaatctgtgtgcagtcagtgtgcttgttactattgttttatctcattaattgatgatcactttttcaccttcatacatgagagctgaattcatcactttgttagttatataagttgggctattctattattaacagtttgatttttgacagtaaatttgtctgccagaataacttatacacattaccacccaaaaaaaaaaaaaagaagaaccatttttggacattacgtggttttgggtttgtctagcgaccttttatgggccaatgatatgaggcccagtaaggaaacaaagaacggcccattataatgtaaacatatttagtacaaggaaaaggggtaaaaaaggaacaaggggaaagaaatg

SEQ ID NO: 31707 - DNA, 3000 bp, Unknown; identical to SEQ ID NO: 12380
  misc_feature (1)..( 3000): 2750-1469P.txt file - cDNA_ID_3045099; gDNA_ID_1971751; Annot_ID_175310

SEQ ID NO: 31708 - DNA, 3003 bp, Unknown; identical to SEQ ID NO: 21939
  misc_feature (1)..( 3003): 2750-1469P.txt file - cDNA_ID_3045105; gDNA_ID_1971751; Annot_ID_175301

SEQ ID NO: 31709 - DNA, 3003 bp, Unknown
  misc_feature (1)..( 3003): 2750-1469P.txt file - cDNA_ID_3045113; gDNA_ID_1971751; Annot_ID_175297
aaacactaggcgtcctcgagtttttttcttccttttcaaaccagtttggtaacgtcagatttagttgacatatgaatgtagttttattacttaatttgaatttaaattgcataagggccaatcatgagattcgtcgtattcatttttgtttttaatttaaatatacgatcgattttgtctattgtgcatattatgcatctgctggagtcaaacttgactcttgatcgtcggaaagggacttctccatttatgtattataatggacgtaaacaaaaattgtgagttatcgacacaacttcagaaacacctctcatttatggtatattgtgaataaacgaataagttatccattggaaaaattaaatcagtagctagtagaaacatatatgaaaaaatatactgcgacagacagtatattaactgggaaaggagaaaaaccgagaaagaaaagaaattgtcaaaggaaatcaatcgtatttaattaagaaaaggaaatctcaactgaatctgcccttttttggttaagggggcttcagattaaaaaagagttatcgcttcataatgaatgaatgaatattcagtacaggtcacgacgtcatgttacgtacgactaaaaccgcccattttcagaatcagagccgatcggggtattgtttaataacggatttaacgatcgtgcatgtcatttcgttataattccaagctttctcatcattatcattttattatcatctttatcaacttaaacagactcttctttggcggcccattcacagcccatataatgattcttaagaaaagaaaccactcgctaccgatgtaacaacaaaattattaaaatgatcactagtattatagttttcattaaaacgacaaatccatgtccgtacttgtcaacacacaccacaaaacatatacatatatatcaatctctcaggccagaggattattcaaatcattaatttgtcgaaatccatcacttgaaagtcgggttagcacgagcaatggtggaagaggaactgagcttcatctttgccttctttatgtactcagagaactgatctgatgatctccggccactactacctacgtgagagataggcacatggtggtgaagatgatcatgacgtgtctgatctgtttcatcacttgtctcccacgcatcctccttcatcatatcaccgacattcgtcatcgcccttatcttcagcttcgctttctttatatactcggtgaacctctcgtccgttttgatcgtagtatccactcgagcgatcaccggttccacctttgtaatgggtttggctgccctaggcctagccgatgtctctgcaaatttgacgcgaacagcctctgctggtgaagatttggtggagatgcgacgaacggttcggacaggactagtcactgctctgaagatcttctcgcacactctgttttcttgcttcttcttgctactactctgtgatgatgagttctttgccatggatgtcaccttgggaagtactaaaggtgatctgtgcagagaagatagtgacattaacgagctttttataatgcaaaatctatgtgatttatctttgttaattgcagaataacgtgtttcaacatgcaacaagcgaagaaattacaacttgttgaaaagaggaaagttggaaacttttacaagtttttcaaaaaaggaagagtgatgttagaaagggatcggattctgattccactatgttttctttctttctttcttcttcgttgtttttgtttcggattgttacgttcctgtcaggatttgagaatcatgcatcagctgtcactcctctcaggagggggagattatatctacttgtaacatactaatcttccaataaataagcacttcacatattattaaaatacagtagattctcataattaggccattttccataagcttttgtttacttatttcaatccactagtatgcttttcacattattcttttcctgcaatttagcatgaatcatgtatgcaatttagcatgaatcatatatatgaaacgggggtttactaaaactctatacataaatttctaaaactctaacccactccaacccggttttttctgttcgggtatcgggtccggtttttttttcgcaggccctaattaagacattcaagaaaacaagaagaagcataagaagaggcctaaatgcccagagaattaaacaaatgggcctttaacaatattttaaacaacactgaacaatagatgagatctcaacttcgaaaagctaaagccttaatataaaaccaaacatcaatctctcgccgttaaggttacatctgtcgccgccgctgagaccgccacttaaggccgtctcctccgctctatccatatccaaaacagctataaagataaacttccagagcttggtgaaggagcagcaaccctagttttcaatccctaaaggtgaagtttttgttcttctttttctttgattctactcttttttcgtcacaatagcgcagtagcgatctgggttggcgtttttattgacggattttggtgggtttgggttcgtgttagattttactttcacagattcaggtatgtatttgatcttatttagctttggtaatactcaaaccaactagtatttgatcttaattaggtgacgttgatattttgtgtgttgtgggtcaatcatccactctaggttgatctgcgtctatgtttagtcctaattttgaagaatcattctaattgctgatgtttatttatgacaattttatgtcttacttcgaatttagctaagataataaatctagacgagtgcctttataaacagtttatgtatgaacaatgcttcgcttgtgggattgttgatttcactacatttgattaagaatgtacatactattacaaatgttatcgattaaaaacgtcattttcagatattagttctccagcgagttgacacaaaacccgattacgtttcatccggcgactcgctttgatattccatg

SEQ ID NO: 31710 - DNA, 3000 bp, Unknown; identical to SEQ ID NO: 8350
  misc_feature (1)..( 3000): 2750-1469P.txt file - cDNA_ID_3045117; gDNA_ID_1971751; Annot_ID_175292

SEQ ID NO: 31711 - DNA, 3000 bp, Unknown
  misc_feature (1)..( 3000): 2750-1469P.txt file - cDNA_ID_3045156; gDNA_ID_1971757; Annot_ID_175366
cagataaaacttggctcactttccgggaacaaagttggtggcgaaggcccatgcgttgttgttaactggatcggccaaatggtcagcaaggttctctatcggtcccttaccagtgacgatggcttgaacgaagaatccaaacatagagaacatagccaatcttccgttcttgagctccttcaccttcaactcagcgaatgcctctgggtcggtagccaaacccaatgggtcgaagctgccaccggggtaaagcaagtcctcggcctctcccaatggcccatttcctgcgactctgtagccttcaacggctcccatcaaaataacttgtgtggcccaaatggccaaaatgctctgagcgtgaaccaagctagggtttcccaagtaatcgagccctccatcgctgaagatctgtgaaccggccttgaaccaaaccgcctctccgaacttgactccgtttctagccaaaagctcagggaagacgcagcctagggctccgagcatggcccacctgctgtggataacttctagttcacggttccttgcgaatgtctcggggtcagctgaaagtccggcggtgtcccatccgtagtctccggggaactctccggtaaggtagctcggtgattcgccagagaatggacccaagtacttgacacggtcagatccgtaccatgggctgcctgatgggccctttggcttggcaacagtcttcctcattgtcacacggccgcttccaaggacttcagatgccgcgggggaaagcttgacggccttaccggcgaaggcaggggaggagagagccattgttgaggcggccattgaggttgagtagtgcagcacaaagtaaaacgtttaagatttgttgttgtaagccaagaaatgggtggtttggtattgatgcgattttcgctatatataatacagaaatctaaatactgtcttatcttgaaatatcaatctctgaggttgctattggctagtcatagattttttttggggtttagattgtttgtttgcttacgtggttaatggctcgcacttcgcagattcgcaattgatatgtgttttagatatctaggtgcgtttcatggattggcgaaacacccactcatgacgtgacacgtatacgaatagatctctctatccttatgaaatcctgagagcatcaatgtaaaccaaaacaaaaaaaatttggataattgccttgtataatacattttattaaaccttttgtatatatgcttcttttttttttcttcttctgataataataataactcttggctagagataaaacataagaacaaagtagataaaactataaaatttatgtatggaaataagattatctaaaactacggaattgaatcaaactttaccacagaaacataagaaattattaccatcttaattagcacctgtattgaccataatattttattagaagaagaagaaaacattggaatccaccagatcaaggtgatggtcagggtcataagacagctccataatcacgagtcatggtcatagactcatagccacaagtctgcttctcccttaccaataccaacggcttcaacaacggccacaactaataagccaattccaacggccaccatataactgaaccggatattcaccaaacccatttcaaccggaaattgatccacaagtaattaaaaatgttctgaccaaatgtggaataggtgggaaaatgttgaagtaaaggccaattctataatgtgagaggaaaactcttttttgagcttcaggaatattttcttagacctgaccttgaatctatattttgtagttcttcaatgatttgatttctctattcatttccttataaattaaattacttgtgaaatgaatttctgtttagaaaaaccttgaacttcctagttgaccaaaggattagaaaatctttctaagtggagtgtctcctaataatggatcaaaagtgtttggagcaaaaaagaacgcatagtgtattagtgttaacagcttttatagttcaaagtttagaatgtgctctaaagcatatgtgtgagcctgtgaggtctagtgattgtaaaaaagaaaaattgtgcttcgtggaaagtgatgcaataaacaacacttctagggctgagtaaaaccaactagacatgtaatgatagcttaaaccgttttctataggagtgtgattgaggagtaatttgttgatgaattcggaaaaagcgaataaataagtttgttcaaaaggttgttgaagtttacaataaagataacttgaatcatgataagaaaaaaagtagctatatgttctctaaagtctaaacccatgatgatgaacatgccatatgaattaatatagttctttcatgttcttagaaatggtcgataagttaaaacagtgtttcattaatcgttgtgtttcttcgataaagagtaaaacgtcaaagttttaaggtgatatcacataattcatgagattattttggttattggataaagtgacgatgaaatcgattcataattgaaattaaactggtagtgatgatgaactaattaccattgaaaatattgatatttatgtgtgggtaaatgctttttataatgttactttatattaatgtttcgatcatcagaatctatattttcaaaatgttatactttaagttttagttattgggttgtagcaaaaatcattcttgtcacgagggtgtaagtaagtgtaaccgttgaagtattcagtggctcataacttgtggtcacaaaacgcttggctgcaatgaaaaaatcaaaacaaatgctggtggactagagattgccacgtaagactactaaacgataaaacaaaaatcttaaaatccaatgaatgaacagataaagattacttcagatataacaaacgttacaatatccctatataatccaacactatcgaaccagttttaatcactctcactcacaagttagtcataaaaaaaaaaaaaacacaaaaaagtttcaatg

SEQ ID NO: 31712 - DNA, 3000 bp, Unknown
  misc_feature (1)..( 3000): 2750-1469P.txt file - cDNA_ID_3045160; gDNA_ID_1971757; Annot_ID_175365
aaaatgttatactttaagttttagttattgggttgtagcaaaaatcattcttgtcacgagggtgtaagtaagtgtaaccgttgaagtattcagtggctcataacttgtggtcacaaaacgcttggctgcaatgaaaaaatcaaaacaaatgctggtggactagagattgccacgtaagactactaaacgataaaacaaaaatcttaaaatccaatgaatgaacagataaagattacttcagatataacaaacgttacaatatccctatataatccaacactatcgaaccagttttaatcactctcactcacaagttagtcataaaaaaaaaaaaaacacaaaaaagtttcaatggccgcctcaacaatggctctctcctcccctgctttcgccggaaaggctgtgaacctttcccctgcggcatcagaagtccttggaagcggccgtgtgacaatgaggaagactgttgccaagccaaagggtccatcaggcagcccatggtacggatccgaccgagtcaagtacttgggtccattctctggcgagtcacccagctaccttaccggagagttccctggagactacggatgggacacagctggtctatccgctgaccccgagacattcgcaaggaaccgtgagctagaagttatccacagcaggtgggccatgctcggagccctaggctgcgtcttccctgagcttttggccaggaacggagtcaagtttggagaggcagtttggttcaaggctggttcacagatcttcagcgatggagggctcgattacttgggaaaccctagcttggttcacgctcagagcattttggccatttgggccacacaagttattttgatgggagccgttgaaggttacagagtcgcaggaaatgggccattgggagaggccgaggacttgctttaccccggtggcagtttcgacccattgggtttggctaccgacccagaggccttcgctgagttgaaggtaaaggagctcaagaacggaagattggctatgttctctatgtttggattcttcgttcaagccatcgtcactggtaagggaccgatagagaaccttgctgaccatttggccgatccagtcaacaacaacgcttgggcctttgccaccaactttgttcccggaaagtgagccaagttctatctgtttgtaatttacttttctttcaatcttttgaattcgagtgagagacaggaggagaaagagtaggtttgtgtttgtggtggatggtagagactttcagatgtaaatttgcaaagactttgtatgatttgtcattaatcaaataactcattgttctctaaatatgtttcgtagaactataattgaattggattttcagttcttgggttcactccgttgtagaggctatttctacaatcgagcaacgtgattgaacatattaaggcaatgggtacaaagattatgttcttttcaaatcaagagaaaatgtgattctcggatgttagcttgaacaacacgaaagagtcttttatataagttttttatattcccttgatttaacttgtatatcgtctcttcacaaaatatgatcgcattgaagaagaaattgcaatcgttttttttcttctgattgagagaattagagaatagataatgaagtagtttcttccgtgtttggttgattctgaagctcgtaacattggctcatacgatatctggataacaatatatcacattgctctgataccatattaaaatcacatccacgcattgaatggactgatcatatatcttacatattagttaaaatccattgtcgtgcgagagattgccttccgtgacatcctctgtggaccaggttcgcttgtcacactagctataattggtgaacacatgataacatatatgtttggagcatagaagagctagcgcctgtgtcattggtgtgtggtatcgaaagaacaagagaatagaacaggagaacatgaatatagctaggtttattcattttcaccccaaagcttagaaattgcgttccaaagagtgggtgaattcatgtgtgagggcaattagtgattgtaaaaataaaattgtgttttgtaaaaaacttttactgtcgaaattatttagggtgatgaaaaaatcagtaaactacgaatgatagcttaaagagtttctatcaaagtgattgaggaatagtttgttgcaaattaaacctctaacaaaatgttttctgttgtggtttttcatctctacaaattttgaattttatgatgaattagaaagatagaatgagttactttagattttaaaaggttgttcaagtttacaaaacagattactagaatcatgattaaaaatttacaagctacatattgtctaaaccaatgatgttgaacataccagatgatagtttttcagtgtttgaacaatcaattggatagtttttatgtttctgcaaaatatgcaaataatcagtgtttttgagtctttgcattttgatttaaaagcaaaaacaactgagtttcaaggttaaattaattacattattcatgagatttatcaggttagtggataaactgacaatggaatcaatgttattgtaaattggtagtgatgttggacttctaatgttactctctatgatgtttcggtcatcaatatcacactatctttacttttatttaaaggaaagatcacacaaataagttatctctattcagaactattaagctgcttccaaaagacttgcaacatgtggtctcgaaatgctttggctgcaatgaaaaaatcatagcaaaagctagtggactagagactgccacataagaatagtaaacgttaaaaccaaaatctcaaaaatccaatgagtaaagagatatagattacttcatagataacaaacgttactcgcaattttcctatataatccaaccctacctaaccattttcaatcactctcactcacaagttagtcaccaaaaaaaaaaaaaaacacaaaaagtttcaatg

SEQ ID NO: 31713 - DNA, 3003 bp, Unknown
  misc_feature (1)..( 3003): 2750-1469P.txt file - cDNA_ID_3045168; gDNA_ID_1971757; Annot_ID_175363
ttcgattattatctttaagcaagcagtgggaatgtccttttctacaaagcctttcaacttcaagctcaaggtttggatctcagagacatatcctgtcactaacggaaccactttgaagaatgtctgaacaagacgaataggctcacttctgaatcttaacatgcacggacgccttatactagcaatcgtttgaccatccacagataagaagtccacccgaaccttcaataaacacatgatcccatatcaaaatggatgagcaaaacataagtaaatgtttattggacaaaaacgaatacacatgagaaactatttcaagccagagcaaactgcaatgcttagacttagagtgtaagatatatatctcatgccaatacctgaaacatgccgagatttttattgtacgcagactcaggtaatgtcattgaaagaatgatatctaacttctggtctcgagggataactcgcaaacccctgatcttcgacatttcattactttccttgcaacttccctcacattcaacaccagcacacgaggatatgggcacatatgcttctggactattcttggtgtaatcaaaattcaaggtctccttgacctcaaatggtttatccgctatacggttaatcacataaccaccaatcataagcgacgaaaccaacaagccaaacaacacaatgcctacataaacagcccaaaacataccccaaccaaacttgcacacaatactcaacatttgttttgtatcttttaacctaaaaggattcatataaccaaagatcatatcacttattcctgctactcttgccattaaaaagcgtctgccaaacctaatcgtgctaaagggatcgaaaaagaagagaaaacagttacggagaagccatggaggaaatgtgagtaagcttgtcatgaaactgacttgaaattcgattgctttgatcactagcccaaccaaaaacccaaggagagaccactcagtggaattaggtggctcccgaaactgtggtaccgatccggcgtagtcgtcgtctccttgatcatcgctgctcacggtagtcaccgtggattcttcctgaaacgggtcaacccggttccgacccgaatcaattacatccatatcattcccagacgaactaattacatccaaatcgttctccttttctgaagatagatcaattgagtccttagttgattcaattacgtcgcttgtatcaatatcccctctaagctcagcgttcttttccacatagctggatttctcaccgacatcaaatccatcggaagaagaagatggctccgtttcaatatcggacgaaattaaatcccggcgatgtgccgactttcgccgccgtaagagagacgaaggttgatgggaattggaacgaatcggtaagcaatcgtagtaaaattcgtcaggtgcgtcgaggaatcgatcgaattcgtccgtggtgctagggtttgactcggactcggactcggagtccattgatggtgatgataacccagaagaagaagaagagattgcgtgagtttggggaatttctaaagcatcggtggcgataagcgtgatagctcacaaacggcgtgaccgagttttttttatttaattttaaatttatttatatacgtcactctttggcctttgcagtcaataaccggagcggaccatcaaaccggataattgagaaccgaagataaaaatgaaactaaccctagggaagttactatttttttttttggtcaaacaggaagttactattaatttctactaatgaatacagatacaaggtatctgaatctgagagctgagattagaaagtgattgtttggtgggttagttagatagtcttccacaaagatatgagtgttggactgaaatttatctcactaatcaacttttagtgataaaataataaaatagtttacaacgtttatataaatgtttgttctttacttattttcccattcaatcatagcaatatactttacttattattttttaattaattaattattttacttaactatttatgacaatgttactgttgatagagattgttttgtgttactttatatttaatttcttttcttaaattaaataaaataacagattttttttataggattagtcattaatcgaaacaaatctttgggggatgtattatggcctatattttgcgtgggcgagacggatacctcagttggagttagaggtggattcagagatagtggtgggttttctcaagaccgggataagcaacacacatcccttgtctttcctagtacgtttgtgttatggctttctttcgaaggactagagagtctgaattacacatgtgtatagagaagttaatcatcttgctgatgggttagctaactatgcattttcgctccctttaggtttgcatttttatgatgtatgtcctgacggtttgtcgtcttgtttatctgacgatgctcgagggtctgcgtacccgcgtaaagttcttttgtaatatttttttgttcttttcataaatttgtagggggcattgccccctcaccttaccaaaaaaaaattaatcgaaacaaatagggttggtctagcggttaagcggaaattaatcggactagatgaagattttcaaaaaggagaactatatggtttttaaactatataaaaaaatatgatttacctaaactatgtatcctttaatttatgttacacttgttgacaacaagttcaaagaggaaatatcaaagagcggatatgtatgggttaagcttacttttgctaatgtcaatttgtttttttgttttccagtgtcaatttcattttgaattgtcttttgtcatacacattttgtcttcaattaatgtaagataatctacgttttctttaaagaaatgtcgtaaatcgtaatgaataattgtctacttcaaaaaaaagtttgaaaaattgttctttgactattttgtgcaactattttggtcttcaaaattaacaaagcattcacacaatg

SEQ ID NO: 31714 - DNA, 3000 bp, Unknown
  misc_feature (1)..( 3000): 2750-1469P.txt file - cDNA_ID_3045174; gDNA_ID_1971757; Annot_ID_175361
  misc_feature (411)..(460): n is a, c, g, or t
ttggcacactcgatctgcaccacattgagaattattgttatactaacatatgttaaccataaaggcttcactaaccacattgtgaagtttctttataataacatatgcttcgatttgtagatcccactaaccttaaccagatgtgaaactgtgaaatgtaggtctcgagagttatcttgcccagccacctagagagagatcatggtcaaaaagctgtgtgcactgtgaacaagaaggtaacaataaggaattaagagattgagaatcttacgcaaagagtgtcagggaaaatctccgtagctgttgggtgcaatttcgcagacagatgtagacactgttccagatttaaaaccaaaggtcataaatcaagaaagcatattatctcaagattttgagtcaccaaactacgcnnnnnnnnnnnnnnnnnnnnnnnnnnnnnnnnnnnnnnnnnnnnnnnnnnagctgtttggtgactcacaacaaaatatgaatgattgcttcaacagtttataggatcatcaattcatcatcatcatcatcatgtgaaagaaggcctaatgaagagtttaatacaaaaatatgacaagttctttctcaaggtaactcaatggtcaaggggattcaaaccataatcaatcaaaaaatgatttaataaaccctaatggacctaatcacacccaattaacacctgcagattttggactcaaaaaacttcaattaaaaaaatgaaaaaccccaacgtcaccggaattgttgcggctaccaatcatgaaatcccatttccaacagataatgaaaacccaaaaaaggaaactttacaaataaaatgagaaaaaggagcaaactttgcatagaatctgtaaacccagaatccaaaaaggaaagagaaacgataaagttcaaatttttttacccaaaaacagaaaggaagtaacttgaaaaccaaccttcttgctgcggtaatttgatagcatttacactataaaatttgaagcaaatgatggcaaaaacagaaaatgcaaagatgttaagatcatttttcttcttcttcttcttctcggccaatatttgatacagagatatcattgcaacaaaaatatctctgtaaaacaatgtctcatcgaaaatgataaatcgttagggaagaagaagatctgaattttttttctgggttggttaggcaagtgtgatgatttagtggattcgtagaattatgacagagaatctacgaactgtgcttttttcctcccttcgtttttctggttatttctttttttaacttcctagtgaaaaaaatttctatacagcgtatattattattagtcaaattttgaatttgactgaaaaaaaaaagaatggtacaatcccacaatgagaaaaaccacaaaccctacaaaagttgaacaaataatccattagaggtaaaaagcgacgtaaatcaaaaatagtagatatctgtttagagaaattacccgctttttcattgtgtgaatgctttgttaattttgaagaccaaaatagttgcacaaaatagtcaaagaacaatttttcaaacttttttttgaagtagacaattattcattacgatttacgacatttctttaaagaaaacgtagattatcttacattaattgaagacaaaatgtgtatgacaaaagacaattcaaaatgaaattgacactggaaaacaaaaaaacaaattgacattagcaaaagtaagcttaacccatacatatccgctctttgatatttcctctttgaacttgttgtcaacaagtgtaacataaattaaaggatacatagtttaggtaaatcatatttttttatatagtttaaaaaccatatagttctcctttttgaaaatcttcatctagtccgattaatttccgcttaaccgctagaccaaccctatttgtttcgattaatttttttttggtaaggtgagggggcaatgccccctacaaatttatgaaaagaacaaaaaaatattacaaaagaactttacgcgggtacgcagaccctcgagcatcgtcagataaacaagacgacaaaccgtcaggacatacatcataaaaatgcaaacctaaagggagcgaaaatgcatagttagctaacccatcagcaagatgattaacttctctatacacatgtgtaattcagactctctagtccttcgaaagaaagccataacacaaacgtactaggaaagacaagggatgtgtgttgcttatcccggtcttgagaaaacccaccactatctctgaatccacctctaactccaactgaggtatccgtctcgcccacgcaaaatataggccataatacatcccccaaagatttgtttcgattaatgactaatcctataaaaaaaatctgttattttatttaatttaagaaaagaaattaaatataaagtaacacaaaacaatctctatcaacagtaacattgtcataaatagttaagtaaaataattaattaattaaaaaataataagtaaagtatattgctatgattgaatgggaaaataagtaaagaacaaacatttatataaacgttgtaaactattttattattttatcactaaaagttgattagtgagataaatttcagtccaacactcatatctttgtggaagactatctaactaacccaccaaacaatcactttctaatctcagctctcagattcagataccttgtatctgtattcattagtagaaattaatagtaacttcctgtttgaccaaaaaaaaaaatagtaacttccctagggttagtttcatttttatcttcggttctcaattatccggtttgatggtccgctccggttattgactgcaaaggccaaagagtgacgtatataaataaatttaaaattaaataaaaaaaactcggtcacgccgtttgtgagctatcacgcttatcgccaccgatgctttagaaattccccaaactcacgcaatctcttcttcttcttctgggttatcatcaccatcaatg

SEQ ID NO: 31715 - DNA, 3000 bp, Unknown
  misc_feature (1)..( 3000): 2750-1469P.txt file - cDNA_ID_3045205; gDNA_ID_1971757; Annot_ID_175353
  misc_feature (391)..(440): n is a, c, g, or t
caatagtcgtaggtattaacaaatcagtgaatctgaactaagaacacatacatatcaaacccagatttataattacaacctaagtatcaaaatccgtcctttgctactattcttcaccaaaatcaaaaatctaattcaaattattaccgtttgtgacgtctgtacagattattgaacaatgatgcagctggaacctaacaaaaaaaaaagagaggtaaacacacacgcaaatccctgatatacatacatgcacataaacatacacgaagagggtgattttggttaacctgtgttctagagattgagaaaagtttaggtagcaagagccgactcattggtgccgaagccgttgcggagcagaaatttccggggagagttttgtaatgagtcnnnnnnnnnnnnnnnnnnnnnnnnnnnnnnnnnnnnnnnnnnnnnnnnnntcgtggactcgtcactcaaggacgtcatagctgacactatgatgagaagacagaagagaaagagaaaaaggtctcggctgtaattctgccaatggaatccacatcaaaaagatggacggtcaattgcaattgctaacacagtaacactgatataagctttctacaccagaaagaatttcggctctagtgaactatatattgcacaagtattttttttgaaatttaacaaccgaaaaggaaattcgtcaaagaagtttgatggaggcaccttttgagactgcccgatcaagctagttcgatcacaaatataaaaatataaaagaattgctccaaactcagccctacaatagaagaaaatggtcactatggagcctaatcagtaagaattcaatattgctgagaactaaggaacctacattgctctcaaggttgctcggttttcaagcaagaaagagtcttccaaagtcagaaacctacgaataaacacaatgccaatggttaagaaaatattatggctagagaacattcctccctaagaaaaacaaatagctataacaacctaatcaaatttgttttgattggtgagctataaaactttgaagaggcagatcttggaagacctccttccattaaaactgttccttcatcctctttgttcgtcaccatttccagttcaaccaaattcttatctgaatgactgcaaatgtggataacgtgaaaccacaaaaacagtaagttccaaagaaattaaacacacataagcgagatatcagtagatgagactcaattagataataatcatccatacacatacactttagcgtgaaaagaagacctcctatactccagaaattccgagtatagccatgctatcataagaggaatgactccaagcagaaacgaaacctgcaacagaaagaagaacaaaagaagaaagattgagaacaataacagtaatccaaaaaaacccacgaaagttgtgttctttcagccgaatacaaaatgtaaatctacgcaacaaggttcaatccaaatcttccaaactaaaagaaaaagtacgttgcttcaagctgaagaaaacacagagtggctgaggtagaagcttagtaagttattagtaattgaaaacacttgactcaatgttgagacattacaatctttgtaaatgaactattatagatcattgtgccagcagatcatctggtgggataatcaatctcaccactctactttacacagccaacattaatctaaatctagcaagcaaccgatgaactgaagaatgaatcaaccacattcatataaaggagaaagatagagagtcctaatcacattaagctacaggccaattcaatcaaaatctcaaaatccgcttcgggaagttggagaagaatgtaaatcgaaacttgaatcaccgaagatcatgaaaaattgtacctgaccaggcgtaattggctgtgacacaaccatatctactggatccataaaggaatacccagagattcaaaaactagatactgcaatatacactccaattgcaattagtttcaatctaggggatgaagagagagatagacagagttaattggggcagtggcaacgaagaagaagaagaagagatctgaagtgaagaagctattgcttcaaggaagaagaaaatggcggacgcgacgtcgttttcgtcaaattcaatcgtacggttggttggtttggcgattgcctctcctctaattgttaaattattaattacttattaattactaattaagtaaattacagaggtaatctgattgtggttatacgcaatttacagctctcactgcacacaaacttttctttctaatcgcaatgcctttgcttacagaaatgcatgcatttaggtttggttttgacaacatatttgtgtatctaaagaggaaaaaaagaacacaaaaacattagtgtggatttgcctatagataaacaaacgtagtggacctttctggtaggtgagggataagttggtaccaaacatcaatgttcacatatttgtttggtgttaaagcatttggaaaattttgcatccatgttgaaacgtcaaacgtgtagatgtgatgacatttaaatgtctttactctttattgggtttagatttcatttcgtcaaccaaacccactccttgggcccaaaggtttccacattatcatcttaaaccctaagggggccactagtaagtggaaacaaacacttcgtcgaatgcgcatcttctctacattcgtctttcatcgcagacaacaaatcttcaatcttcgtcaattccaaaccaccacaatccttcgcaacccaatctccatcgctccgatccagattccgatggacgccaccgagcagtctctccgtcaatctctttccgagaaatcctcatccgtcgaagctcagggtaacgccgtccgagctctcaaggcttcccgtgcagctaaaccagaaatcgatgctgccattgagcaactcaacaaattgaagctcgagaaatctaccgtcgagaaggagcttcagtctattatcagtagctccggtaatg

SEQ ID NO: 31716 - DNA, 3000 bp, Unknown
  misc_feature (1)..( 3000): 2750-1469P.txt file - cDNA_ID_3045209; gDNA_ID_1971757; Annot_ID_175352
gtgccaagatcagggagtatgggatcactgctccagacacgaagaatccactctctgatccttacccgtttaatttgatgtttcaaacatccattggcccatctggtttgattcctgggtgagtatttttcatgttataatcatttctgagccactttctttcctgagtttgttatcaaattactcctcttttgtgtttcagttacatgcgtcctgaaactgctcaaggtatttttgtcaactttaaggacttgtactattacaatgggaagaaacttccttttgccgcggctcaaattggtcaagcctttagaaatgaggtaatgtattactttgcttgatgtatgggatgtcttcatctcaatcttctttaagaaattcttttctgcattatgtctgggttttaataagtagcatattactcgcagatatctcctcgacaagggcttcttagagttcgtgaattcacgctggcagagattgagcacttcgttgatcctgagaataagtcacatcctaagttctctgacgtagcaaaattggaattccttatgttcccaagggaagaacaaatgtctggccaatctgccaaaaaactttgccttggtgaagctgttgctaaagttagtatttgtaatcatattcgcctacttaattctactaagaactcgcacacacccatttttatatcttattgatgcctgacactgaaatcctattcgtatagggtactgtgaacaatgaaactctaggatacttcattgggagagtgtatcttttccttactcgtcttggcattgacaaggaacggctgcgcttccgtcagcatctagcaaatgaaatggcccactatgcagcagattgttgggatgctgaaattgaaagttcatatgggtggattgaatgtgttgggattgcagataggtctgcttacgacttacgtgctcactctgtaagaacctcaccttttacttctattttcatcatttcgttttacagctagataattaatgatcaaaacccgtaagtgttcctgtttaaattcactaaagtatattgttgatcaactgttgcgcgacaggacaaaagtggtactcctcttgtggctgaagagaaatttgcagaacctaaagaagtagaggtattttagtgaacagattcattcatctctgtctttattacttgtccttaacatggttatcttttatatcagaaacttgtgataactcctgtgaagaaagaactgggtcttgcattcaagggaaatcaaaagaatgtggttgaatctttggaggttgaactcttaactgttttactgaataacttttttttttaataatatggtgatggtttagaataaatatcatgcttcgtgtaatgttttgttaggcgatgaatgaggaagaagctatggagatgaaagcaaccctggaatccaaaggggaagtggagttttacgtgtgtaccctaaagaaaagcgtgaacatcaagaaaaacatggtgtctatatcaaaggagaagaagaaagagcaccagcgggttttcactccatcagtgattgaaccatcgtttgggattggtcggatcatatattgtctgtatgagcattgtttcagcacaaggccaagcaaagcaggggatgagcagttgaacttgttccgtttccctcctcttgtagctcccatcaagtgcacggttttcccgcttgttcagaaccaacaattcgaggaagtagccaaagttatttccaaggaactcgcctctgtcggtatctcccataagattgacatcactggtacgtaaaaacaagttgagaattgaagttttttgaaatattgaaatggatcaaatcaagtaaagatttgttgtgtttgtgtgtgaacaggtacatcgatagggaagagatatgcgagaaccgatgagcttggagtgccatttgcaataacagtggactcggatacatcagtgacaatcagagaaagagacagcaaagatcaagtccgagtcaccttgaaggaggcagcttccgttgtgagctcagtctcagaggggaaaatgacgtggcaagacgtctgggcaaccttccctcaccattcttctgctgctgcagacgagtagctagctccttgtttttttccgaattaaaaaccaaagtgttaaattaattgttgctgaatctactcatttttaatgttttgtttcttagtgtcacgtaaaaagttcgataccagatttggagacgaagtggctataaagtataaactctctgttatattttcgtccattctactgctaattttctaaattttggtcacaaatttcagtccatccagttatggtctgaattgtttgtgtttgcattaagaaaaaaaagtatgaaggatcattgtttttacagtttgctaaggattacaaagttacaagttagagaagcaaagagttgacgcatccttgggcagttggtagcgccatcgtgcatatatactgactattttaggttttagtttagatgcagagatggactaaaccagaggaaagcacattcaaaagtttttgatatcgaataatgggttagttaaatccaagttttatgataatgcagccatgcaggcggatagaaatctcgatcttggaggacgtaacacaattaggcaagttatgaaggaaagtaagattatcaatatttatgattttatgattgttatttatataattaaatacaaataattaatacaatagactataggcaagatatatttaaaaaaatatttaattgaaattacaattaaaatgtttaagaacgaatagagattttatatttttttttaaaaactcatcgcttgagcaccaagtttcgcattgtaataaaaatcctaaagtaacaaaaccctgctgaagtttcccatattaaaaccctagctagaccaaaattgtgagcggacaagttcacacttttcttgacgattccaaaccactttggctccgattcagatcccgatg

SEQ ID NO: 31717 - DNA, 3003 bp, Unknown
  misc_feature (1)..( 3003): 2750-1469P.txt file - cDNA_ID_3045249; gDNA_ID_1971772; Annot_ID_175395
agctaaggatgatgcatttcttagggtgtgttctcgggtgggcaagaaatcgcggtgaaaagattatcgtgtacttcaggacaaggagacagtgaattcaagaacgaaattttacttcttgcaaagctttcaacataggaacttggttaggctattaggttttttgcatagaaggacaagaacgaatccttgtctatgagttcatcaagaacgctagtcttgacaatttcatcttcggtaaattgttttccgccgttttctccatatgatgatcctaccgttctgttttttctgctctgtgttgatctttacgctgttacagatcttaaaaagcgtcaacttttggattggggagtgcgatacaaaatgataggtggagttgctagaggacttctttatcttcatgaagactctcgttaccggataattcaccgtgatcttaaagctagcaacattcttttggaccaagaaatgaatccgaaaatcgcagattttggattagctaaactctatgacacagaccaaacttcgacacatcgatttacaaagcaaaattgcaggaacttagtaagttacttcatcttactaactcattaaccaagaaacaccggtataaacccgttattcatcttgtagcgggtatatggctccagaatacgctatttacggtcaattctcggtgaaaacagacgttttcagcttcggtgtattagtcatagagatcattacgaaaacaataatggtcgatcaaatgatgacgaagaggcagaaaatctccttagttgggtaagtacacaaaaccaaccaggtaattgaggtttgagtttgattcatcatgttaactgaatttgtaattctgtttgtttctcaggtgtggagatgttggagagaagacattatactaagcgttattgatccgagtctaaccacgggatcaagaagcgagatcttgagatgcatacacattggtcttttatgtgttcaagaaagtccagcgagtagaccaactatggattcggttgctctaatgctcaatagctattcctatactctcccaacgccttcaaggcccgcctttgcgttagagagtgtcatgccttcgatgaatgtttcttcttccacaagaaccgttattaatgtccttgaatgatgtcactgtttctgagttatctcctcgttaggaagcttaatctgcatatctttttagtttctttcaatgatggattttgtttgtgtgattttttagacagcttggcttcatctagcttttgaaacgagtagaagttatagctttttcttttagttctacacattcgtcgttaatggtagatttgttttgcaaattcgattttactgtgttttaaaacatataacatgaaatttaacttaagaaaatgaaaatagtattagacttttactaagaaaagctttctactttatcctacacatgaaatgcatacacattggtcttttcaaaagcaacaaatcaatgttaaatacagttttctttatcttaactcctaataatgtagctatagaattcatgactaagcattgtggacccttggagcatttttagatggagatgggtgtttgtttctttattaggttttgttgcctagtagccacattctctcagttaaactaatacatttgtaaattttcacttgtaatcaactaatccaccaaatgaatcaataatgtaaactccagaatcgatctggcattgtatgagtatcaatatatgctttagtgccacttgctagtgcaatccacttgaggtttggctgcatcgatattagatataaatacttaagcgttcatgcaaaaaaaagattactaaataattgtagggttattatgggattttaggcgagcaaacaacatttaaactttgaaggaatacaatttgaaatatcaagatacgtaaaatatgtcacgtgcaataaaataaagagaagacccatccaaatcaagtgtgcgatactttgaccatatgagtcaatgtggcgagctcaaaggcaacaagcatatctaatctaagtattatataactaagcaaatattccactaaactagtatacaaagccaactgctccactaattgcctgacatacttatttatttttcaaatttggtaaccacaccatatagcttatacattttcttcgatggccttatacaataggaatatactattaccttctcattgttcttattatcatcaaccatttgataaatcctcatcactcttaaacattgactatgaatctaaggacgtcagaagtagtccatacaagatatgaatggttggatcgtcctaagtcattgtattaatatacgtttctaatcaatggaaactatataattgtaatataatttttactaaatcatgtaacttgaaaacctaactttctttcttaataaaaattgaaccgctaaagtatctaatccatcatgtgtcaactgacaccgtccaaaatcctcttagagatgtaagaaaaagtttcaaaacaattaggtcagccaccaatcacatatttctatgcagagttgtataatcttgaaaaagaacaaaaaaagtagatgacaaaaaagaattaaaagacaataataataataccttaaagatgataataaattcaaacagtttgacctttttatttcaattctctggtccaactttccaacctgacgagacaaaaatatagaaacttctcaacagcaataaaacagcaacctttcctttttgtatcccttctcctttgtcacctctcctcttacttttttatcaataggaagtttccgccattgtgacagacacagttcctctgtttctcttctttcatctttaagcaaacctcaaaaaccaatcctttattacgaagatcctcacttgtgtcttcttctccaacactaaaccccaagaaaatgagattcttccgcaaaacctcactttatctttctctcttcttatacttctttctttatgaatcttccatg

SEQ ID NO: 31718 - DNA, 3000 bp, Unknown; identical to SEQ ID NO: 8355
  misc_feature (1)..( 3000): 2750-1469P.txt file - cDNA_ID_3045269; gDNA_ID_1971772; Annot_ID_175388

SEQ ID NO: 31719 - DNA, 3000 bp, Unknown
  misc_feature (1)..( 3000): 2750-1469P.txt file - cDNA_ID_3045272; gDNA_ID_1971772; Annot_ID_175387
aacattgaatctgctgttcttcaatgggatgattcccgattttcctttttaaatatccttattttttacattcaagccacacaaaagtatgatcattaacaaggtgaatatgtatcgtaagtcttaattagtctattgtggtctgactaggaaaatataaaccttttgttaagtcctacaataaaacgtattcaacaattccaaatattatccatgactgaaatacataaagaaaaggtttaaattttatctagaaaccaggaaaaaagacaacagtaaacaaacaattaaaaaagaaaagactttgaaagaaaatccaaaagttgtagaagaaaagacttaaataaacacaaagagaatccaatacgctgtcgtttttgagcaaagtctctatcgacttttttccttccgttaatcaagccatcggatattaaataattacaaaattattttcagacaaaacacggacgcgaaatcaaccaattaaatccacttctctctcaccatctcacgtccgatctctcctctctgagctctcatcacgagtcaacccctttctccgtcgaaattcgcatgcttaaactctgagagaagaagatgactatgacggaggagaaaccaacttccgacggcaaaggaggttggggtttcttcaagattccatttcgtaactcaagcggtcacagaaacgccgcttcaagtgctgctacttctccgtttccatctggagcttcttcttcttctacttcttctcatctacataaccatcatcaacatcatcatcaacatcaccatcagcaccatcatcagcttggttataacggtcctcacggtgatggatcgggtcaaaatcaacatccgactccttctccttcagtttcatctgttgctaagtcttttcttcctactaaacgaagattgaagcttgatccttctgagaaactctattttccttgtgagcttttttcgaatctcattttgatcggagtagtttctctggaattacagtctttttttcattgtctagggtttgtttctgaagatttgagatccattgacactagtctaaaatttctatcttttagtagaatttgagtatttgactgatctgattatgtggattgatacataagtttgataattgactcaataggaaacataaagtttgaaactttttggaagttaagagcagaatcttgacattggattataattctaacttaccattactctaaatatggtcttcctttaagcattctgaaattaggagtcttttatagatacgaatgattttagctatcaaatgattttgcaggaaggttttggtgtatacttaggccatgtttttttttttcttcatgatttgattttggaagtttagattgttttctgttacaagtaatgctgtggagtactgaattagattattactttgattttgaagatgagcctgggaagcaagttaggagtgctattaagattaaaaatacaagcaaatcacatgtagccttcaaggtttgttttttgatctaaagcgttttggttattgggtctttggcattattgtatatgagcttactcgttgctctttcagtttcaaacaactgcgccgaagagttgctttatgcgtccacctggtgctattcttgctcctggagagactattattgctactggtatttgttttttttgttttctcgcctctgttcttattcttcttgatgaggctatcagaacaatggcttattcaatgtttctctgattgaaatgtgcagtgtttaaatttgttgagcctcctgagaataatgagaagccaatggatcaaaggagcagagtgaagtttaaaatcatgagcctgaaggtgaaaggtccaatggactatgtgcctgagctggtatgttgatcttctgatcttatctattagctgatctttgaacatgaaaacagtagtaacatatccgaatccagatagaacataagatattgacccatctctaaaacataagatatcaatgactagactaagaattgtgttttggtctgagtagaggtttccagttaccttttaaggcacaaacatataaccaagcattccactgaatgctgtttccatctaaagacatatcgattgcttttgtttttgtttttttctcagttcgatgagcaaaaggatgatgtctctaaggagcaaatattgcgtgtgattttcttggatcctgagcgctccaaccctgtgagtatccgaataattttgcttatgatgacgattctattattttacgacctccctctttaataatctatgtgataaatgacataggcattggaaaaactgaagcgtcaaattagcagaagcggatgcagcggtggaggcacgaaagaaacctccagaggaaacaggtccaaagatgattggagaagggcttgtgatcgatgaatgggtcagtctcatttgctatccagtgtctcttccattagatgattgtgaaaatctgacattgtttttgtcttacctctaataaaaaacacagaaggagcgtagagagagatatcttgcacagcaacaaggcgaaggagctgactctgtctgagagactaaaagagttttctcaggacaaaaacaagtgcgcttgtgaagatgaagaagaagggaccgctatattgaattttatatgctaacttctagatttcatgatgcaatatataaggatcatgctggtaaaaaaaaaagacaatgaaggaaacttttttcatgtaaaaaagaaatgtaaacttgggtttgatgataatgaattgttcatgttaaggactaataaaaacagagaagaaagtgtactaaaatcgaaatttgagctctccaattactaaatcggtgctaaatgaaccggtcggtcgtttctatatttgattcgttcggtttatcctttaaccggtcgaaccgaagcttcttttgttcgtatgaagaaaactaaaatccaaatctctctctggtacaccatg

SEQ ID NO: 31720 - DNA, 3000 bp, Unknown; identical to SEQ ID NO: 8352
  misc_feature (1)..( 3000): 2750-1469P.txt file - cDNA_ID_3045275; gDNA_ID_1971772; Annot_ID_175386

SEQ ID NO: 31721 - DNA, 3003 bp, Unknown
  misc_feature (1)..( 3003): 2750-1469P.txt file - cDNA_ID_3045279; gDNA_ID_1971772; Annot_ID_175385
cggttggcttgcaggaggttgaagatgcacagagaattcgtagtactgtcattgattcatttgagaaggcaagtttacctggactaaacgaacaagagagaaagagaatgctacattttgtagttgttggtggtggaccaacaggtgttgagtttgcttctgagcttcatgattttgttaacgaggatctagtcaaactatatcctaaagccaaaaacttagtgcagatcactcttctagaggctgcagaccacatcttgaccatgtgagattttcttactcttaaacttttgatctatatcgaagattagctcatgtcctatggtttgacaggtttgacaagagaatcacagagtttgctgaagaaaaatttactagagatggtattgatgtgaaattaggttctatggtggtcaaagtgaatgataaggaaatttctgcaaaaaccaaagcaggagaggtctcaactattccttatggaatgattgtttggtcaactggtattgggactcgtcctgtgatcaaagattttatgaaacaaattggtcaggtgagtagccaaaggtctaatgataatgctcatattttttcatagtgaacgagctttatcaactcggtctataagatgatttcttgtaaattccagggcaatagacgtgctttagcaaccgatgaatggcttcgtgttgaaggatgtgataatatatatgcacttggtgattgtgcaacaatcaaccagagaaaagtcatggtaaccaaattcagaacctagataaaaatgagctcgcttgtgtatagggtttctctgtttcttatactttggattgttatggcttttgtacaggaagacatagctgctatattcaagaaagcagataaggaaaaggaacactgacaatgaaagaatttcatgaagtaatgagtgacatatgtgatagataccctcaagtggagctctacttgaagagtaaaggtatgcatggcattaccgatcttctaaaacaagcacaagctgagaatggttccaacaagtctgtcgaactcgatatagaagaacttaaatcagctcttttgtcaagttgactcacaagtgaagctttctaccagcgacaggacaggtttgttctgtttttacttacttgaaagttttatcttcggtcacaaggtcacacactcacactcacacactttgtttgctttctcatcctttgtctggtggctttataaaggtcgctgctcaacaagggacttaccttgcaaaatgctttgatcgtatggaagtatgcgagaagaatcctgaaggtcccattaggattagaggagaaggtcgtcaccgcttccgtcccttcaggttggttcctagtatctgcatcttaggaggctttagtcacttttgagattgcatgttttgtgaatttctcaatactgattatatactttatagtaaggagacatgagacaatgaatatatatgttatacaggtatagacatttgggacaatttgctccattaggaggcgaacaaaccgcggcgcaacttccaggagactgggtttcgataggacacagcagtcaatggctgtggtactccgtttacgctaggtaacgttaaatgactaatgaaatacgaaatgtattcatatgatttttgtatttttttgtaactttttggttacaagtttttgtttttaataatacagtaagcaagtgagctggcgaacgagagtcctggtggtctcagactggatgagacgattcatcttcgggagggattcaagtcgcatttgaaaatctcatgtctctcttactctctcgtttgaattatcatggatagtcttattgctttttgttttttactttcaaataaaagcataacaacgggaagatgttaaacttcatttggttacttctgtttttggaattggtacgtgaaattgatatatttatattgctggagattggagtataatttcacaaagaatataatctactgcttttcttatagaataacgtttaacattacaagatatgtcgcctagctagtcagaaaaaaataaaaataatacaatgttagaacttttgttgtccttagattttgacaattaattccctttacatgatacagtatcaattatgggagaaagaaataggagaatcttctggcaacacgtaatacttaaattgttcatctttctattagtaaaactaaaaacaaaacctaacctaccaaaccactactctccttgacctcgactaaaatcgcaaacttacctataacttcttttctaggtaaaaggcaaccaaaaatattaattcaaatcaaccaccatacactcccgattcatatcgttaaattttttacacgttagcctgctagctaggatactaaaaataataagattactttatactaaggataaaaatgatctactattttttagagtgaatctaccaattaaaaagttttcaaaaataatgtatattgacttatgtgcctggattatttacccatttttgggtgggaatctaaagattttatttccaatttttctcaaatctctatgtattattttttaccacaaaaatgaattatcattttaagagaaaaaaagaagagaaacaacaattgacttcaaacattgttgtatataacatattccttcggttacatttcaagtgttgtttaagtgtcttacacatatataaagaaacaaacatagattgcgtaattttttttgtctttttttccattaaaacattcattcattatttagaaaaatatattcaaccaataacaaaacagtctgtctaatactaacagtcaacaaaaatatataaagtaataaaaattttaataggatagtttccctaaaacaacattaaaaaaatttaacaaaatggagtaacaacagttcatcaacttctcctctttttgtttatataaacacacattaacgattcataagccattgtctactaacaaaacagaaaaagactaaaatg

SEQ ID NO: 31722 - DNA, 3003 bp, Unknown
  misc_feature (1)..( 3003): 2750-1469P.txt file - cDNA_ID_3045289; gDNA_ID_1971772; Annot_ID_175382
gcaaatttgccccatcaggccacaagatggaggggattctaatggctatggagtgccagtccctgaagaaggttagcttttccatctagcatttgtatgttgtggcaaatgctgtaaaatatgtgtgaagtaattttgtgattcatggtgtgtttattggaattgtagattcgtatggtgcgagtcttctagtgaatgagggtgaatctgtctatgatttctgttggtatccatacatgtcagtttcaggtaatagataagctcatcataaggggttcaattttttggcttaatgatttcatcagttgaattactgattttggctgttcactgattgatatcagaccctttaacatgcgtcttcgctacctccactagagaccatccgatacatctttgggatagtacttctggtgaggtgctgattttttccatgaaacttaacatgtttactggagattttttctaccatccttttttgtttatttacatgtgaataacacaatgtcagcttcgatgcacataccggctctatgatgctatggatgaaataactgctgcattttcagttggattcaatcctgatggaaccaagtaagcaaaaacttcatctaagttgtatccatcttcccacacggtaaagaattgattaaaagtggtctatgttcatttgcctgtgttatgtctttaggatctttgctggttacaacagctccatcagagtgtttgatcttcatcgtcctgagaagagattttagagcagtattcaactctacagaaaaacaaagagggccaagcaggtttttttctttcttttccactcagacgctgcataacaatattattacagattatacagaaacaagaacaaccttaactggttcataatttccaggtatattatctactcttgctttctccccaactaattctggaatgttggctgtggggtcttacgggcaaactactgggatttatagagaagacaacatggagctattgtattgttttacatggtcaagaaggcggtgttacacatgtaagcattgaccactaaatgtgccttaatttttgtccattgggatatgatcaattattgatcgaatttttggtgcttttaggtccagttttcaaaggatgggaactatttatatacaggaggtcgcaagagtaacatactgttataaacattttaccctctgaatgttgagcatattatatcgcaacttgacttccattttaaggataaccctttttggaggaaagtatcgtctgtccagagatattctcgttggtgtccaatattagagtatgatatgtaataggatgatgaattgtcctaacctcaccaaaaaaatgtttctttttttgtttgctctttttcaggatccttacattctttgctgggatattcggaaatctgttgaaatagtctataagtgagtatttacttctttattttggtttgggtagtctttggtttctaagctcatacttgttttacaatataatctagaagcaagaacaagtgctgtaaacaagattaatgcttaatgagccatgagcagcttaagattaacgttacatcaatgttcaagttaatagaagtcttagcttgagaaatggtagatgttgaagctcttataatgttgacatgtgtttgaaatggatcatttatatgtgtgatcagattgtacagagcaactgagaacacaaacagcgtgtattctttgatattgagccatgtggtcgacatttaggtaccggtggtcaggtacttttgatcttcctatcctttctaatgcctgagcttttgtttttcattaactataaaactgcaagcaatcttttttcctctgttaacactcttatggttagatcatgtaaccattttctcattcctctttgtcttgtattccaggatgggcttgttcacatgtacgatttacaaaccggaaacttgggtttctggatatcaagctgctttcaggtagctaatcacttagttcttcagtagcttctgcaattgttgatgagatcctgactttggcatattactccattcgattaatgcagataccgtcaatgctttcttctttccacccttaccttccaatggctgctacatcctctggtcacagacgtttcgcaattccagatgatgacgatggtgaagataagaacgagcttcaattgaaaggtacattacactaaaacgctaattagttcctctcccatcaatgttaaagaacacaatctaatcgttcctttctctttttgctcacacagctgatgagaactgtgtatctctctggagtttctacgtagaggacaatacttatgatgaaaacaatggcgttgcaagcgagtctcatctccaaaatgtcaccgaagaaatagttttaacataaattttaatttttaaaagctacgttagaaaaaaagaatcgaaacaatattattttattagtcttatccaaagcatattcttaacaaaaacaaaaaacaaaaaaaaaacaaattcccatacttatctccagatgtttcagaatccgatgagctcaagtgggactcttctattttaaaaaccacaacccttcctctgctcattaaattcacaccgttcaagctacctaagcatacacgtcacaacaatcaatggacaaaacactcattatgaacccgcacactcatgatatttcctcccgaataaagtgggtttatcttgtactaactgactgataccgaagaagcttaactcaacttggactgatcgaaacacaaaacgccaatgacggctgatccaataacaaatcaccacgtgtcgaatcggagcttatattcttcagcaaatctctctctctctttttctctactttgctctgtttttggcgttctaaatgatccattatctccatttcatcggtgaattttgttttctccagtgctgttaaagtagttgagtggttctcggagaatctgtttctcaaaagaagcacaatg

SEQ ID NO: 31723 - DNA, 3000 bp, Unknown; identical to SEQ ID NO: 8351
  misc_feature (1)..( 3000): 2750-1469P.txt file - cDNA_ID_3045295; gDNA_ID_1971772; Annot_ID_175380

SEQ ID NO: 31724 - DNA, 3003 bp, Unknown
  misc_feature (1)..( 3003): 2750-1469P.txt file - cDNA_ID_3045299; gDNA_ID_1971781; Annot_ID_175416
atagacgtaaggtggagacttgtagacgtatggagacggtggtggactgtaggcatatggtggtggtgaactatagacgtaaggtggagacttgtagacgtatggagacggtggtggactgtaggcgtatggtggtggtgaactatatacgtaaggtggagacttgtagacatatggagatggtggtggactataggtatatggtggtggagaactatagacgtatggtggtggtgatggtggagagtatgggtattgagcacttgtatgcgcagcaacggcatacaaggccaatatcaccataagaagagatggccaattactcggattagccatgtcgattgaatgtgtttgctcttgtttctagactcaggttttgttagtatgtttcttactttaaacccgatttatttttgaatggattgtaatagaaagtaaacagtttatatagcttacattaggccaactagaatacttgtttattgaactttaaggaagcgtcttagagcaatatcttatattgtttaataagtcaacttaactagtttctgattttgtctataaatctgaagaaaaagtcgagaagaatatgtctttggtaactacctctaaccatactttaaatttaaatgtgtcaacttttgaagttgtcaatttaaattcaagacatttaagagtgtttctttctgaattatctatcaccgaatttgtacactagttctatattacatcttgtaattttaaatactaatgttatcgtacatgactcataattttgagtttttcttttgagttaatttttccaaatggtgataactttgacattttatttcgtaatgtgtataatacaactaccgattttcattttttttaaaaagaatattacttacactaaccatttgatttggtttagtcataatctcttcatatttcagccatctggtcgtcgtccgttatatggaccttttcttattctatcgttttaacattgtaattaccgattatcttttttgttgaataaattttaaatgcttaggacaaaactaatattacatgttgtggtttcggacctggagagattacaggcttcggcccaaaacttccttgtattaaaaaaaaaaaaagaataaattttaaattctaaataaaaaagatatttactaaggatttttgtgaaagcaatactaattgcattaacattcatacatgatttgtataattgtttggagttgggtaagatgctcgacttccacattagggaacaaacaaagctagattaatgcacgtctagtgaaagatccatccctttgattacttaacttcacattagggaaaaaacaaagctaggttcatgcacttctagtgaatgatccatccctttgattacttaacttcacatttagggaacaaacaaagctagattcatgcacttctaggtgaaggatatcaggatatgccacatttctatcaaagaatacggttaagaaagtctataggaggacaaaaatagatatgttttcccaaaaaagattcaaagctcaagttaaatggaacaatgagttagcaaaaaatggtttaacgggaggagaaatagtggtagtgtcaaccaagtcgccttggtccagtagtaaagagaggtaattcctgtcacatgggttcgagtagctttggccactgggattcgagtaatttaacatgggttttttcgggttccagaattagtctttggacctagaaaccctttaagatcacctgaattatcaaaaaatatatatatagtagtagtgttgtgtcctatgttgaaaagtaatatggatcagctttggaattctccaggaagcaatgggatcatgtgggatcaaaaagaataataaagagaccacgattgggcaattactaggcacttatgtcattgaggtgattagtggatcataagattatgcctactgttatcctcaatttgaccgtatactattttcttctcttttagccatccttgaatacctaaccgaggttcaagaatcagtttatgctttcatgttgggttgacctttgttaaataggttatctagtcatgaagagcgaatcaagccaaactcttttttttttttctctttaattaaaataggattgtctctaaaataaaattttacctaatccccgattttgtaattttacttttcatctcaaagaaatacaaattaatattacaaaataaaaaaaaatatgaaatataacccgtcaccattaccatcaagttttcaaagttttaacgaataatatatcaaatcaaaactttcgtgatgcagaattcaatctttagaattttaaacatctaatacatatgatcgtaataaattttagaatatacatataaaaatgcatattattttttacataataatatcgatttccgttgtttactatacacgtagcaagacctaaacagttttaatctgatatagcggaaactaattttggcaccttagacaattgattggtcaattcaaccctcaataagcccaagtggaaagacaaagaaatttagggtattttgtcgaatgagacataatcaacttgactgctccaataaactgttttcactagatgatggatagtagttctgttctaaacatggttaatagagatccaaaacccaatttctctatggactttattggtgcaactctttaagtgaaattgaaaccttacttcaacacatttcaaatgtatctacctaattaactctttatataaaattaaaaaaaaccttagtgcataagtgggtaggtgaacttgagtctcttggcaatatgtaaagaggcgaaatcaaagttgatcaacaattaaacacaaaaacccttaagttgacgtggctgtatctcttccaactcttaaaaatcaattactattatacccctcagaaaaatggcagagcgtgtgtctctcacactcaacggaaccctcctttctcctcctcccacaacaacaacaacaacaatg

SEQ ID NO: 31725 - DNA, 3000 bp, Unknown; identical to SEQ ID NO: 8371
  misc_feature (1)..( 3000): 2750-1469P.txt file - cDNA_ID_3045316; gDNA_ID_1971785; Annot_ID_175451

SEQ ID NO: 31726 - DNA, 3000 bp, Unknown
  misc_feature (1)..( 3000): 2750-1469P.txt file - cDNA_ID_3045327; gDNA_ID_1971785; Annot_ID_175453
ttacttttccttgtgttaaagctgacctttctgttttcataaattaattgtaggtgaatgattttgtgtatgttttagcggagcaacataagagacttgttgcatatatagaagacctttatgaggattctaaaggcaagaagatggttgtggtacgatggtttcacaaaactgaggaggttggttctgttttatctgatgatgataatgacagagagatatttttttctcttaatcggcaagatatcagtattgagtgcatagattacttggctactgtccttagtcctcagcattatgagaaatttcttaaggtgccgatgcatgttcagacagtagctttcttctgccagaaattatatggagatgatggtttaaagccgtatgacattacacaactagaaggttactggagacaagaaatgcttagatacttgaatgtatctattttaaaatcatttgaaggtgctcaagcccctggtactgacccaggattaaaagctccattggttggttgtgttgggattagatcaaggaaaagacgccgtcctagtcctgttggtactttgaatgtatcatacgcaggtgacatgaaaggtgactgcaaatctagtccagattctgttttggctgttacagatgcttctatattcaagggtgacgaagatggttcttcccatcacattaaaaagggttcacttattgaagttctttctgaagatagtggcatcagaggttgttggtttaaggctctggtattaaagaaacacaaagataaggttaaggtccagtaccaagatattcaggatgcagacgatgaatctaaaaagctagaggtacacattttaaaacccttgctttggtttcgtacctactgcccagtttgataacatgtttttgttgcaggaatggattttgacatctcgggttgctgctggtgatcatctgggggatcttagaatcaaaggacggaaagtagtaagaccaatgctgaagcccagcaaagaaaatgatgtatgtgtcatcggggttggtatgcctgtggatgtgtggtggtgtgatggatggtgggaagggatcgtggtgcaggaagtttctgaagagaaatttgaagtttacttgccaggtgagttaagacacctctgaatgcaaatttttattgcagttgaagatctatctatatactattttgtgtgactaattattgttgttttggctgttttctctcaggcgaaaagaaaatgtctgctttccatcgtaatgacctcagacaatctcgggaatggttggatgatgagtggctaaacataagatcaagatctgatattgtgagttctgtcctatctttgacgaagaaaaaagagatggaggtgaaacatgatgagaagtcgtctgatgttggtgtttgtaatggtaggatgtcaccaaagactgaggctaaacgcaccatctctcttccagtagctacaaccaaaaagtcactacctaagcgaccaattccagatcttctaaaagatgtcctagtcacttctgacttaaagtggaaaaaatcatcgaggaagcggaatcgagttgtcagttgctgtccacacgatcctagcttgaatgatggtttctctagtgaaagatctttggattgtgagaactgtaagttcatggaagatacttttggctcttcagatggacagcatttgacaggtctattaatgtcgagatgatcatcagcttggacctagttacttttcttcttgtgaggtacatattaccctgatgggcatctgctcaatgcgattttgggttttaagattactggtaactcgcaagctttcttgggatggattataggattagctcgtaatggcatccaaattcgtttgtgtacttatgttgtgacagtagggcatagtgctttaattcaatcagcaaaattttggatgcagtagaagtaggtaataataacattacctcgctagtgttttaggcttaatcagtgtttttctcttagaattaagttatcattttactctctttagcatagagatgattcgttttctttttggtctggtgggatctttcttttcatgtaacctatgtaacattaaataaaattatcttgttaccttgatctcaacttcattgtctatatgatacgtacctttcttacttgttgaatgttatgaatagcttctgcataatttgatactcgaagttgaggacacttgattatcttaatggcacgtaagttaagtatgtccatgtccatgtgcccatagggttttgttttgtgcagcattccaaaggggaccaacaaataaaattgatgctctttggttgttagttgtaactagctggtaacaattgatgttttctggaatcgtccaacaagttttgttatccatagtaagagcgcttgttataaaccactaacagtgatgaaagttgagtgtcttatcttacaccattttaaacttttacctattatcatctcttgttgtgctatagatgattggcttaccaaaaggtagggtaaggtgaaaaaggtaagctatttaaattcgtttaagaccaagtcagaatcctccaacttgaatgattttggtggggttgcattttggtgagtgaagcatctttttcaaacaatgtagaggaaataaagaggagccaaaagaacttgactttcttactcagattaatggacactaagtcatggatccaaagcatatattatatctctattgtgtgttaacatgtctcttgagtctctaaacttagttttctccaaagattaaagcaaaagcaaagatgggcttcctctgtcactagttttgctaactcatccttttcggatagcgacactcttcgtttcccactcttggtttggtggtttctttaggattctagatttttgttttacttatctttccttgtacaagagactgtttctataggattcttcatttcctgttttatctatcttctctgtgcaacgagagtgtcatg

SEQ ID NO: 31727 - DNA, 3000 bp, Unknown; identical to SEQ ID NO: 8369
  misc_feature (1)..( 3000): 2750-1469P.txt file - cDNA_ID_3045332; gDNA_ID_1971785; Annot_ID_57985

SEQ ID NO: 31728 - DNA, 3000 bp, Unknown; identical to SEQ ID NO: 8376
  misc_feature (1)..( 3000): 2750-1469P.txt file - cDNA_ID_3045332; gDNA_ID_1971785; Annot_ID_175442

SEQ ID NO: 31729 - DNA, 3000 bp, Unknown
  misc_feature (1)..( 3000): 2750-1469P.txt file - cDNA_ID_3045336; gDNA_ID_1971785; Annot_ID_175440
cagaccacaagtgtttgtggtggtcctgtctttgaagagtttattcctatcaagaaaattagttccttgtgtgaagaagtacaagaagaagaagaagaagatggtgaacatgaatcttctccagaacttgtgaataataagaaatcagattggcttagatctgttcagctatggaatcattcaccggatctaaatccaaaagaggtatttaaagttttgagctttttaaaggagttttagttttcgattatgaggaaataatcatgtgttaattgaattataggagcgtgtagctaagaaagcgaaagtggtggaggtgaaaccaaaaagcggtgcgtttcagccgtttcaaaagcgcgttttggagactgatttgcaaccggcggtgaaagtagctagttcgatgccagcgacgacgacgagttctacgacggaaacttgtggtggtaaaagtgatttgattaaagctggagatgaggaaagacggatagagcagcagcaatcgcagtcgcatacgcatagaaaacaaaggcggtgctggtcgccggaattacaccgtcgattcctaaacgcgcttcagcagcttggaggatctcatggtaattacgattaattttaattacctgattatcttctatctgattggttcattagtgattcataatcgggttgataaagaactgtttttaaacattaaaacgtctcaacatttacattatattagtaagtaacaaagattattatcaacattaaaaaatgatttttatttgacattttatttgccaatcttgcagttgctacaccaaagcaaatcagggatcacatgaaggttgatggattaacaaacgacgaagttaaaagccatttacaggttagtgattaatgattcttatgttataatcacaagttcgtgaaattggtaattaaatgaaatgttactcaagttcttaaccattttttgtgtaatatttcagaaatatagacttcacacaagaaggccagcagcaacatccgtggcggcacaaagtaccgggaatcagcaacaaccacaatttgtggtggttggaggcatatgggtaccatcgtcacaagattttccaccaccgtccgatgtagccaacaagggtggtgtatatgctccggttgcggtggcgcaatctccaaaacgttcgttggagagaagttgcaactcgccggcggcatcttcctctacaaatacaaatacttctactcctgtgtcataatctgatagtcatactataatcatctcctgatgttgattttggtgtaggtttgaaaatgtttatgtgaatgtaagaaatattttcgtccgtttttgtttgtaaccaagaaatgttatttcctcggttggaaattttgaataaagtagacgaatgctactatgtagtatatacacgagataagtgaagactctttgtttttctaactttggatatttactaaaatatcttcttgtttttggtgtctaatttagacagatcttcgtgatgaatctgatggcaaaggttataattcatcaccttcgtaaatagtaaaatacaaaggtagataagagaatctaagatgaattgagaataacgtgcgtgaatggtgatgtagatatttggtgtgacaattagaagtgatttatttatggtaacgcttgcttaaaacaaaggtccatgaatcgaccaactaaccattcacagaattgaataccaaatctatctttttgcatggcaatttattaaaataaatctaacgtggccgcctctgaatcttgcttaatagaatagtaaccactaaccataatcaaatcattaatttagattttttattttttgtcggccaatttagattatagtatctttttttttttccttcacatatcttacggtaattgactcgaaccggaatttctttagaaaattcaaaaccagtttaataatcgggttcatggagaataaaaaggtcatgttctgatttttataataagtccttgttgactaagtccttgttgaataagtcttcctagattataggaaagtggacgattaaatttgtattatgttttgattttatatgttatagaatttcaggtcgataaaaattgtgacatttgcattgtgtctagggtctttcgggttttttttttttttttttttaacttgatttgtagggaggataatcttgggtctatacaagcaagacgaattcttacgtaattttgtttctttgttttgaataaaactggataaatcgtgactaggggctggagatcaataaatcgtgacttccctccaactgatacggattctacaactatttgaattttataaggaatttcaataacttgttcactttttaaatatacaatagttttgtacaactagtaaaaaatattcatatttccattataatcatttatcattccattctgcttttttttttgggttctcaattctgccattccaccatgtttcttatcggaatctaaataattaatgcattaagtagttgaagatgataaatttatttgtttccaaccattttgatggttaacttaaaaaacataaaattttaggtttggtggaaaaaagaaagggacacttggccttacgacaaagcgaagggtcacatgttaatacaacaatttcaggatattcgaatctctaatattggaatccctaatacatggctcactctctttgattcaaacataaactgcactcgtttatttaatctttgtttgacagctaaaaagatttttattttcgggttgataaacctataactcctccaacggacaaaatttactagatagatctataacttttcgtgggctatatataacttctcgtgggcttcgaggcccaaaaatgtttaaaagtgttgaaaaccaagacaaaaaaaaatggagtgaaaaagatgaaatccctaaattgaatcgcaaatcgcaatttgaaaaaaaaaagatctctctctgaagaatccgtcatg

SEQ ID NO: 31730 - DNA, 3003 bp, Unknown
  misc_feature (1)..( 3003): 2750-1469P.txt file - cDNA_ID_3045343; gDNA_ID_1971785; Annot_ID_175436
ttatcttaggattttttagaagcttctctctcttttttttttcttttacgccggataccgacgaggcgacgaccaccaaagatatatgaagatattaaaatgttggagaaggtttatggaattaacgaattttaaaaacattttaatcaacaaatccacaaagagtttaaaaggcgaagaattatatggtataattagtgaaggtactttggctttgcatgggaatatatggggattattctaaggcatgtgatgtgtaattcgattgacattctaacaactaagttttgaattcttcgccaaagtgttgtttccctaattacctttttttccatgtcttgacatttattgagagtgtgacatctcgatgatgccactgcacacataaattcgtaccatataacaaattttattatatagattaacatttttgtagattgaatttgtcaaggattaccacaatcaacgtggctaataactcgaacaaatataaaatatacgatatttgatcttagagtatgtatacctgattatatatatataagaaaagaaaacagaatagtgttttttgataagcaaaactgatattgttatgtatggataaagtgacatgtgcaatgtgttatgttgtcatggtagttataataaaagaataagaaattattgtttaaaaaaaattccaagtgtagatactatgagaaaaccccaaaatttttattaggtacatgaattagatataggtttaaaatctaatcactaaaactttttataacgactcccaaaattttggataagccatgcaattaaatttatcgaatagaattatctcatattggaaaaaaaatacgagtctgacgatcaaagatttagataagtcatgttataaaactttttttggttcttagacatcaagtattcacctctactcgtttttcttcttgtttaggcataaagagttcatcaaagttcactcaaattcacaacattcatgacaaaatacattgaataattttattctgatctttagcagctgttaagtatactaacacgttttacgaacttgtcattgttgtaccggactaagaaccaaaaaaaggagaaaccctacaaagaatgttcaatttatatgtgatgcccataagcagaagttgattaatagttagattctaaaacatctagcgacttaatagttaataattaacttaatgtagaacctatatgatgtttttaatttcctactagtttttatagatcgtacatatgaaatgggaccggtaatatgttaaccactcggtacttgtgaacggggaattatatttagttgaaacttgaaagcaaaattcatgcattaaatgatgttcaccaaactatacaaagccggtgccatgttttatgcattaaaagtaaaagttcctctaataaccataccaaaatcctagaggttataaagtaattcaccaaactccattaccactgagaacaataaaatgaactaaccaagtgagtcattaaccaacccaaactcaattttgtggttagcattagacaaaactataattaaaaaaatatataacaaaaaatatgtatatatttaaacatatttgaaattatgatttaattattttaagtgaaagtattttcgttttctttttttaaaacttacatttatattataaattttatcttattatttgaaaacttgtagatatattagaagttaaaagttttttttaattaaatacattaattagaagttagtttttttatagcctaaactcatttctgaaacctaattttaggggagtgtacattgttcatagccaagatttggcgtacggatactagacgtatacaaatcacgtttttaaaaacagagattatttcacctaatttctctaatccaaaatgtgaataataatgacactcttaaatctctaaaaatatatgtacactcaacgtataaacatataagtagtaaatcaatgtcaaataataagaaaatgaaaaaggtagagaaatcatgcataatttgattgattgatgcatcatctaatttatatgtggtttgacccgcatttggtgtcttggtcaccttctccgccatgacggcgcatctaatgttcctccaatcgattcttcttcctcctctgattctctcctctccaaaccaaaactctcacttttctttctgagattatctgacagtaaaaaatcatcctagattagaaactgtcagatcaatctcagtctttgtctctctctttttccacagtcctgtttttgtttctttcttcacacacagcttataattgatgatcatcaaaattcccaaaaacaaaaacttttttttttctttgtttgtttgggaaaagagtttcagcattttgatttgatgttataatatttcccagtgaaactatgacttgtccaaatcttggcactttctctctgtttttttcttcttcgtcttcgtcttcccaatttgtttggatgagatgagaatttttcgctataaaaaaaaacagagcatatcgaaaaatttatgagatctctctctctcactcaaaactctaaaaatctcaactttcttaaagatcataactttttatagatacccttcacctctcactcactcactccgatctctgatcttttcccgagaaaattcctcattttcccgagaaaactaaaaaaatttagataaccggaaaattgcaaacaacgaggtcggaaccgaccagtcacggtcttctctctgcttttctctgttcggttggtttcacggtactgtctttttttttttttttctcttttctttttctttttttccactttataaaaaacaatttttttttctttcttggtttcttcgttttaaattgttctcgcgggtatttaaaaaaagatttgtttttatataatttcaaggtttcttgaatatctgaagaatctgaaattgttttttttttgtttcagtaaaaaataaaactttgaggttcaatg

SEQ ID NO: 31731 - DNA, 3000 bp, Unknown; identical to SEQ ID NO: 21533
  misc_feature (1)..( 3000): 2750-1469P.txt file - cDNA_ID_3045357; gDNA_ID_1971786; Annot_ID_175497

SEQ ID NO: 31732 - DNA, 3000 bp, Unknown; identical to SEQ ID NO: 24401
  misc_feature (1)..( 3000): 2750-1469P.txt file - cDNA_ID_3045370; gDNA_ID_1971786; Annot_ID_175479

SEQ ID NO: 31733 - DNA, 3000 bp, Unknown
  misc_feature (1)..( 3000): 2750-1469P.txt file - cDNA_ID_3045374; gDNA_ID_1971786; Annot_ID_58004
tctcttgacaatgaggatcctcagacagtgttgaaatgcattataattgctgaaacccgcatatccagttcctctttggattctgctcacgctgctgcatttaatcgctttacagctccatgggttaactcaaaggtggttctcttaggagtttccttttttgagaaccagaagaggcatgtaaacaatccatctcgtctttttagttattcagattatctttatctttttgcctgttgagatttgtttctttggtttcaggtacaaccgagcagtttatctactgaggcgattgctcagctgttttaattgtgatgggagacgaggatactggacagtcaggttatcaacggatttggagcacatgggacgtccaaatgagagtcttacagttgcagagcagggactattggatccttgggtgcgtgctggttcaagggtagctttgcaaaggcggattcttcgtttggcaaaacctccaagacgctggaaaactcccactttttcaaatctcgtcgacaacaagatccccgaggttatacttctattcaaagtgaaaagataaaatataaagttgttcatcttcttactttgtcctcaaatgtgcaattttgcatttcaggttactattcaagggagatcactgaactgtgaagttggcataaaaaataggttttatggagaagatggagaacaatgtggagtggagcagctcgcattgcagtattacagtggagaaggaggaggatggcaaggaattcatacagagagtagtatctggttaacgattttcgggcttctcatgtgggatattctattttccgatgtccctggcgttttccaaacccgattccaggtgaatgaaactcaatagttgtctcatatgacgcaaatgaaaactctcattctgttttctgttccccttatgcagactgctccactggacttagagactgaatccttctatctaaccaggaaggaaacaatagaatctcagctcgaaaaagtcgcaaatggaatggctgaagaaatactaatcatatcatatgaaacacaacgtggaacagcgtgcagaggagtggcttgggagcggttttcgttagaggaactgagagcagcagtggcttgtgttggaggtatgtgtatagcatcgctgtgccggcatttagctcaagactataggagctggtgcagtggaatgcctgatctactggtatggcggttcaaggagaatggttatgaaggtgaagctaagcttgtggaagtgaaatcagagaaagataggttatcagaacagcaaagagcttggcttctacttctaatggattcaggctttaatgttgagatttgcaaagtaagacctgcttctttaattaaaacttaattatccaaattaaaaggagaacacacgatttgtcggatagttactttttttctttttttctttatgcaaaagtgatttgttttttatttgttgttgattattctcgagtagaaagtaacacgtgtagatagatatctgagaatgagaatagttgatgatgttaggttttgatgaagtagacgttgtggcttgtttgttgtaccataaaaagacgactaaattttgttcttccataaacttttcaaagagatttgtaaatttggacaatgtgtgtgggtggtcctcacatgttagtagattcttatgttatgctttagtttgcttttatttttgtgagactttttagcttcattttctctagaggaatatgccatttggggatgggatccagaatcaatttgaatttttaataattaatactagatgacattctagttattatagattatgtaatatgatttgacatgtaattatttatactgaatttatgtatactattatatatagtagatacatcctaataaaaattgcaatgtaatgataccagaaaagaaaatttgcaatgtaactttttcaacataatttttttctttctttcccataagtgttaccattttataaagaagtgttacaacccaatagaaatataaaagtatccctttttaatttaaaatttatccaaaaaaatgaatttttattaatataacaattcaattgtgtatgcatgataggattttcttaattttaatattatgaagtcatttcatctttattgaataatattatttttcacttagacttagtggtatgcataaaatcaaatttaatacagtctatagtaattaaaactatatatggagaagtttaataagatttcaaataccaaaaacaaatggcaatttctgagaaatgagtcacagatagcgacgacaagagccttgagaatgggaattggtgtggtggttttgctctcaatatagggatttgttcagcgcctttagccgagctgtggggggtctactatggtttgtacatggcctcagagcggcgggcttcaagagtggtgatcgaggtggattcagagctggttgtcgggttacttacgacggggattagtgaagctaatccgctgtccttcctggtgcgtttgtgccatggcttcatattaagggactggatagttcgtattgttcatgtttatagggaggctaatcgtcttgcggacggattggcgaactatgtcttttctttacctttaggttttcattcttttgagtgtgttcccgagcatgttcgggatatccttttagaagataccggtggaacatgttttccacgtcaggtgcgtttgtactatgctttaattttggtttaataaagtaggggagacaatcccaccaaaaaaaaaaaaaaaaagagccttgagttaaaaaaagaaaaaaaaaagtgaaaagtattaaagtgttaaactatctcattgtctgatgagagagacttcagttttcgttgactctttctgaaaaaatcttctttgtaccttattacaatattacttctcttcttcttcttgttcaccatctctcttatttcgcagatctaaagagaaaaaaaccatg

SEQ ID NO: 31734 - DNA, 3000 bp, Unknown
  misc_feature (1)..( 3000): 2750-1469P.txt file - cDNA_ID_3045374; gDNA_ID_1971786; Annot_ID_175478
gtccaggtgttcagtcgcacctcaagaaagagagaccttattaattctctttgttcttgttacaatgatggaacgaggtccgtttgttttactttatagttaagatttataaagcttctttcctttcgtagaagtttctgtttcactttgaggttgatttgttttgtttaaatttagaataaatctagcaacagtaattctagaaagaacaggactatgtgctaaggtatcaagtacagcagaatctctcatatggcgcgttgaggtgaagttttggtttttccacgtacttgggttttattttgggaagaattaacttttggttttatgttgcagaggcttttcttcctcaatggggagcaagatctatcgtcttttgttctgctggatcttggtattatcaaatacccaacttacaaatgcattgactcagagcaaatattctcgaatcggaccaagcttttagcatatgaagaggtgtttacttgtctatattgaaaaaaaggaaccgggttaatttttctacaatattataaagcttcaattacaggccattgaagtggctcagttgatggatgagtctcttgacaatgaggatcctcagacagtgttgaaatgcattataattgctgaaacccgcatatccagttcctctttggattctgctcacgctgctgcatttaatcgctttacagctccatgggttaactcaaaggtggttctcttaggagtttccttttttgagaaccagaagaggcatgtaaacaatccatctcgtctttttagttattcagattatctttatctttttgcctgttgagatttgtttctttggtttcaggtacaaccgagcagtttatctactgaggcgattgctcagctgttttaattgtgatgggagacgaggatactggacagtcaggttatcaacggatttggagcacatgggacgtccaaatgagagtcttacagttgcagagcagggactattggatccttgggtgcgtgctggttcaagggtagctttgcaaaggcggattcttcgtttggcaaaacctccaagacgctggaaaactcccactttttcaaatctcgtcgacaacaagatccccgaggttatacttctattcaaagtgaaaagataaaatataaagttgttcatcttcttactttgtcctcaaatgtgcaattttgcatttcaggttactattcaagggagatcactgaactgtgaagttggcataaaaaataggttttatggagaagatggagaacaatgtggagtggagcagctcgcattgcagtattacagtggagaaggaggaggatggcaaggaattcatacagagagtagtatctggttaacgattttcgggcttctcatgtgggatattctattttccgatgtccctggcgttttccaaacccgattccaggtgaatgaaactcaatagttgtctcatatgacgcaaatgaaaactctcattctgttttctgttccccttatgcagactgctccactggacttagagactgaatccttctatctaaccaggaaggaaacaatagaatctcagctcgaaaaagtcgcaaatggaatggctgaagaaatactaatcatatcatatgaaacacaacgtggaacagcgtgcagaggagtggcttgggagcggttttcgttagaggaactgagagcagcagtggcttgtgttggaggtatgtgtatagcatcgctgtgccggcatttagctcaagactataggagctggtgcagtggaatgcctgatctactggtatggcggttcaaggagaatggttatgaaggtgaagctaagcttgtggaagtgaaatcagagaaagataggttatcagaacagcaaagagcttggcttctacttctaatggattcaggctttaatgttgagatttgcaaagtaagacctgcttctttaattaaaacttaattatccaaattaaaaggagaacacacgatttgtcggatagttactttttttctttttttctttatgcaaaagtgatttgttttttatttgttgttgattattctcgagtagaaagtaacacgtgtagatagatatctgagaatgagaatagttgatgatgttaggttttgatgaagtagacgttgtggcttgtttgttgtaccataaaaagacgactaaattttgttcttccataaacttttcaaagagatttgtaaatttggacaatgtgtgtgggtggtcctcacatgttagtagattcttatgttatgctttagtttgcttttatttttgtgagactttttagcttcattttctctagaggaatatgccatttggggatgggatccagaatcaatttgaatttttaataattaatactagatgacattctagttattatagattatgtaatatgatttgacatgtaattatttatactgaatttatgtatactattatatatagtagatacatcctaataaaaattgcaatgtaatgataccagaaaagaaaatttgcaatgtaactttttcaacataatttttttctttctttcccataagtgttaccattttataaagaagtgttacaacccaatagaaatataaaagtatccctttttaatttaaaatttatccaaaaaaatgaatttttattaatataacaattcaattgtgtatgcatgataggattttcttaattttaatattatgaagtcatttcatctttattgaataatattatttttcacttagacttagtggtatgcataaaatcaaatttaatacagtctatagtaattaaaactatatatggagaagtttaataagatttcaaataccaaaaacaaatggcaatttctgagaaatgagtcacagatagcgacgacaagagccttgagaatgggaattggtgtggtggttttgctctcaatatagggatttgttcagcgcctttagccgagctgtggggggtctactatggtttgtacatg

SEQ ID NO: 31735 - DNA, 3003 bp, Unknown
  misc_feature (1)..( 3003): 2750-1469P.txt file - cDNA_ID_3045378; gDNA_ID_1971786; Annot_ID_58003
agttcttgcgagctaatgtgctgactcttcccagagtttcagcaaagtgcaacgtccacttcatctgattttctttctttatctttctttgttatatatatagcaatagtttatggttaagagaaacgcagaatattggggaattatcaattatgcaagtttagttgtgcttgtggcagcaatcatcaaaacttgcacatcaaattgtataagtgactcttttaggtaaaaaataaacataccagaaacacttgacaaggtttgtcatctctaatttacgcgctgccgtctatgaaaatgtatcctcacagagctgttttggagtggataaaactaagaacaaaagcaaaaaaagaaagatgattgaaacaagaggtgaccatggagagaaagggatcaaagtggtgaaacaatactatcaatccgttttaccaaatgtagtattagcccatcgtcttctccgctatatcgtgctgcactctaaattcattactactctctacatttgaatttgcataggatggataagtaatatcttcttatgttctatttgccttgctagacgtagccgtgttcttaagctcttctagtatttcaagttgcttttgtaaaacttatcttttgtatatccattggataggagaatgatataaattcttcttccatatctactgaaccatcataaatgactcaagctacataatatttgcaacacaaaatctctgaactgttaataaagaagacgcaaaaacaataatgagatcgaaagaagcttcttaatgtcatggagaaagtgatataaaatctacctaattgaaccaactagcccaaaaggcaaaagcacaaaatacgttttttttcttagattctgaaattattaacctggttaggttacagtagtataaaaaagagctttgtctttctcttagattccattgtcaagcttttggtacacttcctcgtctcctctgccatcgtaagttccaaaaatctttcacttcctaaattacactctctccttcgatttaaaggatccatctttgattctgttttttttttgttcttgcttgtttagttgcaaaaacgtttcaataggataggaggaacctaatcgacagttgttttagtgtgtcgtaggtaatttttggggtatgatggattcaataaacaatttgccagatgagattcttggcaaaatcctgtctttgcttccgacaaaagtggctgcttccacatcgattctgtccaagaggtggaggaatctgctgggtcttgtagataaccttgctttgatgagtcgatggttgtttatcccaacgaagaagctgaaaatggttcacttcgcttcgtagatttcgtaaacaagacatttgctctgttaggcaattctcccatcaaaaagttctctctgcgtcatgagcctagactttactgtgtagatgcatacttacgttggattttcactgcaatggaacaagaacgtggtttactggaactacacttgtacgcggatcgatattattatcctgttggtatagagagagagctgttcacgagcaacacactggttaagctcacactatccggtagatatgattttcaagttgagactgtgtttctccctgcccttaaatcactttccctctcatcttctttcgagattggttttgacaaatattgtaacctcctcgatggcttccctgcattggaagagttatacattcgtgaagctgtatctgaactttctaatgctttactatctagcggtacgtttgtgaaatgtgcatccatcaagagacttgtggtttttaccgattgtccaaagtttaaagaggatgaggatcaccaagaaccttgttttatagcaccaagtcttgtctaccttgactattctagttatctctccgaaaattatgaccttattgatttgaattcgcttgttgaagccaggctgaatctcagactattggagtcatttaacaattatggttcgtctgataatgatggtgatgtttatggttgggattttaatgttccttttgattattatggtgatgttacaaatctagttgcgggtataaccaacattacaacccttcacttgtctcctgattcccttgaggttagtcttttgctactacttcttcgtctatctattgattgttttttggtttgtggagattgataatccattgtatatagaaaagctagtttgcaaagtctttcacttatatatggttctggatatataaatcaggtatttcatttccgctgtaaatccataccggtgttcaacaatctcctccttaatttatctattgagagtaacaagcgaaatggttggcaagtaatgccacttttgatcaggagttgtccaaatctgcacactttagtcatcaaggtcttatcattttccttgctgagattcttttgttgttgtttgtgttgcccattcatgtcaaattggtctctggtttcagggttttgtccacagagtaacaagtaaatgcggagacgcatgtgcttgcatccctaagaagcagaggaagattggaaagaaagaggagatttcagagtatggaggttcttttcaagagctggaacagatgagacatttcttgggcaagttggaacgtcttgaaactgtgaaagttggtgttcacgcagaaaacaataacaacaatgagttcttgcgagctaatctactgactctccccagactctcatcaaagtgcaacaacatccaattcatctgaccttttccttccttgtcttttttcgctttgatctcgcaatgtgaaagtaacgtgacatgaatatgattatatcactaaagttggttacaatctgtttttttgaaagatccgttgttcttcttcctttgagttcaaaaatgacatttttatttttgtgcctttttttgttgttaaattgacaaagacatttaaaagaagaattttcgaagaaaaattagagagagtagaagaagcagaagcagtaatg

SEQ ID NO: 31736 - DNA, 3003 bp, Unknown
  misc_feature (1)..( 3003): 2750-1469P.txt file - cDNA_ID_3045378; gDNA_ID_1971786; Annot_ID_175477
atcgtaagttccaaaaactttctcttcctgtagttaaaaccctaatttatggctatgatgagaacttctcctagagattcgataagcaatttgccagatgagattcttggcaaaatcttgtctttgctcccgacaaaagtggctgcttccacatcggttctgtccaagaggtggaggaatctgttgggtcttgtagacaacctctgctttgatgagtcgatggttgtttatcccaacgaagaagaagaaacaagtggttcacttcgcttctgtgatttcgtagacaagacatttgctctgttaagcaattctcacatcaagaagttctctctgtctcgtgtatataagtataacgatgatgtagacggtatggtccggcgttggattcggactgtaatggaacgcggtttattggaaatacacttgcacgccacccccatgtcttttgttgccatagaaactaagctgttaacgagcaacacactggttaagctcacactatccgctcgatgttttgttgaagtagagcgtgtgtttttccctgccctcaaatcactttctctcttctcaattctgggtgattataccaactatatacggctcatcgatggctgccctgtgttggaagaattatacatgcgtgatggtgattatccgttcttgcggcttacttgtggtaccaacgtggaaagtgcatccctcaagcgacttgtgatttttacccataatccaaatgaaatgatttggcacgaactgatttattttgaagcaccaagtcttgtctaccttgactattccagttatgtctcggctaagtatgatgttgttgatttcgatttgcttgtcgaagccaggctgagtctcaggttatgggtgtcaactaacgattatgattattctgatgatgatgatgatgatgatgatgatgatgatgatgatgatgatgatgatgatgatgatgatgatgatgatgatgatgatgatgatgatgatgatgatgatgatgatgatgatgatgatgatggtgattattatattgtagaaccaaaggcgcctatatttggtgatgttacagaactacttgcggctatacgcaacattacgacccttcacttgtctcctgattcccttgaggttagtttttgcttcgtcttagtgtttgttaccggagctagcaaggtctcttacttatttatggtttttggttgtgttcgtttataacttaggtgtttcatttctgctgtaaatccatgcccgtgttcaacaacctccttaatttatctattgagagtaacaaggataaaggttggcaagtaatgccacttctcctcaagagttgtccaaatctacacaccttagtcatcaaggtatgatataaaccttgctgagattcttttctgttgttagtgttgccccattaatttattcatgtcaaattggtctctggtttcagggtcttgtccacagagtaactagtagatgtggagatgcatgcgcttgcatacctaagaagcagaggaagattgtacagaaagaagaggcattatgttgtctgcggacatgtcaagtgaaggtgctacagatttcagagtatggaggttattttcaagagctgaaacagatgagacatttcttgggcaagttggaatgtcttgaaaccgtgaaagttggtgttcacgcagaaaacaacaacaacagtgagttcttgcgagctaatgtgctgactcttcccagagtttcagcaaagtgcaacgtccacttcatctgattttctttctttatctttctttgttatatatatagcaatagtttatggttaagagaaacgcagaatattggggaattatcaattatgcaagtttagttgtgcttgtggcagcaatcatcaaaacttgcacatcaaattgtataagtgactcttttaggtaaaaaataaacataccagaaacacttgacaaggtttgtcatctctaatttacgcgctgccgtctatgaaaatgtatcctcacagagctgttttggagtggataaaactaagaacaaaagcaaaaaaagaaagatgattgaaacaagaggtgaccatggagagaaagggatcaaagtggtgaaacaatactatcaatccgttttaccaaatgtagtattagcccatcgtcttctccgctatatcgtgctgcactctaaattcattactactctctacatttgaatttgcataggatggataagtaatatcttcttatgttctatttgccttgctagacgtagccgtgttcttaagctcttctagtatttcaagttgcttttgtaaaacttatcttttgtatatccattggataggagaatgatataaattcttcttccatatctactgaaccatcataaatgactcaagctacataatatttgcaacacaaaatctctgaactgttaataaagaagacgcaaaaacaataatgagatcgaaagaagcttcttaatgtcatggagaaagtgatataaaatctacctaattgaaccaactagcccaaaaggcaaaagcacaaaatacgttttttttcttagattctgaaattattaacctggttaggttacagtagtataaaaaagagctttgtctttctcttagattccattgtcaagcttttggtacacttcctcgtctcctctgccatcgtaagttccaaaaatctttcacttcctaaattacactctctccttcgatttaaaggatccatctttgattctgttttttttttgttcttgcttgtttagttgcaaaaacgtttcaataggataggaggaacctaatcgacagttgttttagtgtgtcgtaggtaatttttggggtatgatggattcaataaacaatttgccagatgagattcttggcaaaatcctgtctttgcttccgacaaaagtggctgcttccacatcgattctgtccaagaggtggaggaatctgctgggtcttgtagataaccttgctttgatgagtcgatg

SEQ ID NO: 31737 - DNA, 3000 bp, Unknown
  misc_feature (1)..( 3000): 2750-1469P.txt file - cDNA_ID_3045393; gDNA_ID_1971789; Annot_ID_175530
ccataggattccacaatcgaagtatgtcgatggagttagatggcttccacaagcttctgctttgaatcgtttcttcgcaacagcgtcctatgacgcggattgtgattcttcatcaatcgagatccaatcgctcgacccaaaccctagagggaatcacaacacgaacccgttaatcgagtcgttatcttcatggacttcaccttctcgcgtttcgtctctagaagtcgcgggaaacggcggtggtggcggttcattcaaaccaatggtttcagcagctacgtcttctggttctcttcacgttctgatgattgatttggtggaaggagctgcgattgaagagttttacgcggcggaaggggagaggtttcatgtgggacgcgtggaaggtgtggattggagagagggaggagaatgtgttactgttggtgaagatgggagagtgaatgtagtgaagattgtgaatggtgaaggtttaaggtatagaaaggtctttgatgggaatggattggtggcttatagagctgtgaaatgggcttctccgactgagtttgttactggaggatatggttttggtttgcaattgtgggatcagaggaagtctggtgaagctgtttcacaactcaaagggaactggtgagttcttaactctgtttaatgattgaataaatgctagttcaatctggttttgaattcctggcatgtttgctcttcgatgatatggaacttgaaagtttgtgcgtttggctttagaacacactcgtaatatttgatttggtgagctgtttagcaagtagaactaagaatgggaacggtagatcctttgagttaatagtctatataagaagcatgcctatcctactgtgtctattctgattataacattgcaggtttcaaggcaaaacttctgcaattgtccactccattgacattcatccatctcggaagcacacttgcattgtaagtgttttttcttcttcgcatgtgttagatgtcttttaaagttcttatctgtttgaagtttgaaaaacgtctttcccatcaactgatgaacatgataattcctagtgtgatcctcaatctttaccaagtttttgggtatatagcctttggtaatattccttcatatttcttaggagatgaaagtgaatcattttgtttctgtgtttagaatattaaaccaccttgtcactattttcctttacattttacttgtcgctcacatatacgcacacaaaacttcagtgtagctttaagtatccccacaacttacaagcatgatttaataactttatatcttgatactgttgtgtgtttaggcaggaggttcttcaggtactgtatttgcttgggatcttcggtggccacagcaacccattgttctttctggggttggagcaagtgagaatataaacaatcctctgtctgaaagtgaggtatgggaagttcagtatgactcatacacaaaatccaacgtctcatcctcaaggattctccctgttatgacctgctctgaagatggaatccttggtatcatagaacaaggtatttacgcctttctaccacatttgttcttctttcatgtatgagttaccaaattgatgtttcctctatttatttttgtcctggctattttgctcaggggaagaaccaatcgagcttctggctgaaccttgtgccattaacagttttgacatcgacaggcaaaatccacaggtgaaaacatcacctaagtctgtttcaacaaactagttacttacattatgtgttttctcaagctggtacatacaaatgtgcaggatgtgatatgtagcttggagtgggaatcaatagcagttttctcaaggccttagtataatatggaactgtgcacggtatgctatgttttcttctgcgagctacaacgaagaaattgaggaaggtagtgatagatgatgagagacaagtttaaggaagagggtgtggaatgtgtttataagtttcattataacaagatcttaaaatacagtctgcacaaacagagttttgtattcatcttaaagttagtgtgatcttgaagatttgcaatcctggcttgaattgtacttctgaatctctgtcgctgtataagtagtgtgtgtataccgacaccaagttaaacctcaaacccaactatgacacgtggcgaaaaagaagtcggccacggtaggtcccaccggagctaatacttggccctctaatgagccgttgaaaagcttgaatctctctttttgttttctttttcaattctttaagaggttagaatttggtaacaagaacttgtcaaaccacaaaacaaaaaagaagacatgtcccacgcaaaaaacttaagctcttattaagttctttaatcgttcaaagattattatttcaccaatacgttccagctcttttcttaagatagtccagaatatcatcattattttacttgattttttactctttttgataacagaccctttcttttttcgtttttgttctcctgtaggagtttttgttaatgagaatttctgatacgaactctcaaattgattccatattatgctgagaaaaggtgaacaactttgtcctgtttatgatctgatatattttgtagttttgtccactttgattttggcataatcataatggttttggtctggcgtgccttttgtgattgattatattccctttttggatagtttcctctttgattgtctaaatattgttttgttaattcaccagaaatgttcatcatgtcttctacgtgaagcatttcctctgttcaagagattagattagtcatctactctcatcccaaaatctgcaagttcatcaatcattcttctgcaactttcctggtacaatgagattctttcttcttttattaagattctgctcatcttttggtgaagaaaactttactgtttacgatttttttcttgttttatatgaagtaacagttactgacattatgtatctataaatctgttcaagagaaacatg

SEQ ID NO: 31738 - DNA, 3003 bp, Unknown
  misc_feature (1)..( 3003): 2750-1469P.txt file - cDNA_ID_3045393; gDNA_ID_1621091; Annot_ID_170735
agtccataggattccacaatcgaagtatgtcgatggagttagatggcttccacaagcttctgctttgaatcgtttcttcgcaacagcgtcctatgacgcggattgtgattcttcatcaatcgagatccaatcgctcgacccaaaccctagagggaatcacaacacgaacccgttaatcgagtcgttatcttcatggacttcaccttctcgcgtttcgtctctagaagtcgcgggaaacggcggtggtggcggttcattcaaaccaatggtttcagcagctacgtcttctggttctcttcacgttctgatgattgatttggtggaaggagctgcgattgaagagttttacgcggcggaaggggagaggtttcatgtgggacgcgtggaaggtgtggattggagagagggaggagaatgtgttactgttggtgaagatgggagagtgaatgtagtgaagattgtgaatggtgaaggtttaaggtatagaaaggtctttgatgggaatggattggtggcttatagagctgtgaaatgggcttctccgactgagtttgttactggaggatatggttttggtttgcaattgtgggatcagaggaagtctggtgaagctgtttcacaactcaaagggaactggtgagttcttaactctgtttaatgattgaataaatgctagttcaatctggttttgaattcctggcatgtttgctcttcgatgatatggaacttgaaagtttgtgcgtttggctttagaacacactcgtaatatttgatttggtgagctgtttagcaagtagaactaagaatgggaacggtagatcctttgagttaatagtctatataagaagcatgcctatcctactgtgtctattctgattataacattgcaggtttcaaggcaaaacttctgcaattgtccactccattgacattcatccatctcggaagcacacttgcattgtaagtgttttttcttcttcgcatgtgttagatgtcttttaaagttcttatctgtttgaagtttgaaaaacgtctttcccatcaactgatgaacatgataattcctagtgtgatcctcaatctttaccaagtttttgggtatatagcctttggtaatattccttcatatttcttaggagatgaaagtgaatcattttgtttctgtgtttagaatattaaaccaccttgtcactattttcctttacattttacttgtcgctcacatatacgcacacaaaacttcagtgtagctttaagtatccccacaacttacaagcatgatttaataactttatatcttgatactgttgtgtgtttaggcaggaggttcttcaggtactgtatttgcttgggatcttcggtggccacagcaacccattgttctttctggggttggagcaagtgagaatataaacaatcctctgtctgaaagtgaggtatgggaagttcagtatgactcatacacaaaatccaacgtctcatcctcaaggattctccctgttatgacctgctctgaagatggaatccttggtatcatagaacaaggtatttacgcctttctaccacatttgttcttctttcatgtatgagttaccaaattgatgtttcctctatttatttttgtcctggctattttgctcaggggaagaaccaatcgagcttctggctgaaccttgtgccattaacagttttgacatcgacaggcaaaatccacaggtgaaaacatcacctaagtctgtttcaacaaactagttacttacattatgtgttttctcaagctggtacatacaaatgtgcaggatgtgatatgtagcttggagtgggaatcaatagcagttttctcaaggccttagtataatatggaactgtgcacggtatgctatgttttcttctgcgagctacaacgaagaaattgaggaaggtagtgatagatgatgagagacaagtttaaggaagagggtgtggaatgtgtttataagtttcattataacaagatcttaaaatacagtctgcacaaacagagttttgtattcatcttaaagttagtgtgatcttgaagatttgcaatcctggcttgaattgtacttctgaatctctgtcgctgtataagtagtgtgtgtataccgacaccaagttaaacctcaaacccaactatgacacgtggcgaaaaagaagtcggccacggtaggtcccaccggagctaatacttggccctctaatgagccgttgaaaagcttgaatctctctttttgttttctttttcaattctttaagaggttagaatttggtaacaagaacttgtcaaaccacaaaacaaaaaagaagacatgtcccacgcaaaaaacttaagctcttattaagttctttaatcgttcaaagattattatttcaccaatacgttccagctcttttcttaagatagtccagaatatcatcattattttacttgattttttactctttttgataacagaccctttcttttttcgtttttgttctcctgtaggagtttttgttaatgagaatttctgatacgaactctcaaattgattccatattatgctgagaaaaggtgaacaactttgtcctgtttatgatctgatatattttgtagttttgtccactttgattttggcataatcataatggttttggtctggcgtgccttttgtgattgattatattccctttttggatagtttcctctttgattgtctaaatattgttttgttaattcaccagaaatgttcatcatgtcttctacgtgaagcatttcctctgttcaagagattagattagtcatctactctcatcccaaaatctgcaagttcatcaatcattcttctgcaactttcctggtacaatgagattctttcttcttttattaagattctgctcatcttttggtgaagaaaactttactgtttacgatttttttcttgttttatatgaagtaacagttactgacattatgtatctataaatctgttcaagagaaacatg

SEQ ID NO: 31739 - DNA, 3000 bp, Unknown; identical to SEQ ID NO: 31737
  misc_feature (1)..( 3000): 2750-1469P.txt file - cDNA_ID_3045393; gDNA_ID_2926198; Annot_ID_201639

SEQ ID NO: 31740 - DNA, 3003 bp, Unknown
  misc_feature (1)..( 3003): 2750-1469P.txt file - cDNA_ID_3045397; gDNA_ID_1971789; Annot_ID_175529
ctacgacgttttgaatgaggattcggacggttgggtgtttcaggtttgggctcagtgtcttctctcgcgcgtccctcttcaccttcttatttctacctgtgagtctcacttttcttctctccggtctttagcattctattgaatagaagaattggcatatagctattagctattttcctcagatcgtgttttaggcgactttctgttctcgcttgcttaacattgtacttcagtgtcgaattcatatcctacacatgagtctacataaacattgtgctttatgcttgcttccttagttcctcagaaatccttggaaaatccgcagatttatcttcttcgctatctggaattgttttcttcgtaggtttcttctcgttcatgtgtttttccctattgggataatggttttcagctctaaagattctatagccgaaagtaaaaataagacttgtgtaatatttgctgcagctttatttgcgaaatcacgtctaaaaccttgtaggtagaggaaaggacaagaatcccaggcagaagcaaccatggtgatggtgtctaattctacccatcaaaataaggaaatacatgtcagaaggagaatctctgagatgtattcttcgttctgatctttttctctcgttgcatatcatgcttgcctgtgcaaatggtgtgatatttaaaccccttgatcaatctactgcgtattgatcagtatagactcttagcatgtatagcgctaaatttcacatctgatcatttttatagaaaatactttgttcactgcatacacttaatgaagcaattctcccatctatggacccagtgagatgctccattgtttcctagcataccttagcataaaatggagatctttagtcacagtttctaacagatgagatatagatttatattaaggtatcaattttttcattctgtagaagcagagtattttcagcctcttgagtatcatgtttttttttctttctttctggtgatgcagatacaatagacgggaagaggagtttccatcacttaaagactacaatgactacttggaagaagtggagtgcatgggttagtttcacttgtgctccttattttctctattcatgcaagacaagaccaatgtatatattaccttctattccaccagtattcgacttgatagatggaatcaatgtcgaggcgattgagcagaagattaagagatattctaaggagaatgctgaacagataatgattaatagagctcgtaaggtagggcctacgttagccttactttttcttatcttggttagatgaatgagtagaggaaaagaaagaagattaaaagcatgtttggttatatgatatcactgtgcaaattgcttttggtgtatttacaatttgctccaacaggcagaagaattgactgcagccttggcagcttgcaaggccaaacccccacagacagatgctgacacggtaaattgggttttaattttcatatcaacaagcagatgaagtttcctgacgaagctgaaatctctttacttgtttacgcattttgtagtcgtcgaaccatggggtcacggctggaactacatatggtcaggcttcacgaccaacgggaatgggcccacaacctgtacctatagtaggtggagcagagcgtcaacattacgctatggaagacgaagcgacgaggaggatgaaagcagagagagctggaggattttctttagagataagcaagaggagggctttggaagaagcatttgcaagcatttgggtttgatttctcaagcgatattagttttgtcccttatgatagtgactaggaggtcttgatagcttccattgttgtctcagtttactgtcttttactcttgtggctggtttgttttgtatagttgacaagactctattacgggcatcaaggaaaacaaaatttacgaaagaaaaatcgcaaaaaatacatgtacttgttcaattgtagagagacggaaacagatggtagaacagaagcaaaaaataaggaggatggacatagttattgaatttaaagggattttgatgtccatatcaaagacatagtttcatctttagcagttacaccgttcccagttgccataacattttcctctgtttccatacccatcagtatatcaagaaatgattcggcaccgtctaaacaagacatagaacaaaaattcaacttaggaaacttgaggtatatgtaacctcggcaacacaggccacataatttgcaaattaatcgactctggctactgttacgaacaacttccccttttaggtcatcgcaactgaatgtggaaccacactttatgtaagcagaggagtcaaaacacgcatagatggtggatagtggtgcaacatatgttgcaagtgtagaaccatgttgtcgtatctattttttcttcacatatttcgcaccagtagatttcatctgtgctagtgctatcttcatagcaaagagagagaggatgctcatcatatttccagcataactgatatgggatggttgcacatttataacacattgtaaactcacattgagtacattctagtagattagccgacaaacacattctattggaactaatacgtgttccgccactgctgcttctcttcatctcgaacacgatcatatttctctgagtcttagatgatgttcatggcaattttgcgattatttttctccaaatagtattacttttaaaatttcactcccttttttttagtctcaaaataaaagttggtcaaaaaaataaaattaataaacaaaataaaagttggtccgaccgaattgaaccagcaaagccgatatgatctccggtttactgaatatagcaaagcaatcccagtaagaaaataagctctatctcttgctgcagcgattaggctcttcctatatcctctcgttccgcttaatcgtcaacaccagagaagctggaaccttttgttatccggtttaagcaaatgttttggtagctcgctttgatg

SEQ ID NO: 31741 - DNA, 3003 bp, Unknown
  misc_feature (1)..( 3003): 2750-1469P.txt file - cDNA_ID_3045401; gDNA_ID_1971789; Annot_ID_175527
tgtttgtgacaaccgaaatagtgtcaagaacttcatatcactcggtggattactttatttgattgaatcttagttgataacgaaatcctttctttttctatgtatttcgattattaatgtaatcagaaaattttaagtattttttcacgttatccaactttgagagtactgtccttgtgttggccaataagtggttgaatatatggtaaaagtataaaagctcccatcatgttggacctactagctttgctatatataaaatgtcctgtcattgcataacgtaccactttctgaatctgttttacgtgcctatcaatgatttgtctttaacacttaccgtaatattctacaattaagttcaagtgcctagattttctaaatgtgtataaagacattatatatggcaaatgatcctttagataaccatttcatttaaatcaagcattcgattcgcattcatagataaaatactattcaccggtccagttctaactagccatccagtctggttagaaagcaaaattgtttattttattttaggttcagttttcagatcggttttctaacactgttttggtttggttctcgtatcggttcaaccggattggatagtcataaagaatttgaagtccttaattaagcccaaaacaagtagagcccatatatatactaacaaagccgtgattagggtttttggttttcgtcagaagatttcaaggtttagggtttctgcaattcaaccatggcagagcaggtttggatctacattacattgtctttatgttataattggggattgctagttgttggattctcgttttctgggttctttgattttggcttttaatgatggattggtgtgtttgcagacggagaaggcgtttcttaagcaaccaaaagttttcttaaggtaattgtcacacctcaaaaattcaactgctttgtattttggctatggtctctttatgcttatgattcaaatgttctatcagctcgaagaaatctggtaagggaaagaggcctggtaaaggaggtaatcgtttctggaagaacattggccttggtttcaaaactccaagagaggctattgaaggtactgtttttatgtctcagctctcaattttgctttaccatgtctagaagaagcttcatttgttaaaaaagttggattctttagagaacttagaggattttggtttagtgtctctaatttggttgttgagacattttctgagtaatctgattttagagtaatgccgctttgttagtattctcattgatctaagacttgggtagtagattggtggtatttgcccaattttaggagctttggggaaattgtttgacatagctatgttttttcttgattttatttgcaggaacatacattgaccagaaatgtccctttactggtacggtttcaatcaggggtcgcatcttgtctggaacttgtcacagtgcaaagatgcagaggacgatcattgttcgtagggactatcttcattttgtgaagaagtatcgaaggtaaaaggatcggttttgttattgtgttcaaattctctcagcttatttgaaaccctccagctaaatgcttaatcctaccagatatgagaaaagacactcaaacattcctgctcatgtttccccgtgcttccgtgtcaaagaaggagatcgtgttaccattgggcaatgcaggttaggagcactaatatctatatacttggtttttcgttcaaaggaattcatgctattgtataatactgcctgaactttgataccatctttatttatcacgcaagtttctaaacttatcaagttaacgattcaggccattgtcaaagacggtgaggttcaatgtcctgaaggtcattccggctggaagctcttctatcgggaaaaaagcattcactggaatgtaaaagagattcagatttgttgaaaaggtgcgaactagtattctaagagtttagaatttttctagcagagttattggattcgtttcttaagatctatgatcaaaggaaaccagattttctgtttcatttagtgattcaagtatcaagatatgtctatggttatagttttactccaatatatctagtcatgagttgctatctactagtcatgatttcgatgaaaagtggaattatgcttttgctatcttgatatttatctttgtctaatcgatatttcttgcttccattacattaatttctgaaaatgatatttaagagaaaacaatacagaagttgcataactccagggaatgctatgaacgtgcagcctcattctatgccatacatttatataaaagctccgattgcaccccttaagcttattaagtcatcttcaaaattagaaaaagaggtgcctaagtcatggcgaaaattagtcgaatgaaaacgacacaaaagattcttcatgtataatatacaaaaatatgaccccgtatttcacatggtatagttttttattacatcacttttccaaacgtaaagttaattaaacgttgagaaatgtgatgttgcttggtaacagctcaattctcgaaaacacgtgaaacctggcgcacttgcttctgtttcacatttgcatacaatttcaaccactaacacgcaaccatctccaaacgcagggccacgtttatctgcgtttgcgttaccaaagtcaatgattgacaaacaaacaaactaacactccaaccaatgacgagttttagataaggtattcgtgattttatacaatgcatcaaacagaaatcgaaccaaacacctccttaagttgtttcacggttcgaccaaccgcatcgaacgccaaattaacgagaagaggttgttgttagttgaggaccacgcacgatgggtgaaataaaaaagtccgaatcttttgggttcgttgagtagcttctgacgtcatttcgcacattctaattctaatattcagtctttaaagtcttaaaggatcttcattgtactttgaagtatagtttctgtaacaacaatg

SEQ ID NO: 31742 - DNA, 3000 bp, Unknown; identical to SEQ ID NO: 8395
  misc_feature (1)..( 3000): 2750-1469P.txt file - cDNA_ID_3045405; gDNA_ID_1971789; Annot_ID_175524

SEQ ID NO: 31743 - DNA, 3000 bp, Unknown; identical to SEQ ID NO: 8395
  misc_feature (1)..( 3000): 2750-1469P.txt file - cDNA_ID_3045405; gDNA_ID_2926198; Annot_ID_201633

SEQ ID NO: 31744 - DNA, 3003 bp, Unknown; identical to SEQ ID NO: 21540
  misc_feature (1)..( 3003): 2750-1469P.txt file - cDNA_ID_3045409; gDNA_ID_1971789; Annot_ID_175523

SEQ ID NO: 31745 - DNA, 3000 bp, Unknown
  misc_feature (1)..( 3000): 2750-1469P.txt file - cDNA_ID_3045417; gDNA_ID_1971791; Annot_ID_175571
agtacttaatactttcttataatgcccaaatgaaagttgcgtaaaggccaaggatcatcattttcatcatgtttgaatgaataacaaaaaaaaatgaagaagagaatagattgtcttgttaatagtgaagtgaatgattctttttcaatttttgaaaaactgaaatagaaaatgccaaagagagtcagtttcagaaggtaccatcattacaaaccctaatagtataaaatgccaattgtgtacttgaggaggcttttgtaacataacataataatatagccttacaacttttgacatttaatattggttatttattgttggcccttttgggtttagctcggaaccagaggatacaaaactccaagacaagaatcaccaacggatctctgcacagaatctttggtccaaaattttcccccacaatatcaaccaatggtcttgtaaatacctaattattttcaaatcctacataattttcaattttgtttcatttttgtgcatcaatatataaaccaattttagttaattcaacttagcataccttaagcttgaatctacacacagtaatacattaaaggttttgggtgttgggagattctacagttctgcaaaagtgactctagtaacttgggccttatctactgtcgttgtcattatgtgtcatctccttttacatatctcaccaatttccccctatttaaaacatctgaaaaacgtcaaataattatttattttgtcggcaaaatgaaacatcgaattattctcttatttgttttccattctcatcatacgatcgactatatgtgtgaaattagccctttctcaaataataataataataataatatgtatgagataatttggctcaacttataagatacagtatatgattgagaattagagactagttagatcaaaggctcatcttagacgagcaagtttcatattggcaaggtcttccaaataccatctatcaattctcaaaaagaaatgttatatgaaaacaattcaagctttatagtttatacccattgatctcggagttcaacagatatatctattatctttaaaagtgttttaaactaatttggggttgtgatgaggtttattaatgttggaattagatggagatgtgaaagaaagttgagagagttttgagtattatggtgatagatgttgatatgcaaatgtagacaaacaatggtgtcccacttaaattcgagtgtccttaagaataaaatcacaaagtctcaacaaaacaacacaaacccaactgtaagtcacattcacaaaccctaatctagaccctcatgttcccttttgctttaatattttacttatcaatctaaagagactactactacgttacaaatttacactgatcattatcctttgcactaatcttaaataagaaaaaccttcttctaaattctatccgggcgagttccaataataccgtggatgaccgaaccataatttaaaatttggcatcattacttaaagatcattacgcttagtaatagtatttttctttgtagctgaggttaggatttttacatgttaaatgtaaaattttgcgtttagccattaaaataatttgggtttaataagaaaaatactctacttgtttcatcaaatattattcgtaaattgtaaaaccaaatacaaaacacaaaacaaaatgttgcataagattaaaaaaaaaatcaatttgatgctatttttcggttaaaaaatgaatacttgtaacaacgacaaaaagtaagaggtattaagaaaaaacataatagcaaaataactcgttctttagaccatccttattgatgggttcttagatcaaatcttcacatttttgatctaccaaataataatttaaaattagagggttcttagtaagatgagagaaagtataaaaaaaactcttaattaagagccaattttactttctaagaactttttttaatatttttattcttattttgttttatataattttttaagagattttataaactttttaagaaaccattgataatgatgcttttactgatcaagttttctgtagtaaccaatagaaaccacaagtatacacaaaggaatttttagagccccctttgaacactagaaccaatcaataaaacaaaacctcttactacattgaaccaatccagctaatgatctgttattggctgtctcgtaagaacttaccctcttttggtatgtaattttttaattttaactatttcttgtcgtttgtggtgtttttcttattgtacttgtttgtccgattcaattagcgtaagagtaaaaacctatccatttctttggtaccgtcctttatattctcttttcatcattcttcaccattcaagtttcaaccttttgctcacaaaaaatttaaaagtaatttcatattttcatctttatcattttgttggacaaaagaaaaagtcgaatagtatccgatgtgagatttacatgtcacataaccattacctcttggcagtcccattcaatcgataacttgtaatttgttttttgtaagcctagaaaccatagacctatgaaataattgagtactagttgctcatataatttgtacaatacacaatacacaacaaaataaatggtcatatccgcaaatatcaaaacaatattttctttagtaaaataacaaagtaaaatgtctcctcgactcctccaattgcttataaattgaggtgatcccttatttcattatttcaataaattccaccaacgtcactctttctcttctcccaaaagcctcaaccaaacattttccctcccaaatctctagaataataacttcaaaaaatcacactcttatctccataattacactaaacctactcttctctcctcatttaaccacaaacccacttctcaatttctctaattctctacccaatttttttttttattcaaagggaaaagaaacagagtaagaaaatgaaaatgagtgattattggacaacaatg

SEQ ID NO: 31746 - DNA, 3003 bp, Unknown
  misc_feature (1)..( 3003): 2750-1469P.txt file - cDNA_ID_3045463; gDNA_ID_1971795; Annot_ID_175634
aacacaaacccaatgttttatcttggtcacgtagagctcctttatcttccctgagcgaatacgtcttctacgttttgtgaaatccgtagattttcttttcgccgaggttaggatatttagtaacattaataattaagccatggcagtatgaaagagtgggattcatatcttagcacacttttgaaagatgtgagccaaattttgatgtagagagacaacaaatgaaattaacgaatttgcatttgaaacatatatagatcgatccattgataagctttaatgatatgtagaacacattctctaattctatgagatttgtaatgaagtgataacccatctttacgcaaaacacattgccgtaacgtcgacaacaaatgaagaatggctttgttaaggtgagttaaaaataatgttggcgcatcatatgtttctttaacattaatagacaaaaataagtaactcaagttacgttttgatgaaaggaaataaagtcgtaagcatgcatctctttgacgatagatgttgtgttgcatgataccaaactcaaacatattgcgaccacaactctgaaaaaaaacattaactcactcaaaattaaagcagaataatttttttgtttcttctcttttttagataaagagagacattttaatttttatgttagtcggaagattccgattcaaggaaatttatatttacttttttcgacctattttgaaaacaatttgtacaatcaaaaagatgttagaaaagtatgcgtaacattttttgttttttttggtaaaaaatcagggccggctcaaactttttgaagaccttgtgctgatttataaaaactggctttagttaatattggtttttaatttctaaaatttttggaccctaaaaccttaaagaaaattgaaattttttttgaggaccctgtgcttttgctcctgtagcactcccctagagccggcactgtaaaaaatatacgtaagattttgtgcaatattcgcagtttttaatcactgaattaccataaatttgttagacatttttacatgtttcttacagtatattagatagactttgattctcattctacatctcaataatatataatatatgatatgaaagttggacagtaatgaaatagtaatcatgaaagtgagactagctatttaaatgcaggtcacatgcaaacctcgtccctgatcccatcaacagaaacatggccagtgtactgtgcaaatccacaaactcccaaacaacgacactgtttctaaatctataatgcgttattcttttttatcatggccaaaaagtttgtgcaattagttagctgtcttgtacgtatataataatagaaattaatgaggaagtatatatgttgtgtgttttgtcaagtctctacgggccacgtccttatccataaaaaagctttgtgcatgacaagctgtgtaccattttcctttattcttttgtctttctacttattttctttcaatagaatataaaggtcaaaacatttgaagtcttttatagtcaaagatcaaacattgaaagtctttcagagtcaaagatcaaacattttaagccttaattaaggttaaacattacatcgacttgttaaggatttgatgatttacgagcattattaaaccgagtcgagaaacctcactagttaaagagtttattttgtgttagacgtgacgtacatgctgcatgcatatatgtaatttaagttgtttgcggcgagaagctgattttttaaaaattttgagacataatgttttaacttttaagctttctcaaacacattatgttcttgatgtatgaacgatagttttttaaatctaatttaacattaggttatcagacacactaatatacatgtaaaactttgcattatataggagccgtgactaccctatggcaaaaaggcaaatgcctaaagccaaaaaaaaagtttaaattaaaggccaaatttttataaaataataagcttatcaattttgttattttgataacaaataattgttaaaatgaaacttttttcgtgaaaattatattcttaactatacctttatctatagaccattttcttatcttgaaaacacatcatttagtaatatattttttttggtaagaatcatttagtaatacatcataattagtaaatataaatatttaaaacaaataacattattagaaaaacatataaaaacaaaaagaataacgtattattgatttttttacattgtaagtttttgatactaatattttttccgattcagtattatgattatttttaaaaactatgatgatagccacattttataaacttgtcctagccctgcacacatctaagcaagacactgcattatatatagagttgcttgtgtgtgttttgtcaatatttttacatgataaaatgatgatgcactctgaatacgatcccataaatatagaagtttaaatctaaatacgatcaccatatttacgtataaaataccaaagagtgtagaagataattattttagttttatagaataactataaaaaggtgatataatccacaatattatcatgtcaatatcttaagaacaatttgaaaagctaaattattggaagaatatgggattatggagcagtgagagacgtcaacttacaaattgagagagaaaagagtttcaacaacttttttttggcagtgaacttagaccgaactaaattccttcttcaaaagtaatccacaaataaattaatattttatagcctcgttttcaaattaaaaacagagagaaatttggaaattccagtacgacgggagataaaacctaacatacgccatggtgaccgttatctaaactacgccaaaatatttgaagtgtcgtcgtttcataataaaacgcaaacaaaaacccactcccactttctcctttccaaaaaaagaactctcgccactttctctgctctttttctttctctctctctttcttgttttcgccggcgatcatg

SEQ ID NO: 31747 - DNA, 3000 bp, Unknown
  misc_feature (1)..( 3000): 2750-1469P.txt file - cDNA_ID_3045467; gDNA_ID_1971795; Annot_ID_175629
atacgttactatacccaaaataaaaggtttgattagtgagtggcccgcaaaaagtggaatgattccacaatactacacgttattaccaattacaagttacacatccattctattttgtgattatatgaaactgatttaagaaaaaatatccattaaatcattaaccatcattccagaaactcattccaaagattttgtttcactttcgacggtgatgtgattctgctatgtttaaaaattagatcaaactaagaaactacggctggtggcgcgagactgaccggagatcggagggctgacgatgggggtaaggaacggctgagatgagagtcatgaatgcaggggtgtagccagaccaggctcacatggacgaacgtgcccatttttatgatttggaccaaaaaccataatcggtttccgattattggatctgaaaccggttctgatgtgtcctacgaagtagtacttttgtcagaaactaattaatttatgaatagtgttaatttcgtgagtcaataataattggtggggaaataggtgggtccattaatccattgccctaattaactcctaatcattcaatgtattgtctatttagaaagggaaatttcagaaaacataattcgagatttttctatagaccgacaaatgtaaacgattctgattttgtattttgaaagctatagtataatgttttggtgtcattaattttaactcgatgatgcttcgaaaataaaagaaactaaagatggtagacgacacgtgatcaatagctaagtaaacatgtattgcagatctgcagacaatatacacgtaccaaagtttttgttcagttaacatttaacagattattattgcattgtttcatgtaacataactcattcactatattgcgaatatacggtactttctgtcatatcgtggtagtttaaacattttgtgtgtttatcaatgtgtatcatgaattaactcttatcgtacgttaaattcctgaatcattaaagaaacaaaattttgagatcatcttgtatatgtttaacgatgacgcatctgtatcttcaatcaatgacttcgttatatttttggtaactttgaggaagaacccaatgtaaaatttaattgatttgaatttatgttatgtcagattttgcaaatactccaatttattatagatatagataaggtattatatgacatactattattatcaattctgcaaataatccaatttattagggattagacatagtccttgaattgttaattaggatgattaaccttaaaatgaattaattatatcttaccattttttaatggtatgaatatctttataaagagttgcataaaattttaatggtgtaactgtatgtatccattctcttcaactgagtgaccttttcgtttgcgcccattgcaacaattataagtttcgtttaaactgaaattctctatcacgtccttaattttagccaaaattttgcagcaaattcggcattattattttattacactatgatccttatattaagagacatcacctttgtttatcgaagtttaattcttcaagtatgcatcttatattatccacttgacatatgtatatatgtgcttaaaatatcaaaaacatttgaccaaaaattttctaacttaaagctcgattctttttcaagtcaatgttcatctataatgttgctaaatatcagttttataattggtgaaataatgctataataaaacactaattttaaaagctcacaagaattctcataaataattatataatgaatcaagttaattattcaatatgtatgtattttaaaacattttcgtctttttagttaagccatgttcgtttctccatttgacagatccatccaactgattcattcaacatgtccatctagatgattcattcgactcttgttcgtttcatttttagtaggttcatttaactagaccatccgaatgagatgttgttcgtttgcttatctctatctccatccaaatgatttgtaataatacaaatacctaaaataccaatgctttcatctaattatatttttattattacttgtaaacatattaattttaattcttaatttaaaatatatttaaaagtaaataaattttaaataatagttttttacatttatgaatttattttacggttttggcgggaaaacgtgattttacagttttgacgggaaaactcgattttacggtttggcggaaaacataattttacgtttttgacggaaaaacgtaattttacgtttttggcgagaaaacgtgattttacgattttggcggggaaaaatgattttacggtttcggtgagaaaacgtgatttttgcggttttggctggaaacgaaaatttacagttttggtgggaaaaaacgatttgcggttttggcggaaaaacgtatttttacggttttagcgggaaaacggaattttacggttttatcggaaaattttgattttgcggttttagcggaaaatttaatttttattttttaaaaaaataattggaaaataagatttaagtctatttgtttttatctaaaaatacatctaaataatcaattaaaataattaggatatttttgtcatttgttaattctgactgaaccatctccatccaaatgatccaattaaattcagccaaatgagtttcaaaatttagcctaaattttcaaactcatccaaatgattcatttggatggatcatctgaatgaaccgttttttgcactaaacgaacatcaaaactcatctccatccagatgatccatctgaatgatgaaacgaacagagccttaatagaatctgaaaagagtgggtcctcaataattaaaaaccaagaattcaaggggatgggacttttcctataaagaagccaaagcctttctcaccattttctctcatcaccaaacaaacaaacacattcaaatctcataaacacattgataagtaaaaatcctctcgagagacaagaatg

SEQ ID NO: 31748 - DNA, 3003 bp, Unknown
  misc_feature (1)..( 3003): 2750-1469P.txt file - cDNA_ID_3045528; gDNA_ID_1971801; Annot_ID_175722
cagcctaacatcatcgatcaccggaccacatagcgagccagagtgatcgcttttcatgtggtaaaacgtgctcaagaaagtgacacgtgtcctggccgacactgccttgaacacaagcctcccacgtctaaacccgccttttcctttagaagcgtagtccaccatgaccttgccctgtccagcgaacgcttccacaatcattggtccctcacaaccgtctctggcgtctcccacgttgaacgtgagggcgtagaatttgttcagtgacgtcctcactatctgagaaatggcgctctctttgcctccaacaagctcgatggctcggtgtccttcggggacagcgaagtgtgctttgtctacgtacttaacggctttgagagactcgatcatccaaccgggcaatgggctgttatcgtcctcgatgaacggtgggatcagtactccccattttgccgtgggaaacacgtaaggtccttcttcgaaattcccattctttatcagattatctgcaaacagaggtcaccacttaatcaccgaatccggtttactctaaaagattaaaagatatgaatatggtcggttccggtttacttacatccagagaatctgggagggaacaaagccttgatagccacggcgtcgatcaaaggtccgcaagccgggtgctcttcaacaccagggttatggaaccggatctcgatttcgggaccaccagctttaaaagcccatgagtatgagtcccaaccatcgctgccgtacatcgtctggatagggatcacacctgactcatgcgtcacggatatattgagcctctcgtcttgagcgcaggttcgagcggcgctgaacgttattgagtacagacggccaggtaggacggatattttctgggagattgaggcttcgttgcctagtctaacggcggaggaaccctgcggtacgaccaagaccatgtcatcttgtttctgaccggatttaatgaactccacaaagccgattatgttccagtttggtacggcggttcgttccttaaccacggatcctttcatttgggagggtttaggacccaactcgaagttgccgtttggtaataaacctgaaacaaaaaatattaagaaatgttaatttataatctcggatttgagttgaaatgagctttaactagagttactaccatcgcggactggggccgataagacgacattcgaagagatgaagaggagagctaagaggagtgctgcttcttggtacatcatgacttccttgggtgatagatgaagatcagatggtgagtactatccaaagggtgaagaaaggctgggtttttatgagtttgagaatagaagacgagcactggttttgaagaaaacaacgggaatgccactggaagcatcctgggttctattgtcaggtgccacgcagacacagacagctagctcaggaaacatttgacttcatgattagcatttccatttcttcaatgtattgtttaaggggctgccttaacaaccattatattaaactatatattcaaacgtaatttgcgtttgcctatctaaattattcacataaattttcaaagtattaaaatattttttggctttttcagaaaaacatttttgaagatcagtacatccatgcgtaaacgccaaaaaagttctttttgaaaaaaggtttacgggtaagtattccttaaaaagtgattaatctggaaaaaacatacacactaattaatataaatatatagggtacgtaacaactaatgcaaacaaacaacggaaaactaaaatatgtagagaaaaaaacatatatatcatcaccactcaactataatgccatggttttggaaaatgaaagaaatataatgtatatttgagatgtctctaagattagtcatttaacgccatgcaactcatcccaactctaatcaataaaaaataattatgattttcgtatagaatgcgacaaccaaaagttaatgacgggggaaaatatgtgctgttttggaataaatcaactcaacttaaaaatgaagtcaaaaatggtattgattgatgttagatattgatcacattgggatgaacacgtgcaggggtaggttgttttctggtgcagggcacgactgccgactttaccgcattagaagtttcgatcaatattcctaatgtccttattaacatgtcaaccattatcataatccaaactcttcccaacatctttgattaaattatgtatacattagttttaagtttcaatttgttaggcaaagtagagagggacattatggtgaaaaaaaagacaagggacattaagaaactttagttatacgtcaacatatatataaaagacaatggttgggagagagatcacgtgcgacaaggctggaaagattgatttgccgtaatttcaaagcgaaggatttaaaaaaagatgagtcagaaaaaaaagatgaggatatagttcgggggtttgaacccgacgtgaatcgaacacgcaaccttctgatctggagtcagacgcgctaccattgcgccacggatcctcaggtaattacatctatacgtttacttatttatactaacaattagtgaatgataaaaaattaaaaaccccttccgattctaatttcctggcggagcaaatttagggtttatcgtttgcatcggtctcgcgtctcgtttcccacagacacatctctcgaatcttttgaaggccttcattgcaatagattgctcgtaagggataggtaggcctttatgttctgccgcttaatttcttcgccggattctgtttgattcattttaaggtgagtgaccccatcgcttttagattacagacaagtatgtatttatggtttgaatgatgcttattgtcttgttgttagcttagattttacattcagccattaatttagtattaataagcttcggttctacttgttttaagcagttaaatgctttaatctctgaatctttgaaacttgctcctctcttaggaattaggatg

SEQ ID NO: 31749 - DNA, 3003 bp, Unknown
  misc_feature (1)..( 3003): 2750-1469P.txt file - cDNA_ID_3045538; gDNA_ID_1971801; Annot_ID_175715
agaaagaggaatattttggttctgagaaaagacataaaaaaaacaatagagaaaccttgtaaaatcccgccaaaattttcacagaacccctaaaaaagtttgagtgttgccgccatccatagatttattccaccatcttcatctctggaaatccttcgccgccgcgagaattgacattgttttgattgcatataaatctccgcaacagtatggtacgttttgtttagatctacggttttgttatcatccgttaattcggcgacatcagcaacgatttgcttcatccacaaaccgaataggttcggtttaaacataagcctgggatttgagtcaattatttgcatttgcctacttttttcaattttctgggcacgccagatgtttgatgaattgctcgaatagatagatgtcaaagtgaagcgaggagacccgccgattcgacatgtacgggagaaaagggtatcagcttatcaaagattttgccaccggagagaagggtcagctcaaacctttcaacgtaagacttcaagctcccacctttatgacactaaatctctcaatttatacaggctattgaaatttttgagtatctgtaatctaacgtatatcaatcttgcaagtttggccagtaggttttgattataggtgacggaatgttagcaaatttccagtcctgggttgataatatccaattctgtaattagaaagtattatcttggttagctatgaggtagattagttctttaacctcttgtatttctaacagagcaaactctttgatgaaacaatcgaagagtgtgaccagaatcaccatcttatccagtccttgataaggtattgatccccttttttacactgttgcattttttcaatccatcacaaaagacttacttctgattcattgaggttgatgtttccatttacaggaaaatgcaacaagaaggtttggatgttcagaacaacagaaacgctgaccactatggagcactaattcaccaccttgctttgatccggaacaagcgctgcctcatggcttatgtgtgagaaccacgtttcctatcagtaacactatatctggacactcaatttcttaaaaatagctgcaattggtgtcgctatgcaggtacaaccgagcagaaattgtgcgtgatttggcatggagagtagggcttgaacttctcgaccttccctctgaaatccaagagaagctcactacactagagaaggaatacttcaaaaaccattcggttgctctaaaatcatacatgggaaaagtaggaatcgagttgaatgtcgtaagtcctctttccaccaccctggcttttattaattaattggatttttcttgtttggtggacttgtaactagtaatctcctcttgatccatttcttgaaggatatggtccctcctaaagatccttatatcaaggtcagaattttggatgatattgatgaaggaatcgtgctgagtgacaaaacaacaaattttgcccgtcattctatgcatttcctcaaacgtactgatgcggaaccatacattgctcgggtcagtctttttcgttattccttccctaaaactagaatgatctaaagcccataaacttccacgaactgagaaattcaaagaatgagccttgctcaaattcgcagagatgtagatagaaccttgattacagccttccctagcaggtttaataggaaaaaagaagactgcttaagatagattataactgaaaaaacgaaactatagaattcctgaaagatctgaatagtgatgcaaatagaagttttaggtttagaatatgcgtgaagtgtaatctgaagaattgacttttgtcacatttcttggtaccgtcaagattacataaggtcgaaacatttcataaactgtgagtgtattggattctttggttttccatgtgatgtttgtcatagtatgccaaaggagttgctaagcaaatgcagtctgattctactgcctagcttaaaaggggtctcgtgtcccatcatttggataaagagtttctaattgttgagatgtgaatgggataacagggccaaatggaggagctgacaggatgattgatctaatcagaagctgtggtgggctcagatgaatcacggtcgggtctgtgatcaaagaatgtaagcttacttagccttgtataattgtaagacaggaacatgaaaccagaaacctcatactcaaactcatgtaacaattatttatcttacaaagttacttctgtagtgcataacattcactagcaataatgcagttttgacaagctcaaaattaccttttttccaatggacaatctttcaaggcttcaatactcagtctttttgttacttgctggcttttcactatagaagtgaacctgcagctaaaaagataagaatctgccacaaatgctgcagaaaaatgagaatatgtcatctacaaaacatacctcaagattagcttgtaagatctgaatagtgatgaggcatttactcgaacgatgatcattgtcacatctctgattaatgtaaacgataaacggatttttgatgtttccatatagtttgatattgtctctttccttaggcgttttcaaaaccataaacataggtgaatgttatttacaatgtctctatagttatgattaatttgagttgctactcatcttgtttctgaaaggaggaattcttgcatcttttgaggattagttttttgacttgcatacagaaaatgtgttcttagtctcttgccttcttagttgttaccaccactgcttcgtcaatattttattattggattcacaacaaaaaaattcctctttattttttatgagaaaaggggaaaaaacacttaaaaccttttgtgttgaccagaaaaaaaaagagggataaaacgtgggggtattaatgggaatggggatgttccacatatttctgaaatttttttccctctgctacgaaacctttgaaatttgtgtcatcgaaatcgaaaccaaaatg

SEQ ID NO: 31750 - DNA, 3000 bp, Unknown; identical to SEQ ID NO: 8450
  misc_feature (1)..( 3000): 2750-1469P.txt file - cDNA_ID_3045544; gDNA_ID_1971801; Annot_ID_175711

SEQ ID NO: 31751 - DNA, 3000 bp, Unknown; identical to SEQ ID NO: 8430
  misc_feature (1)..( 3000): 2750-1469P.txt file - cDNA_ID_3045555; gDNA_ID_1971801; Annot_ID_175694

SEQ ID NO: 31752 - DNA, 3000 bp, Unknown; identical to SEQ ID NO: 8429
  misc_feature (1)..( 3000): 2750-1469P.txt file - cDNA_ID_3045559; gDNA_ID_1971801; Annot_ID_175692

SEQ ID NO: 31753 - DNA, 3003 bp, Unknown; identical to SEQ ID NO: 21580
  misc_feature (1)..( 3003): 2750-1469P.txt file - cDNA_ID_3045563; gDNA_ID_1971801; Annot_ID_175688

SEQ ID NO: 31754 - DNA, 3003 bp, Unknown; identical to SEQ ID NO: 21581
  misc_feature (1)..( 3003): 2750-1469P.txt file - cDNA_ID_3045577; gDNA_ID_1971801; Annot_ID_175682

SEQ ID NO: 31755 - DNA, 3000 bp, Unknown; identical to SEQ ID NO: 8424
  misc_feature (1)..( 3000): 2750-1469P.txt file - cDNA_ID_3045581; gDNA_ID_1971801; Annot_ID_175681

SEQ ID NO: 31756 - DNA, 3003 bp, Unknown; identical to SEQ ID NO: 19046
  misc_feature (1)..( 3003): 2750-1469P.txt file - cDNA_ID_3045591; gDNA_ID_1971811; Annot_ID_175742

SEQ ID NO: 31757 - DNA, 3003 bp, Unknown; identical to SEQ ID NO: 19046
  misc_feature (1)..( 3003): 2750-1469P.txt file - cDNA_ID_3045591; gDNA_ID_2926175; Annot_ID_199767

SEQ ID NO: 31758 - DNA, 3000 bp, Unknown
  misc_feature (1)..( 3000): 2750-1469P.txt file - cDNA_ID_3045606; gDNA_ID_1971812; Annot_ID_175791
ttgtaacccaatacggaaacaaaaattctttctgagcccaaaatgtaattttagccttagtattttatttacataaaagtccttttaatcgttggctattgcatttatcgcccaatacttgtctttgagctcaagaaatatagtttactaaaaggctgggtttttctggatttcttactcccaaaccgatacaagatcgaagctttgccttctgtttcttcgaaaatctaccatggctgctctacaataccttgaatcgcagaaaaatgcgcacccagagcttggtgagtggtacaattcgctcgcagatctgtaccagaagaagctctggcatcagctcactcttaagctcgagcagttcatcgctctctctgtctttcaggtcaatctcttgaattttcatcgtttcgtagttcttctgtgtgattagggttcatagatctcgagaaagttaataggagtcgtcatgttagacttgggtttatagagagatctgaaggattcgttccgactcttaggtgatttttcagattcattgaaaagctttgtattggtgaattatcgcacttctgtgaccaaagctttcgaatattttagctcagagatacccaaaaactcagctttacaaggtttacagatttgttaatgacgtgtttccccctgtttatgttcataatctttgcaggctggagatgctttaatacagctttacaacaatttcatcactgactttgagacgaggatcaatcttctgaagcttgcgcatttcgctgttgtagtctcccgacagtatcctgagaaagaagctgcagttagttatcttgaaggagtgattgagaagcttaaagctactaaagagtcaaggataaatgaaccaattagctatatagaaacacaaatagctttgttcaagcttgagcaaggtgaccagaaggagtgcaagaaaatcttggacgatggaaaaagcctgcttgatagtatgactgacattgatccatcagtttatgccaacttcttttgggtctcttctcagtaccataaagtccgtcaagagttctctgagttctataaaaatgctcttctttacctcgcttatacgtctgtggactcactctcggaatcatttaagctggtacgtccctctgaatgttctaatcattcatatatgatatatgtagtcgttacgttaccaaatggtcttttagcaattttggataagtattagcactctatgaaaggaaacttacagtgaaaaatgctttatctctgtaaattgctttgtgttccaatcaaaatgttaatatcatatactttcgtttctttcaggatttggcttttgatttgtcgctttcagctctacttggggagaatatctataactttggggaactgttagcccatccaattgtaagtttcccttcatcctccaaattagcaaaccacagatttattcaccattatagataaaagaacactgacatgttatatatgttatggcagttgaaaagtctgcttggaacaaatgtggaatggctttaccacattctacaagcattcaaccacggagatttagttcagtaccaagaactctgtcgtgtgcacaatgcatcgttgagtgctcaaccagcactggttgagaatgagaagaaactattagagaagatcaacattctctgccttattgagatcattttcaggtattcattctctgtaggagtcatcttatacccatatacagatgaaaacaaacttagtacttaacttgtatataacatctttgccacagccgacctgctgaagataggaccatacctttgagtgtcattgccgagcgtactaaactttcaatcgaagatgttgagcaccttctcatgaagagcttatcggtgagtacctttttctttcctctctctttctctctatctcattctatcagtaacattaaaaatctaaagaagattggcaagacgcagactcgaaatcttcttgaatgtgtgattctgtattggttgattgtgaaaactgaggagaatgagttattgcaggtgcacttgatagagggaatactagatcaggtgaatggaacagtttacgtctcatgggcgcaaccgagggtgttaggaataccgcagatcaagtcattgagggatcagctagacagctgggtcgataaggttcacaccacattgttatctgttgaggccgagacacctgatcttgttgcagcttaaactcttctttcctcttttttccttcactgttcgtttaagctacagattgtaacattctctgaggattaaatgcaacttccttttaagtttttaggtattacagttatacttttgaactttgttctccacagacacatgaatctatcctattaagttgagtttcatcgttagtgttgcctttaaggcttaagcctatttgcataacaaatggtccaacttttgttattagacgtgtgaaaaactcataaatctcaaatagtggaatgaatccaaattgtcaacttctgaaatgaaaagtgtaagggtaaaatagtcaaaacatattaaaccccaattatcaccatcgtttcgtttcaatcaaaattttccgattttgagattttgaaacagagcagtcaagtctcaaagactccagctcatctgtctgcttcgtaagctgctcgctctctaaatgttttgtcttctggggaatagattttagggatcatcggtagatgctgttggattgacataatccagatctgatttcttctacaaaaacatagctttcttctctgggaacaatagattttgattgttgtttctgggttttagatttctaatgttggggttttggtgattcgatttctcaataatgcttcaaaatcgaaaattgaatcggttagagctattttgggaatctctttgcgttaattcgaattagcatatttgcagaataatccaatgagctctgtttttatttgtgaatagatattgaggtccaaagatg

SEQ ID NO: 31759 - DNA, 3000 bp, Unknown; identical to SEQ ID NO: 31758
  misc_feature (1)..( 3000): 2750-1469P.txt file - cDNA_ID_3045606; gDNA_ID_2926171; Annot_ID_199535

SEQ ID NO: 31760 - DNA, 3003 bp, Unknown
  misc_feature (1)..( 3003): 2750-1469P.txt file - cDNA_ID_3045608; gDNA_ID_1971812; Annot_ID_175783
cttatatagtcacatcaacattgagacgagtcttgcgagaagggacaatgacggaagaaaacgcaacgccactgcaaccgccacaaacgcaggaggatgatgaagaggaaaaggcaatgtatgctatctgggcagtaccggaggatgacgtggaggatcggcttcagaggttaatggaagggctcaggtcagagtttggcggtccagcatttgatcctcacttaaccctcgttggacctttcccttacaaacttacggccagcgaggctaaacggatgttcaagtcggcgtgtgaaggttttaaggtgtatcctgctaccgttgaccaagtctccgccggaacttcttactttcagtgtctctacgtatctctccggcacaccgtagaggtatattttacatgcataaactgaaacaaatctttaaccgaaattgaaacttataagctaccggacattgtttttgcgtttgtcttatgtttacaggtaatgaatgctgccggacatttcatggcccacttcaaacccttcaccggaaaatgtatgatctaatctcgattaatcggattttaatatttggttgggaagtaattaaaacgttattattgtgaaaaacactaaaaatcatattattaccaagaaacgtgtttttttgtttctttctctttctgtgtacgtgtatttgaaacgttggattgttgcagtttacgtgccacacatgagcatactctacggcgatttaacggagagggagaagaagaaagcgttagagaaagcttacacgcttgattcgagtctcgacggattgaattttaagataaatcgagttgcattatggataaccgatgcagacgttggatcgtgggtgaaagttgacgaacatactctaatttcttaaatgaaataaagtaaataaatattatggttttgggcctagtctccaatcttcctcttgtgctttgtgtgttgtgtgcaatttgtctccccttattcggttttcatctgctgcattggtttagtaaggtatgatgttccatggttcggctcaaatttgttatcggtttggtctaaatgtatctttgcctctggcttaattctatgttaatatgaacatagtttatggatcttgtgggaatattcctccttctgtttcttgttaagtgttttggtttatatcttgaagaagaatgacctagtcaaggatttgaatcattggactcttatcaaactgataatatcataataagatgattcaagatataatatttaaaagcacacaatcatgaatcaatttggagtctagttgacatttgttactaaattactaacaaaaggttcaaaaagtttgaattgacattaaagataagaatcattgataagggtgcaggaggaggaaaaagctataagtaaacaacttgtcattcgtcgaaactaaaatatgatagctatgtgcatatgttttaacatagatttaaaatttaatgtaaagttttttcatcataatttagtacgagtataggacaaaacttggtaagattttgctcgaatttcgtaaaatataatactttcttgaaactttttatttaagtaacgttgacattcatgtgacgtgtatgtatccaattttggttaataagatgctatgaaatctaattattatactttcattcaaccactattcgtatctaattaattagaatattcttttaattttagtaaaccaaatgagctatagaaaaacatctctataagagtagctaggaaccaatttggaatgtatagttgacatttgttactaaatcacttagagaaactccataaagttggattgaaatcaaaggagaagtaatattaaaatgttttcagcaggaacatatgagctataattagacaacttgtcatttaagacaacaaattgattatcatcatgtcttaagatacgaatgtcaaaatcttgaccttgcatgttagttgttatacataactggttgaaaagatagttaagtctaaaggttgacaaatgatgaaataaaaattagaaaaaatgttaaagccatacaaatccacatgttgtgaagttgaataagtaagttaaacgagttttggttctaaactgaaatttgacccccaaaaaaaagatgaggatgcagatgtcaatctttacctattcaatgtacaccacaataaattgaatcacattcttagcatgaaaccttatccaatttgtttgtatattttttccttggccaactaaagtggctattatcaagaaacaactaaagtaccctgtaaattgataaagaaaacaagtggaaaatatgtaaatatatcattttagaattcaaaccaaaatagaactcatgtaatcttataattcttatcccctttttaaaaagtctttaattttagacatgactttaaaaattcacgagccaggttggttacaaacttacaaaaactcgtcggcgcatgtaaaacgcagtcgtttaaccgaatcgaatccaaacacgtgcgggttcatccacaccgttaagtttcatctgacgctgtttacatcaacggctaagatttgttattctctcttttcgtcaacgcattgttaccgtggcgccagatatgacgtctatatacgcgcataaaatcacgtgacaaacacgcgctcaacaaaagctggttcttctccttttcctctccgatgactttcttaccgaccagcttagtcttctccattacggcatcattcacctataaatttcgccgctgggtttaattctctattcattcagaaccaaaaaagaagaaacctttttgattctctttgcgatttctttgttcaatctcttctcagattgtgtgaatcgggtttaaatcggggttttagggtctctgttttcaaaagggtaccaaaaagtttggagctttactgtagaaagatttgatttttcgttgacccactccgagattttcggatacaaatcagggttttagggtttttgttggaatg

SEQ ID NO: 31761 - DNA, 3003 bp, Unknown; identical to SEQ ID NO: 31760
  misc_feature (1)..( 3003): 2750-1469P.txt file - cDNA_ID_3045608; gDNA_ID_2926171; Annot_ID_199527

SEQ ID NO: 31762 - DNA, 3003 bp, Unknown; identical to SEQ ID NO: 19349
  misc_feature (1)..( 3003): 2750-1469P.txt file - cDNA_ID_3045638; gDNA_ID_1971813; Annot_ID_175846

SEQ ID NO: 31763 - DNA, 3000 bp, Unknown
  misc_feature (1)..( 3000): 2750-1469P.txt file - cDNA_ID_3045649; gDNA_ID_1971814; Annot_ID_175896
attttgacaggcacttttagttttcattcaaccataaaatgtgaaaaaggagtatttagccgatataatacctctaaaagatagtattactctcatgttcatgtacctaactttctttgaacaaacattaacattgagcattagtatttgtttacgccgagttctacattcatgcatcatctgatcatataattaagaaacataattacaagagacaaataaaatattttcttaggccaagaagacaagaaccatgattaggatctccattgatatcgtaattatatatcatcatatttagtcttccaccagattgcgtttgccatgattatgttttcccgatcacatttttctgaagtcaaactaaaacatatatatcaatcccacaaaaagaaatagagtaaaaaattggcccgacgcgtataaagacctaaatgttgcactattttaaccaagtaaaaacttaagacatgagtggctacatatttacataagttaattatgtaaaaaccactttacaattttaaagttactgtgaaaacataattttttcaaagcacatatagcttaaatttaccagggtaatcaaatcgcgacacctaaacatgacatcatcatatttgaagaggccaatcaaattggtctaacctcccaaacccttcacgccttgaaacgtggtaagctaccacgcgagaagagttatggaggccataatatcagtttgactcctccagaaagctttagtgaacatatatccaagtcccatgaacatgagtctagctcatgaactctttcaattctcaacgtcaacgatgtccataacatatgttgcttacttttcatgaattttattttcttcaatccaataattcaaaatttaatataaaaattgtctaaaagtgaatagaagaaatatatattttacaatctaaaaatgattaagaaacaaggcaacaccgcacgtgtatcaaagacaaacaactcgccgtcacgaccagctaccgagtccgacccgaacccgattacatcatcaacccgacccgctatcactctacaaatcatcatcgccttccttcctccgccacctccactactcacgtacgcttcaccactacccgaaaacgtacacacagcctgacctttcccaccggcaaaaacacacgcgccaccgttaaacccatcaagaaccggataaaacctcatcatctcattaccatcagccaaacaccgtgcatcctcttcttcacacgtgcctccgttaaaacccgcacgtgacttcacaacctctctatactcctcgaaccgggttacagtccttgacccgtgttccactttgaaaatcatctcgatccgacccggaaactcgtcggagctccagcttgaatgaaatataatctccactacgtttcttgacgggtgaccatcgggcagctcggtcagtgcgtctgatgttcgggcagatttgcttcgtcgggtccggtttggcgggttaagtaactctgtttcggttcgacaagacttgaaacgccttagattcgggtcgggtttctggtttttcttgcttaaccgggtatcgatcacgtctttgacgcaatgtgagctctttcgactacaattgtaactcgacgacgacattagtgatttactgttgaaattgtagacatcatcgaacgcttttgatttgcattgcaatgatttgatccacccatttggcatgttcgggttcttggatccggatctttattgttcttgtctctctttctctcttcaacaagttatgtatatgtatgttatgaacaaaaaaaatacccgcgagcgttttatcatatgatcattcatattacgattttaccctctaatttttctcctgggcctggcccatatggtttacataatcaatacctagaaaaatatgatacttatttggtttgatgtggtgactcaaattgtataatagattgattataagtttctaaacaaatattttatgaaatccaaacttattattcgtatctgatttttttttttgtgtgtgtgtgtattcaagcgactgattttgttgataaggatttttatttattctttcttgaaactaaagttattgaagaatgaatttatgattaaaacaggcagagtgataagagagaagttaggtgaagaaagcaagaattttctttacatttaatgaggaaagcaaattgacgcagtgtttccttttaacatatcaagaattgaatgatttaagtgttgtgtcgggttttatttattgagatattgacaatcataaataggaatccgagtaactttactgtagtgtaacaataaggtaagggaatcagtaggaccgattcttaagttttatttgaacatacaaactaaaaaaacacccccattattgtcaaaagaaaaggtagagaaaaaggaaaaaaacttgtattaagatgtcatattgtacacttttacaagtatgaaaaacatcggaatgaagcatatagtaacaaattagggatattgattgcaacaactagagtaaccaacgattaagttatgtttgttttgcagttgctagcgacaatgatcaataattatattgtgttggttggttttgtggtcgctaacgaatagtaatattatattgatgatgaaaatttaaaacgttaaaacatgtatttgttggcaaagtggtataaatgaactaacaagaacaaaaataacaagatttagtcgcttttactggtcactaataactacgaaacgaagtggaccttaaaaatctaaggtggttatgttagcgaggaaagtgactgatcttttctctttatgggcttaataaaaaaggcccaagatgcacatatttttctaatggattagtgttcttctcttagaaagcgacgtcgttttgttagactcaacttcacaattaatttttttttctttgactaccgtccctttaaacgacgacggttttgtttttgacagagatctgttacgacagttatg

SEQ ID NO: 31764 - DNA, 3000 bp, Unknown; identical to SEQ ID NO: 8515
  misc_feature (1)..( 3000): 2750-1469P.txt file - cDNA_ID_3045656; gDNA_ID_1971814; Annot_ID_175890

SEQ ID NO: 31765 - DNA, 3000 bp, Unknown; identical to SEQ ID NO: 8515
  misc_feature (1)..( 3000): 2750-1469P.txt file - cDNA_ID_3045656; gDNA_ID_2926180; Annot_ID_200181

SEQ ID NO: 31766 - DNA, 426 bp, Unknown; identical to SEQ ID NO: 8542
  misc_feature (1)..( 426): 2750-1469P.txt file - cDNA_ID_3045665; gDNA_ID_1971815; Annot_ID_58223

SEQ ID NO: 31767 - DNA, 3000 bp, Unknown; identical to SEQ ID NO: 9887
  misc_feature (1)..( 3000): 2750-1469P.txt file - cDNA_ID_3045665; gDNA_ID_2096290; Annot_ID_195331

SEQ ID NO: 31768 - DNA, 3000 bp, Unknown
  misc_feature (1)..( 3000): 2750-1469P.txt file - cDNA_ID_3045665; gDNA_ID_2926169; Annot_ID_140050
tgtaattaaaacgacgtcgtatcatagttaaccctacgagaggaagtacattagtttggagaagagtaatagacagagagatagagagaaagagaagcagttcggagaaacaatggcggtagaagacactcccaaatctgttgtaacggaagaagctaagcctaattcaatagagaatccgattgatcgataccatgaggaaggtgatgatgccgaagaaggagagatcgccggaggagaaggagacggaaacgttgacgaatcgagcaaatccggtgttcctgaatcgcatcctctggaacattcatggactttctggttcgataatcctgctgtgaaatcgaaacaaacctcttggggaagttccttgcgacccgtgtttacgttttcaactgttgaggaattttggaggttaggtttttgattttattttatttccgactcaatatctggtttgttcaattattctgcatctgggttttgttataggtttcgatttgttgaggaaagttatgttctttattgggggattagaagatcccattgaagtcattatatgtttttgatgaattgctatgtttggtgtttgaattcgtagctaaagcttatgttagggtttagctttgatattctgttcacttgtttgtgaagtaaagtagaagagcaaagtttgtgagagaaagagaccaactttgaaatctttcttagtggttttctaggtatcagaatttgagcaaacactttcgtgatgactgagggttgatgttgtatagttcttgctcttcccaatgagattcataggtttgtgtattgttctttcgacttcttattttaaaagacattttggtttgcagtttgtacaacaacatgaagcatccgagcaagttagctcacggagctgacttctactgtttcaaacacatcattgaacctaagtgggaggatcctatttgtgctaatggaggaaaatggactatgactttccctaaggagaagtctgataagagctggctctacactgtacggtttctattcttcttttattttgactcgtaactcctgcgtcatcatccaattgaatctcaccggtttttctttttacatgcttggtttagttgcttgcattgattggagagcagtttgatcatggagatgaaatatgtggagcagttgtcaacattagaggaaagcaagaaaggatatctatttggactaaaaatgcttcaaacgaagctgctcaggtaaatagaaaagacctttctcatcaaaactcatcaaacagtctctctgtgtaaaaataagactttaattctcgtctgcatcaaatgttgcaggtgagcattggaaaacaatggaaggagtttctcgattacaacaacagcataggtttcatcatccatgtaagaagaaagcttctcataattctaattcaaaagtcttcattttcttcagatctctcattgtttggtttggtttctttttttttcaggaggatgcgaagaagctcgacaggaatgcaaagaacgcttacaccgcttgaaacctctcaaatctttgcattgtttcaattacagttttgtatgtgagagatctctatttatctaaacatgacttgacagtctgtctttgctagtgttgattgttcacgaagctctaacatttcatttagtaatatattagtatggttcttcataatatttacgttggtgcccttgtataaaaccaccggagtgagcgcaagctttacagacaaacagtgcttctgtctacccaaggcgggccttaaaagcctgaatagtgtatatgtttacttgacaagagcccatgtacactcatgagcgattgactttaaccggttttagagaaaagtacttttacattgtcacatttacatcctttataattaaccttttaatttaggttttaaagatccacctcagcatttattttaatggaatgattatttagcagtgtgaaccgattaactcggtttttgacggtgaccggtttagaggaaatgggagtgtcggtaggagatctaagtagcgagtatgtaaattgtccaactgtctgaaaaggaccacttgggacgacaagattcttcggctaataataatacatcactcgtttcaacaaataaaattttcctttctattattatgcaatcttatagcatatggatttgatcttttttaatatataaacaaaaggttttccaattatgctaaaccataatctgaaattgattttaaatagctacaatcaactacccaaaagcttcaaatatgcaaaataataaagtataggtttatatatataaacgcacacaaaagaggttgaataaaaataaacataaggatgcatgtgcagtccagattagatctaaatctattgagtattgtaataatattgttatgaagatcttgctgcgaaactacacacatttaattccaacatgttttgtttatagaaattgaataaaatcaaacgcgccttcatcttcaagttaaaaatcaaatcttaattagtgaagacaaagaagaagaagacattattttaagtgagttctctctctgtcacactcacaaagctttatactttctggctactgcaagctcatcactgaaaagagcttaaaccagagagatctgataagagaaattttagagtctctctgcttcaacaagatctacatcgaccaggttcaatatttttctctactgttagttcgtgttctagctctgtttcaacgagatccgattctgtgttttcgatttcagtgctaaagttacggtctttgaatctttctatgttaggattagtcttttgaatccataaactctagatttcaattgttaaaggctaggttttgattagtttgaattagctagatccttttttaacagatcttgatgtttaagctcaaagttgtgtcgttatactgagaatcaagtttgtgatttgttgggaatggtttcaggagattagaaagaatcaatg

SEQ ID NO: 31769 - DNA, 3000 bp, Unknown; identical to SEQ ID NO: 31768
  misc_feature (1)..( 3000): 2750-1469P.txt file - cDNA_ID_3045665; gDNA_ID_2926169; Annot_ID_199384

SEQ ID NO: 31770 - DNA, 3003 bp, Unknown
  misc_feature (1)..( 3003): 2750-1469P.txt file - cDNA_ID_3045678; gDNA_ID_1971815; Annot_ID_175942
taaatttatcatatgttggaatatttagtgttttattcaggatgaatcatgtgttggaataacagtaaatatttcttctttttttgaagaacaaggataacagtaaatagttcagaattactttttaccatagaattggttcatctctttcaaatctagtttttgttctgcaaataaatttgatttgaacgcaaggaaagactcacaactcacaaggcttccttttgtagggttaatcactcacaaatctggtttagcattacaaaataaattgtccgttcttattattaaactccggaaataaaagaaataaattcactaatatttctaattagcatcttcacaaaattcactacctacaacatctataaccaatacaacaacaagaaaaaaaaaatctaattgccaaaaaaaagtgtataattatttcttcttcaatttttagattgcgtttgaccagagacttcaccaaaccggcgatgatcatatcctctgtttctaataagttcagcgaacgtaacacaactctctgtctggctatgtcctctcgtgaccttaatctttacatgttctggtaatctcaatgtatacttatcttcttcctccggtttatttctcactatcgagtgtcccgtagaatgcgatctagagaatttctccggcaagttttgttcctttttgatgctactggtctgtcctgaagatggccaagtatcaatctgtgttgttgtctgctgacgatgatgatcgtcttcttcgtcgtcgcttgtttcttgaatcacatctatgatcatctcatcgacagtaggcttggtgttttccggtggcggaggaggatcaagatcccgacgacaaacagggcaagttctgtgagattcgaaccagagatcgatgcattcttggtggaacacgtggtagcatgttgtcaagagacgtagcacgtgatctccgtcgaattcgagaagacaaatggcgcattcgaggccgtatttctcttcccggagatctttaacggaggagtaaggaaaagtgggaaatgagttaatgattcgaagttcaaggccgggatttaccggtggagcttccggttgctggaggggattgtcggatacggtgtctccgccgtggtggagacgccaagcttgcaccattgtgtcgaggaaacacttgcaaaaatagagagtgaagaaaccgatgaagaagaaaacgaggaggattacggtgaggatcaccgtgagaggcggtgtaacgtaatgttgttgcggaggttgcggtgccagaggtgaaggaattattgtcgacattacggtggccggagactgaatatctccgccgtgagacttctcatataccaaaaaaaaacaagaaagcgagagacaagagaaattcacttatttcaaaggttattttaattattagagttcagttttatttggtatagtgtgtggaaaatgtgtgtttggtgtgagagaaagagtgttaggaagttttggttactaaaaataaaaagtgtgttttgggtttggttatgtttgtttggtttgtttgcttaatgctatagcattgaacgagtcgtctgtgacatttgtttaacgttaagccacttcgtccttaaaaatagttaagttttttttctttttctttggttttaatagtatataagtctcgtttctaacaagcaataattaggatttaggttcatgacacatttcggctaatggcttttctttccttatatatacacaattcatcaaggtataaggatgttttgaatatacttgtttggtatgatcggtatacttcataaatcaactgatcatcaaaaactctcgatgaacgaccatattcttcgaaatcaatggtcattgagctatctttgtatttggtatacttttgaatcaacgaacatcggatcaactagttttgcacaagctcattccacaaaggtgtccacacggacctcaattgatgttttgcacgaagagacatgcatatatcggggatgtgaatttgcaaaacaaggacatcagtcctttagagctttggttgcttaatcatttccattttttctatttgaaaattttaatattatgaagaggagacaaaaatatagacccgtcggtaatcacttatctttgttttgacaataatattataagtcaagtactagtttccatcttccacagttagtaaacaaaactgttactgtattttataagatcatctttaccattaatagtgtgaaacaaattaaaagacaaagtcacaactagataacaaccatattatatgcatttgggaaaaccttatcttatcttatcaaaaacagcaaaatatccccaattgaatcagtatagtgaatccagatcttcccaatttcatagttaaagacaagaaaatgaaatgtcattttgtgtgattgtgatattaatcattcacatattaacatcattctcatcccatcgttaatccattacattttattgtatagatttgacacacaaaacaaaacaaaatgcatgcaaagacaattagtaaaacaacttctttttttgatctaacatcatgaataacatttggcatgacaacagaaattttatagtttcgataataatacagtaatactcatagttttatgattctgactgaatcgccaattgtttttcattaaagagaaaaatactatggtaaggaactaaggatccatgtggtaatcgaagagtcgtcgatcacgtgcaatcctccacacgtgttaagtcagctcgtagttgattcttcccccttgacggtcatctcatcggacggttgagatcagccaactttaagtgtatcacacggaaaagggaaatgtagcgcgagaaagtcaaaagatccaacggtcgatatgaaacaaaagtcagataatcgtacggtagaaacgaagctatatatagcaacaattggattattcttatcatcatcactctctgagatcgaagagaaagcaaaatcaaagttgtgatg

SEQ ID NO: 31771 - DNA, 3003 bp, Unknown; identical to SEQ ID NO: 31770
  misc_feature (1)..( 3003): 2750-1469P.txt file - cDNA_ID_3045678; gDNA_ID_2926169; Annot_ID_199373

SEQ ID NO: 31772 - DNA, 3000 bp, Unknown; identical to SEQ ID NO: 8533
  misc_feature (1)..( 3000): 2750-1469P.txt file - cDNA_ID_3045682; gDNA_ID_1971815; Annot_ID_175937

SEQ ID NO: 31773 - DNA, 3003 bp, Unknown; identical to SEQ ID NO: 20373
  misc_feature (1)..( 3003): 2750-1469P.txt file - cDNA_ID_3045686; gDNA_ID_1971815; Annot_ID_175934

SEQ ID NO: 31774 - DNA, 3003 bp, Unknown; identical to SEQ ID NO: 21326
  misc_feature (1)..( 3003): 2750-1469P.txt file - cDNA_ID_3045692; gDNA_ID_1971815; Annot_ID_175931

SEQ ID NO: 31775 - DNA, 3003 bp, Unknown; identical to SEQ ID NO: 21326
  misc_feature (1)..( 3003): 2750-1469P.txt file - cDNA_ID_3045692; gDNA_ID_2926169; Annot_ID_199363

SEQ ID NO: 31776 - DNA, 3000 bp, Unknown
  misc_feature (1)..( 3000): 2750-1469P.txt file - cDNA_ID_3045698; gDNA_ID_1971815; Annot_ID_175923
tgcaaaatcattatttgatataccatcatatatcgataacatgcataagctaatatccgctaaattaattaaaataaaatcattatatacttctcgctcaatatgagacagttcattgttatcattgagtatagcctctgcaacttctgcatttttaacactatcgccatcaccatcatgctgcacatacgatgtcatttgctcctcattctaaaaacgtaaatacgtaattaactaattatattcatttttccatggaaatcaaagatatattcttccatcatgatgaacagaaatggataatatatatctacttctgagaaagatgttctgtaatatcagattcgtttaagtcatatgtgttcttagaggaaaataatggtgtcacctctttagatacaacaatatgatcatagtcatgattgttcaaaatcatagttgatattctatattatttcttgacaaatctattagagtccaaatccctgaatctttaagaaaaaaaaaactaaaacattaatgaatctcaaacatcaatagtaatgaaccacgatttaaaacctgattcataagaagaactaactaatagaattgatgattgtgattttctaacgataaaagaacagagcaaacaaaatcaacacaattgaaggagagaaaagggaaaaaatcttcataaataaaactagagaagtgatcaatcttaataaatttatatttcactccttgatatcatcaaattttaagataaaaatgaaaaatcttggaatccttgatccaatttgatttttgattcataatcaggatacaagttataaacaaatgatcatcttgaatcataattagacttcacaaataaaatttccaaatcattcataactttgaaaaaaatataaaccatatataatatcctaaatttatagaataacaataaaattattttagccaaaataatcaaaacaaaaaccataattcttcgaaatttaatacgtttttcacttgatgcaaagaaaaatccaaatcaaagtgaagataaatagatgaattttgaaaaatacttacataaaagtccaaacaacataaaaagtgatgagcaaagagggagaagatcacaaatatttaaagaccaaatttagagccagtacatcaattcattaacttattatgttaatatatcttgtcttattttattttctttgtaactaaagcaatttaatgatgaattgtatttcgattatctattttaggaattatattcagttagtatttgctcttattatctcttgattattattttaatttaatttaattaattttagaccatatatgcttgttaacttttaaatagaaatagatttatggctctatttttgttatttttgttatgacatgtgtttgaattaagaatacatataaattgagatgacttttgtatttgcatgtgtaacctaagttatgaaaacaaaatgtaatatcgtcgtaatgtagtttttatatattgaaccgcccacaagtatattcatgatttaactcaacgatttagtcctaaaactggtgggcctactctacaaatggctacattaggatttgggaaatattatattaactcttataatcaaaaactttaggttacatatagttacatagtaaaagagtttcctattgtatacgatcaagtagtatatattgttttgtcttttaatcgtgatagagaagtacatatatgtctcgtcacaattatatgtattttttaaaaactagtcgttatatgtgttaagtatgaaatagatgacataaaatgaattagtatcctttggaatcatgaagtttctatattaagtatattgatggacgtcaacaattaccagatcctaataagtgcacatcatgtatatctaacatttcatccctatgttaagattagagatatgcacctcgtatccattgataattaatgattgtttgtgatgtcaatttttagtaaatgtgtgtacgtctattaccagatgcatgtaggtcgaattgcaacatagagtagcacatttttttcttgcattgttccttaaataaaataagcaaaatacctttgaaataaaatcattttgcaggcttaataggtggctacatgattagcagtatatgaactcgttggatgatacaatgtttatgtttttgaaataaaagcattcaaaccaatctcatacaataatagatagttccatatccagcataccatctccctgaggtgttcgtggtgctccctcccaagacacttgtttttagagtttttttttttttctctttcagaaaaccaagacatattctttatgagaatttccctagctcatacactccatcaaagtcattcttctctttcaaacatacttaagatccctctaggcacaactcttgtgtatcctttttcgtaggataaacttcacataattaacaaaacccaacattttcttgtgtaaaaaaaaatacgaagaatgttacatatgttgtaatagtaacgcctcccaaaagaaacaccttatgggaaacccacatgatacatatgttatacatgctcagtctcattcatatatgttaagatgtcaagcaatggatatgagtctcattctgacgaaagcccattaactaaaactatggcccattttatgtgctgcacaaaaacgaatgggtaacgtgtagacatgcaaagtggtacaaatcaaaatcaatgatcaaggtaacgtagtcaagttcaattactctttgtcaaatttaagtggtctctattactaaactatacacaaccgttagatcaaataattctctaccatccaacggtccaaagtctccacttctatttattacaataaaatgagaaaataaaaacgcgcggtcaccgattctctctcgctctctctgttactaaatgaagaagagaatctctccggcgagatcaccggcgttattccgataatttcgcctgagagttgtcgcatgttataaatg

SEQ ID NO: 31777 - DNA, 3000 bp, Unknown; identical to SEQ ID NO: 31776
  misc_feature (1)..( 3000): 2750-1469P.txt file - cDNA_ID_3045698; gDNA_ID_2926169; Annot_ID_199357

SEQ ID NO: 31778 - DNA, 3 bp, Unknown
  misc_feature (1)..( 3): 2750-1469P.txt file - cDNA_ID_3045702; gDNA_ID_1971815; Annot_ID_175922
gag

SEQ ID NO: 31779 - DNA, 3003 bp, Unknown; identical to SEQ ID NO: 27958
  misc_feature (1)..( 3003): 2750-1469P.txt file - cDNA_ID_3045702; gDNA_ID_2926169; Annot_ID_199356

SEQ ID NO: 31780 - DNA, 3000 bp, Unknown; identical to SEQ ID NO: 19836
  misc_feature (1)..( 3000): 2750-1469P.txt file - cDNA_ID_3045710; gDNA_ID_1971816; Annot_ID_175978

SEQ ID NO: 31781 - DNA, 3000 bp, Unknown; identical to SEQ ID NO: 8543
  misc_feature (1)..( 3000): 2750-1469P.txt file - cDNA_ID_3045717; gDNA_ID_1971816; Annot_ID_58224

SEQ ID NO: 31782 - DNA, 3000 bp, Unknown; identical to SEQ ID NO: 8543
  misc_feature (1)..( 3000): 2750-1469P.txt file - cDNA_ID_3045717; gDNA_ID_1971816; Annot_ID_175965

SEQ ID NO: 31783 - DNA, 3000 bp, Unknown; identical to SEQ ID NO: 8543
  misc_feature (1)..( 3000): 2750-1469P.txt file - cDNA_ID_3045717; gDNA_ID_2926175; Annot_ID_140311

SEQ ID NO: 31784 - DNA, 3000 bp, Unknown; identical to SEQ ID NO: 8543
  misc_feature (1)..( 3000): 2750-1469P.txt file - cDNA_ID_3045717; gDNA_ID_2926175; Annot_ID_199814

SEQ ID NO: 31785 - DNA, 3003 bp, Unknown; identical to SEQ ID NO: 19751
  misc_feature (1)..( 3003): 2750-1469P.txt file - cDNA_ID_3045752; gDNA_ID_1971819; Annot_ID_176090

SEQ ID NO: 31786 - DNA, 3003 bp, Unknown; identical to SEQ ID NO: 19751
  misc_feature (1)..( 3003): 2750-1469P.txt file - cDNA_ID_3045752; gDNA_ID_2926199; Annot_ID_201740

SEQ ID NO: 31787 - DNA, 3003 bp, Unknown
  misc_feature (1)..( 3003): 2750-1469P.txt file - cDNA_ID_3045756; gDNA_ID_1971819; Annot_ID_176084
ttcggttacttagtgatcatgctttacaagaatgtcaacgaatcaaactttagagaattttctaacaagcgtttcaaagcacttcgtgctgtcgctcatgatatttcagatggacatatctcagtgttcaatgatgtggaagatgctatctgctatcgaaactcgtatggtcagaaccatcagatccgtaaagctgttctgagtgctgtcctcggtagcaaaaagaatgaccactgttatttctctagtgttagtcttaatgttgctaaattcctttcttggacagacatggcaggatattatgttgtcgaagaaaatcttgtttatcctgattcccctgttctcaaagctcctgagttagcaactgaagtaagcaattggaaaaaagcagatcaagcaatcaaggaaactgactcgcctgagtattacaggatcttgcatgaggatcctgcgagctgctctatacttagaagagcaaactttccgacgctcattgctgtcgcagagaagttgaagaatagagtgcttggtggcagcaacaaggtagtgaatgcagagatatctgacaaagtagactactattttgatatgcatgtcaagtagtacgcttctggccgagtgtgcgaagccaccgagcgtattgtcgactactttgaggaaaattctgagtcattagcgaagcttttctgtagttagggtctgattctacatggcgtcctgttttttttttgtttttttttttcttgtgcaccacatgtgtttaatcagatattttagtatgttgctttgatttttatttgctgtcttaaacttcattaaaaaagaattcaaggaagagattcaaaaacagaaatacaaagcatgacagttcaaaacagagcacaattgctccgaatatgtaaaacatagttgagactaagtaacagttagcccaaagaatttcttcactacacgtattgtttatgaattctaagatttcttaaacctaaacaaacctttcttgggggaaaaatagtatattcttccatgtctgtccaagaaagaatattggccacatatgaacaaatatcaccaaaagaatctccatccttggtatgattgagaaaacctttcaggacagcttttccgatctcagggttctataccataggtggaccgtaagtaggtcgagtgatcctcatcattgaacactgacacatcttctcctttgatcggaacataaccagctgcatcaaaaagtattctcatatgttgatcagagctgacttcagtgtcattcttgtaaagcatgatcactaagtaaccgaagagggccactgacttttttggttctaccaccttttgtgggacgattaaaccgtttcttgcggcagctgacgggaaacttatcgttcgcaccgtacgacccattgcacgaacagcttgttgcagagcatcagttacttccggcagtaataggtcgctctctggtccctatcggtcaggtattcattctttgcacactcaagactcaactgaaacgccgcataactgcgattcgcctccgttgcagcagacgcatcaccaagaatcatatctacttacatgctcatacagtcatacttcaaataaaaagattgaaatcgaaagagaactacttttgtttgttggctttagaattaaaagatctctataaatttagggtttcagtggagacgttttataaatacggagtagaagttggaacgttgatttgagagacgtggctcttgggctaggtacatgcatggactcgatcgggtccatgctgacttgtctttgcagtttccttctagtgaaaacgtcttgccgtttatacattcggcggggttaatgaaaacggagtgttgtgtcttgtgtgcgtgcgtagttcccaaaatacgacatcgattctactttctactagtttttaaaagcttttgcagtgcacatttgttaatacataaaggtaaagaaaactaaattttcatatatactcataagcatttaattaaattggacatccacaacaatctaatttgttgtcttttatagtgtatagttttctgattttacaaatctatctcatcaaagtcaattcttattgcaagaatctctcttgctttatttctcattaattttctctttatttatttttccttggaagttggaaccaagtaattattagttgttcaagcctctctaaaaaaagataaaaaaaatatgagttgtacaaaggttttttgccaaataatatagttggtgggattaattaccaaaagaaacaaaaaattaatatgggattatgagttaaaaaaaaaatacttgttgaaaattgaaaaaagagaagtccgttcgttcctcatttggagctacagtgaccgtttctagtgctcacagagagagagagagagagagagagagagaggcgctgtggatttgtgggagagtagggacatcagaggattcttcgatcttcagattcttactcgacgaatccttaatcgctcacctgcagttgttcttatcctccgcttattccgtcgagtgccgtggcggccaatttcggcaactctgcgccactgatgattttgatggttagatcttttaatgttcgtcctcctccttactctccgaatccattttctgtgttctttcctttctgtttcgtataaaatcatgtttcattgagctcgattatgattatatcttgtctacggtcattttgacgacgacgacagtgatgatctttgccacgcgcatcgaaaattgaattttgttttccccattttaggaattgagtcatttggatgtggttcaaatgatatttggtggttctgtttttgaatctcgtattctcttggaatatctgtatacaaggtctcactggttaatgtttcttctcttacttctgttcagtgattctaaagagtgagatgttaaagcagactataagatggatttgatacttcatccagtagtagcttaagaaatattgcggttatg

SEQ ID NO: 31788 - DNA, 3003 bp, Unknown
  misc_feature (1)..( 3003): 2750-1469P.txt file - cDNA_ID_3045760; gDNA_ID_1971819; Annot_ID_176080
aaagacaaacatcttatgctactatatatgattaatcatagacatgtgctataattaacccttgtgttctaaatatgtgtctctttataaaaaaaaaatatatatatatatatacttgtatatatcacatatgtgaaattgtctataataagatttatttttttttggtaaaattttaagtaataagtttatatttgcgattttttcttaccgcttttaactattccagtattgtttatcacttttttatacatccttcaaaaatattatatcgtttgtgtcaccgatcgtatatatgtcatgataatagtttttcttgttcattatgtgatgcataaaattcacgtcacacaatttgacaggatatgatgaaacagttttagtgaaaacaatcacaaacattgatatgaaaaaactacgtccaaataataacaagaacgcagccaacttgcctattcaagaaactatagtgctctataaataatacattttgaaattattaaagaacccaatatatatattcctcgatgattgatctagcttttgaagtttcctttagttctaactaatgaggatataaagaaggagcactatcaagtttgaattacaaaggactcaaattaggaaccaagccgcacttcccgtccaagaacgtcacaacaaaattaagcttgacactcttaaacaattattgcatctctatttttactttattctcattttgattcgtcaaatatagcaatgacagattcaaaaaatcagtccatttctacagctaaaatactttcaagataattagaatcatgtaagtataaccacaagcatggataaaacagaaccaaagttaaaccaattcatcaaaatgactaaacaaactggccccttttcatttaaaccggaacaattcttgttattcatttaagaattaactggtagtttttgtaaaaaaatgcaatttattagatgaataatgtcattcgttttaatagaatgttcattgcaatgctgtcataaatgaaataaatatgcccattcattttttctgcgtttggaaagtggaagaatttttcaagaggatcggtcattcatgcatgtaatgatgcaacggaataagaataaccaaacattcgatcgaaagtacttaaatacctaaatgtgcttgtcttaaaatatatctaagatataggattcaagatatctgaatatcatatataaaaaatgaacatacagatacagtgaatatttgaatttatgaaatatgggattgctcgattggaaaagtaccatagtccattagtccgagtaaaggttttaaaagcttatccgaatctaaagaaatgtacgaattttggcttagaatctcttaattacaacaaaaaaaagttattaggtattaaatttttcacctgatattggtgatttgctatatacatctgatttagatagaaaacaaaagttatactttgagataaatccaaaaccctatattctggggctctataaatgttattaattaccgtctctttgtagcgcttactccacacaaaattgtaatatttaaaagatttaaaaacaccaaaaagagataagttagtgtgaattgtggaagtaacagctagaattccaacgtgaaggacgatagtgaatgaaacacccaaaaccaattaaacttagtcatgatgagagggatgcatgaaactaatcggcgatggttaaaggtcagcctcatctcatgtctgtgtcttatctcatatatgataatcacccacaatatctgtatatggtcctcgtcagatttcactcattttgtatcctcgagaaattatgcagtactactagttacttattggcagattttttattgctccatttccatagtatatataatatcatttaatttgtaagatatattagtgtttttgacaaaaaaaaaaaaaaaaaaaaaaaaaaaaaaaaagaagaagaagatatattagtgttgtctatcaacatttatctgtcggattcaccaggtattaggaaagaagcccgactatttgtttcgaaattttattgtatgtcacatgaatacgtttcaacgtgatgcatatgttattaatgtatacatagatacatacatcatgttgatatcctttcaagaatatctagatcataaattcataatagatatgttcatagctagaattagaagaatactttactagaaaatgaaatgaaaatgattagctatctgataaaatgattaaaaaaaaaaagtctactgaaggaggatgataaagtttaagtgttgagattttattcaagttatgtagtatacaaaaaaggggatagttttagacttttagtagtacgaatagctaatcttctaaattaattgctatctattacactacactatcaataactaaaaatgaataaatctagtgcagtttattcaataaaaatgtcacgaattttacataagttgtaaacatccatctattaaaacataatcacacaacatctattttgttggaataccataaacttttacttgacggctacataaacatgatacatgattaacataggccttttaaaaaagcaaatatatatgactagaagaagaaagcaaaagaaatggtagaagacagaaatcaaaagcgtgcaagaattatatatactatgatatgggctccaactagagatcacttgttgacaaagaagaagaaaaaaagagagagagatcactttggaaataacaatggcgaacaaaaggacaaatatatgccacgtcatccctctccatccacctttatgtcatttctcaaaaaaacaaattttttttatccgattcattatcaaaaaataaaattaaaaaaaaacaattattttaaattatttggttagtgtttcattataatttttcttataaatagggtctttaaaccttccaagaagtcatatagaaaacggcttcataaaaagaagatagaacttggataagtttagaagatagaaatg

SEQ ID NO: 31789 - DNA, 3003 bp, Unknown; identical to SEQ ID NO: 31788
  misc_feature (1)..( 3003): 2750-1469P.txt file - cDNA_ID_3045760; gDNA_ID_2926199; Annot_ID_201731

SEQ ID NO: 31790 - DNA, 3003 bp, Unknown
  misc_feature (1)..( 3003): 2750-1469P.txt file - cDNA_ID_3045764; gDNA_ID_1971820; Annot_ID_176142
gatgatgaatgacgatgatggtgctgacttgaaaggtggaacacatctctatccaaaaataaaaaaacattcttgtaatgtattgtgtgctttcatgtgtttgcagtgtctgtttttgtctcctttcaagggtttgtttccaggtctgctttgatttgattcccgtgtatgatgacttaataaagacgtttccttatcctttatcaaatctttacatctgtattcaaagttagaatcaacgatctaagaagaagagcttaccatgaacccactagtttctggacggttaaagggaccagaactagatacaatattcacaagaattgcatctacttgactagattaggtgtatcatatcatttgatgctaactcttggggttataggctaacctttaagcttcctccttcacgttatgagccactgacagcatcaggaaggtccttaagaacctaagcaaatgtaataatgttctccattagcttcttactcaccgaagataacctccaggttttcgacaagtaacagtattataattagaacgatgtgagatttttgcttcaaggtcgttgagtgtgagaagatggtttttcgttgttgttaccttgtaaagatgccatgaagcataagcatccgttgctgcgtattgtaactgctgctttgacagaggataaaactcccagttcccaagcctgattctgtttggcttcaggagctgcaaagtaacagtcagattttcaaagcgaaatagatcaatattctcacttttgatacagcagaacagaagagagttgtactgctatttctaggaagactggaaatatgataaatccagttctcactactgttatcaaaacttaaatcaagcttttgaaatcaaccagacaaggtgaataacagatacctctttgcaaacaagtgtctcagttagtgaggcaaggccccattttttatctccaccaattttttggttggctaaatctgaaagatcctcaacatctttgatactaactccatagtcatggaaaagcttcacagagtcaccatcaattccaatacctacctatatatatgtatcagaactacgttaattgagcatccatggcaaacaacaagaacttcgaccacttcaaaaaaaaaaataacaaacctttacaagtgttgaatcttcaataagatgttggagactttgagggataccagaatgaaaaatatgcataacatcacaataattactatctacacatatctggacagtcgcaaccttccccgggagaacacctgaaaataacacaaagtttcacaaaatattattagttaagatcacaaaaacctcacaaaggttcatgaatgtgtcaaaaagcattatcaagcaactatcattacaacacatatgagtagactagtctaagagatattattagtagaacaaagcttgcagcaatgagattctagactacacaaaactgcaatagtaggcatctacactttcctccgaacattcagaaaggaaacaacgaccataaagctctattcgatataaagcaagagcatcatcattctatcatcaagatatataaagagaaattagaaaagacaacatatgatccatagagataaaatacagttcgagatgcatatcacattgcatactttaagaaatgcaatcgaaaaagacaaaacttgcaatcagacacaaaacggaaaacagaagggttaacaaaagcaccttttctaaaacttggtctccactcaatatccaagccaacaaaagctattccagattcatctctcttggtatcaagaactttaataagctgcattgctcgcttatcaacctcagtagcagtcttgctatacaaaatcctaccaccaaacctcattgctggaaaattcctagctgcaacaaagtatacacattattaagttgctccgcccacataattcaaacaacacactattacgaaaaaaatcttaatcctataaattacggcatgaacagattaatacattgtaaagaacttggaattcgaatcaaatggtgagacaactaatgaattgacattttcaaagcaaaaagaagttgaaattggaaaatagaacagaaagatctctgggatttgaagaagtttcatacctcggcaacgggagagaggaaatcgtttataagatgtagaagaagtgatggaacgaggcaattggcgacggatattattggggatttgatttggatcctcctcgtggccatggacggaggttgtagcttgtacggtcggagcagcagaggaagaagaagaagaagaacgggagaaattgtaggaagcttcgatggcgtcgatagcgagaagctcttcctctgtaaaagcgtcgtcgatccaatttgacgatgacatttcttttactgaaacaaaaaaataaaaattaatgctttggacgagtctcgtcggcccctttaaatgtttgtattgtttgtttttaattttaaacgttcccacactgtacaatatagttgtgtgttttaaattgcccgagacacgctttatacaatttttgtatgattttgattattcatcacgtaaccataacctttgcttcacattagaattgtcccatgttagggatattggcataacgatgtatcagatcatgtcgatgagaaaccaaattcaatctttcagaaacttaaacccatcccatacaaacaaccacacttttgttgacaaatggagcaaccaattcctcttattttcattcaacagtagacactctttcattttcaacaaaaaaacactcctttgactaagtagaaactgtcgatggccacacgcgaaaaatgatgatgaattcttataacactcctccacagatgtagtaagtgtcatccaaggatctagcaattaagagtcagatattcaattttctgtggaagcaattatccttcccaggagacttgtcaagtcaagcaacgatcaattcgtttcacagaagaaataaaacaaggatg

SEQ ID NO: 31791 - DNA, 3003 bp, Unknown; identical to SEQ ID NO: 31790
  misc_feature (1)..( 3003): 2750-1469P.txt file - cDNA_ID_3045764; gDNA_ID_2926158; Annot_ID_198568

SEQ ID NO: 31792 - DNA, 3000 bp, Unknown; identical to SEQ ID NO: 19001
  misc_feature (1)..( 3000): 2750-1469P.txt file - cDNA_ID_3045776; gDNA_ID_1971820; Annot_ID_176133

SEQ ID NO: 31793 - DNA, 3000 bp, Unknown; identical to SEQ ID NO: 19001
  misc_feature (1)..( 3000): 2750-1469P.txt file - cDNA_ID_3045776; gDNA_ID_2926158; Annot_ID_198560

SEQ ID NO: 31794 - DNA, 3000 bp, Unknown; identical to SEQ ID NO: 8588
  misc_feature (1)..( 3000): 2750-1469P.txt file - cDNA_ID_3045782; gDNA_ID_1971820; Annot_ID_176113

SEQ ID NO: 31795 - DNA, 3000 bp, Unknown; identical to SEQ ID NO: 8588
  misc_feature (1)..( 3000): 2750-1469P.txt file - cDNA_ID_3045782; gDNA_ID_2926158; Annot_ID_198544

SEQ ID NO: 31796 - DNA, 3000 bp, Unknown; identical to SEQ ID NO: 8624
  misc_feature (1)..( 3000): 2750-1469P.txt file - cDNA_ID_3045794; gDNA_ID_1971821; Annot_ID_176172

SEQ ID NO: 31797 - DNA, 3000 bp, Unknown; identical to SEQ ID NO: 8624
  misc_feature (1)..( 3000): 2750-1469P.txt file - cDNA_ID_3045794; gDNA_ID_2926195; Annot_ID_201354

SEQ ID NO: 31798 - DNA, 3003 bp, Unknown; identical to SEQ ID NO: 19422
  misc_feature (1)..( 3003): 2750-1469P.txt file - cDNA_ID_3045802; gDNA_ID_1971821; Annot_ID_176164

SEQ ID NO: 31799 - DNA, 3003 bp, Unknown
  misc_feature (1)..( 3003): 2750-1469P.txt file - cDNA_ID_3045806; gDNA_ID_1971821; Annot_ID_176161
taccttttatttggttgtattcagggaaaacaagaatttaacaggaactgcacgatatgcaagttgcaatacacatcttggtattggtaaggaatgctgccacttttttctcccctttgtgaagtaaagtttttgctcacatatttcgatttctctttcgcagagcaaggtagacgggatgacctagagtctcttggatatgtgcttctgtacttcttaagaggaaggtgtgttgactttttgacttgaaagaacctagttaacattgtgtttttggcagggtattgtttttccttgtttgagatttacttaaccgttttcttgctttacattttgttcctattttaatgaacctccttttctagccttccatggcagggtcttaaggctgttgacaagaagcaaaagtatgacaaaatttgtgagaagaagatatcaactcctattgaggtctatttccctctactgtgtgagtgaattgttttttgttaatcctcattcaactgaataatatcccatcctttgtaggttctatgcaaaagccaccccgtggagtttgcttcatattttcattattgccacacactgacatttgatcaacgccctgattatggattcttgaagcggctttttcgtgatttattctcacgggaaggtactttgagaaagacatccctccatcatttttataatcctctctgctagcatcagttatctacctagctcacttaaacgttttcttctttgcaggatatgagtttgactatatatatgactggactattataaagtatcagcaatcacagaaaactagaagtcagtctcaggtatagtttatcaataccatttgttatttttttttctccaggtgtatgcatattttgtcttgttcatagagaagatttcctggggagaagttttacttggttttgctattttttagttttggtgctaaatatagatatgcctgtcttcctaacaataaactgtcatgctgcaggccgttcctgggtctagtaatgctcgtgcaataccaatggacacaagcaatcatcgaggtcagctcgagttataaattttaattgtgtcactttctgattaattttgtaatagtatatgatgtgttttttgttttctctcgactttcacactggactcaactggcatagagtgtttggctgatttagtttcccgttgcaactgtttatttcaatatcttgatgctaactctccgtttggcaggaggaactaagatttcacatgaagcccaagtctctgaccgtgtcagaccggctaatgccagtggtccaagcccacagattaataccgctgtagggaggagtctgggttttgatcaagtccacaagaatgtacgtgcttattcatttgcctcttccaaataaatgttgtatcctgcaaccctcccccttgtgttagcatctcatgcctgcatctgtgttgcttcagagttctgcatggttctctgcttaaagcttttacctgttttgcatggtcaattgtcatcaacgagctctatattgtgatatgaactacatatagcataaatgattaaaacacgatactgatcatcacgaaatatgctcttgaccattattttactgaaaacccattgcagatgaacatgccatcatccacttcattatctcctgcgggtacctcaaaaagaaatgtcagacccgaaacctcaaattctgggtttgggagcgggaataaaaccggcggttggacttcaccattcatgtcaccggggaaatgatgcaaaaaaagttggagtatatcattcatctgatctgctgagcaagattatgtgtgcctttgggtctaaactgtgatttctgcagtgaaaagctctagactgaggttgaagatctgaatggagtttttccatgaacagcttactgtttgacaaaaggcatgaagattatgtttgctttccttcaagattctcacaaatgactgacttcaacctttgtataaaatcttgcaaccgggcgtgtaatttggttcttgtgattcattctcccaagttttcttctataaaactttgttcgtatttctgtacgtagttccctgtgttggggcataacctgggtttgctgtgtcatcaacattgtttgcagaaaatcaagagcaaagcatgagcagcttcagcagagatgccttcaaaggcttgagtcaagagttgcttgtggcagggacatgtcaccatcaagctaatgtgcagctgacgagaacgtaaaaggataagctatggctagcttctggaatgctccgagaaacacttccccctttttttttctctgaatttcctattcagtttaatggtattctgtgtttgatttttcttactcgattttgtgcattgaaaaaaattatatcaaaaagcttgacttgatccaaacatgcattttcaattgctattattaaaaaaaaaaaacgtataaaattgtagtctcaatattgaaatacaaacacctagaattgatcgatttggtagagaactagttagtggattaaatttgggttggctgattttcgagccataaactatttcgattctcagctttcacacccggacttttgggcctttaaatttccaccatcaactttcatattcccaaaattacatcatctatttttggattcatgcttaaacatacatttccaattgaaccattcatttaaccgggattaaccacaaatccgcgtttactgtaccgcgattgcgattaacccaactaatacccagacccgttaagaaaacgacgtcgttttcatttcgtttaactcatcaaaaagagaaagaaaacgacgtcgttttcattcttcttctttaactctcaaatcgatttagtcgttcttctttaatctcgacactgtgaaattagggttcttgagagagaaagacaaaaggggatttggggttttcttcttcggttcgaatttttgggtctcgatttgggtttcgaatagggagaaatg

SEQ ID NO: 31800 - DNA, 3003 bp, Unknown
  misc_feature (1)..( 3003): 2750-1469P.txt file - cDNA_ID_3045814; gDNA_ID_1971822; Annot_ID_176220
agattgtgagagaacataatgagctttttttcatctttgagtgcatggtaaaggcgatctccgcttttttatcttctgtaggattttttagtctgatgttagagaatatattctcattgttcttggataatgatttgactaggatcacaatctgtaccatataatgaaagaaagggaacgacctttttctgaaggagaaataagaagttttatgtctcagatgctgcaagggctcgcacacatgcataaaaacggttatttccatcgagacctgaaacctggtatgttttggtactttgtattgtattaattgaaatggttttcgctctttgaatgtcttataaacaagttttgttctgtttctgaagagaatttgctggtgaccaacaatatcctgaaaattgctgactttgggttggctagagaagttgcatctatgcctccttacactgaatatgtgtccacacgttggtaagtgatttctctttgatattgccttcgcattcatgcatgaaagtatgtggtataaggtgatatcgacgtataccttattattggctctgactgcaacaggtatcgagctccagaagttttgctacagtcttcattatacactcctgcagttggtatgtttgcgaaatccttttgtgcctcatcacatttcattagtatcatgtgatcatgtcaaaagtctagctaaaccatggctaatacttcgtggctttgaatagtttaagacattttttctttctgttttgtcatctattggatcgctttgcaaatctttatagactaacatttaaaagaactgcagacatgtgggcagttggagcgatactagctgagctttacgctttaactccgttatttcctggtgaaaggtgaattcatttccctttcaaacgatactagctgagcttaatctgtgtgcacacttaagatagaccatttagtgaaaactgatataatgatttctttatgagtagtgagatagatcaattatacaaaatctgctgtgttcttggcaagccggactggaccacgttccctgaagcgaaaagcatatctcgaattatgagtattagtcacacagaggtaagagttcttaatgaaaagataagaggcttattatattaactgcacttcaatattgactttgttctttgaatatcttgtgacagtttccgcagacacgaattgctgatttacttcccaatgctgctcctgaagctattgatttgatcaatgtgagttcttgtgttcactctttttgcggatatttcttaccattcttaagaatgttgtgatctttcaatatctttatttcgtatatcatctgtttctttttttgaatcaacagcgactttgctcatgggatccattgaaacgaccaactgctgatgaggcactaaatcatccatttttcagtgtaatttgaatattcccttgcttcttttgattttatcacacactcctctctttgtaataatcgaaaatgtaatgatatattcggaacagatggctacgcaggcttcatatcctatccatgaccttgagctgaggcttgataatatgggtgaggctttatttttctttgttaatctgcttcgtatagtatgctttcatgaccataagattaagttcaattatatttgtggtattctgcagcggcgttgcctaatcttgagctaaatctctgggactttaacagagaacctgaagaatgttttcttggcttgacactagctgtgaaaccaagtgctcccaaactaggtaagtatcattccctcgtgtagagttggtcactagatctgacacaaattgacattgacattgagcatggtttcaaatattgtttgcagaaatgctccgcaatgtatctcaggacatgagcgaggtaagctcatacgcaatgaacgtcacttatatagcattgttaaacttttcatgagttgtaataaatctgttgtttacaaaagcagaattttctcttttgccccggggtcaacaatgatcgagaaccatcaggtgatgaaaacttgagcatatgttgataaaactgcagatttctgttatatttctctgtgaaaggttgttgaatatctctctttgaacatttacagttttctggtctctgctctctcctgatgaaaacggcctccacgcgccagttgaatcatctcctttatctttgtctttcaggtgagattacaagttgtctctatggatccattaatgtgtaaacagatttgcctaatgagaaacatttactgtgagcagtccaatgcagcaacacacagttggacctccacagtcgagtggcttcacaatgacatcatcaatgcaaccgaatatgttggaccgcccgtggatggccgtgtctgcgccgtttcaacaaagtcattacctctgatctaataaacccataccctagtaaaaaaagtaaataacacagaggtttgtcagaaagatttgagtttaaagaacaagatagcaaaacaaaacagaggaaaggtgttagaattttcattttttttgtcaccaatttgttcttaatttgtaaaaatttggtttggctgatgcattttcctctcagagcttgagctctatcaatatcgaacaaataatttccttattcttgtctctgtataatatatgataaaaaaagacattgaaatcttgatgtggcattaccataaagaattacgtttcattaatgttggttctgtcgtcttttaatataaaagtctttaacttgtgaatctgtcttatctacaagaaaatttaagactatatttattatgttaattacgatacttattttaatctatatttagtaaagcgaacaagtcctacaaacaaaccaaagatattgaaaaaaagtcactttggagatagaacagaatataaaaaagattctttaaatgatcttttatcaaaacaagattctaacaagtcttagaaatctcaaaacgaagaacaagtaagaagcttgtagccatg

SEQ ID NO: 31801 - DNA, 3000 bp, Unknown; identical to SEQ ID NO: 21597
  misc_feature (1)..( 3000): 2750-1469P.txt file - cDNA_ID_3045822; gDNA_ID_1971822; Annot_ID_176203

SEQ ID NO: 31802 - DNA, 3000 bp, Unknown
  misc_feature (1)..( 3000): 2750-1469P.txt file - cDNA_ID_3045865; gDNA_ID_1971826; Annot_ID_176295
acatttcctgccaaaaccgtaaaatcatttcttcattaaaattatatttggtaatgatgttaaatatttgtcatttgttaaaattatatcatgggtattttagtcattttattagaatgaaaatgtagatgaattacaaaatgatcaaacaaataaatattcagttaaatgcatcatttatataaaatattaaattatcaaacaaacatcattcaaatgcattatctaaatggatcatgtaaatggatcatttggatgtaaatgtcaaatgatcaaacaaacggggcctaggtctcataaacaccacaatgaaattaattgatcatttttcaggcaagaaggcaaaaagaatttgatcacaatcttccaaacactcaatttttttttatggttaaagaatagaaattgtagccgcagaaaagaatatgatgatatctcttattataattactccacctgctgtgtaatttcttcaccctccaagaaaagcattgtctgtaaaaatcaaaaacataaatcaaacccaatttaccttccgaaacttcaaaagtcatagaaatggatataaataaggcgagcaagacgggaatagacacaaccgtagatatgtgttagatatataaaaaccttggaacaaaagggacaaacttcacttctctccatccattcatagatgcatgcaaggtgaaagatatgtccacattgcaaaactatcttcgggttttcatcaatatactctgtctccaatccaaataggaattgaattattaaacacacacaatcttaatcagtcataagtttttcaatctcattgcaaagtttttttttttgttttaccatagaaacatgtcggacaaacgtcttcttcgtcggcgacagtggaaatttcctctctttctaagctttgaaatatttgctcgagctggatcaaaaatataagtgttatgtagctcttgttcttggtagaagaaaaaaaaaggagaaattagggtttataatgtggaagataccttgggggaaaagttattagttattgggttagtgaaggctctgattcttggtacgtttagagattcatcattgtactccggaatttgaaaacaacaaagtagaatacccatttatctgaattaataaatcaacgtaagattttagttcatcaagtaagtgattacggtaaataatcacagtttattaaaagacaggacatggaagaaatcagagaaacgtaagaacattgattttaatgttaaactgttctcataccttggacttggatcaatctgttgaaatccagagaaagagaaagagaagaagaaggacaaacgaatcaatcaagcatgagaaaaagcaacaaactctagttttggcccgtaatcgggagctagggaagattctttggagagcaacacaaggaaacgtggagattttgttgggatattttatgacgtggcataccaaaagagcttaggaagtttcgagtttttggaatgttgacttgtttaaacaattactggtttacaaattcgacaaccgtcgtttattgtatatcattttattacttaatcctaatgcaagaaaagttacataaaaaaactttactaattcaagaattttttggggggcgtgaaagaaaaaaaaaaaagtgattaaggagctggattttttaatttattttctttttaaaaaaaaaatcataaatgtgtaaccaatgtaaaaaataatgtttcttggcacacgaaaaaggatatatattaactggtttagaaagaaaaaaaggaaagataattatggtggttgcatttacttgatatcatgccaaatccatttaattagcaaaaccatgttggagatttgttttttcttaaaacaacaaacccactttttattggttaattaaatatgtgatgtactgtatatgactatatccaattaaaccacacaccgaacaagacatttctatgataagctttacaaaaagaatcattggttaactcaagatcagttatgacaattgttactactttttataattatgttatactatcacatggcccgtaacaattatcggttggcaggaattagtgttgggacctatggcttgatgatgagcatgatgaaagaaaaagggccaacactcgatgtctaataataaaacaaaagagttgagacatcattatccatcatactcaaggcaatacaaaagtatcaagtaaatagacatctttattcacctacaaaggatttcaataattagatcggggaaaaacataagagcatctccattggagtatctcattgagatacccaaaaaaaaaaaaaaaaaaaaaagtaggagagagagagctgagtttctcttctgagaaattttgagaaactattctcattaaatttggacatgtgtcacaacataattagttcaattattaaataataattaatatatattttcagattaaaatactaatatttttttttctttgagaaactttccttccatttgccgatggagatggtctaattacaaaacaactcacgtaaatgattaatctacggacttaaaattcgataacataaaataaaaagaaaaggaacaatatatagtattaattatgcattggtgcacataattagtgattgcaaaattcacaacgattctaaatcccattagattgtgaatttggaatgtggatgtcggtgctatacacaaaatgcacacgattagcaaacttagatgcaagtgcaacgcgtcaaatttggggagctaccaaagaaggatagtaattactcattaaataaaaatgtgactactaagtttggggagaaactgaggattacgtatataaaagtgtggggagctaccaaaagcgagatcataattactcattattctatagctcttaatctcatttactttctacaccatcttatatcatcttcttgttcttccattgggaaagagtcaaagagagatcgagagagagagagaaagaaagtatg

SEQ ID NO: 31803 - DNA, 3003 bp, Unknown
  misc_feature (1)..( 3003): 2750-1469P.txt file - cDNA_ID_3045877; gDNA_ID_1972137; Annot_ID_179169
ggccgctacttgtttctttgtttttttttcctaaccatggttagtttgtaacactggttagtggttactcacacacttgttactacttccaaccttttttttcttttttttttgttgtcttcaaaatgtaagaaactttaatacttcttaatatgttgattggttttgtcactttgtagacccctgatttttaactatttcggtaaacttttgtaaaacaatttgggtttaaatctctcatgttttattagttgtacatctcagctaatgacaatagctcaagttaacgtatcatacaaaacagcaaaatagattcgaatttgatttttttcttttttctttcaggtagttatatatataactaatgtattgcaaatatttgaaaaacataaagttcaatgaatctaaatttgataattagattaacaaaatcgacatcacatgtatgaaatcgaattcctgaatattcaaaatattgtgtttttttcataagttcttgcatgcatttgcaaacgaaaaaaatcgatttcatatgttatatatatatatagtcgtagatatgtcgtaagtacatttgggtatgaatatttggataattcatcatgggtactagatttcgctgtcgttccatttgtaaaatatcaggattttttaagaaaaagttttatacaaacctgtattacatgtttgaatgaatgatcatacatatatatatttgttaaaatactactatttaacacattaaaaatgacatcctggaaaaaattatattaaatttgaaatctctacatatttttgtgaaatattttgaaaatcatgccaatatatatatgattatattcattcagtcatggtggatcatcattttgtacaccaaaacacattccccattttcttaaaagaaaacttctatatatatatatatatatatatacaaatactactattagatgtgaatatgtagaaatatttgagtcccatgcgaactttacgtaaatatgttgggaaacgattatatatatataactcacttttcttatagaaatagatagaacacaaatagtgtgtgtaaaactcacacataattaaattccatagtgttttcggttgttgaaaaacatggaaaatgccgaggaggtctcgaatctgatgtatttatttatcaataatttggtaatgtgaaataataaaccaaaaaaaataaaaacaaatctttaatgttgggaaagagatgtgaatgaaggtacggtcaatatatagacaatggtacgtaaagcgaagagtacattgccaccctgtaaactctgtatgctctatgttttcacgctattgattttcgcttttcctctgtctctcaacatttatgtgttccatcggttaattcttgaatctcgattgtatttaattccgacagaatcttaaaaacaaaactatttgatcgtaacaccatttacgtttttcttcttctttctttattaacaacatgtaatataacgaggatttaaaatcaatgttagtgtgtgactcaacaaatatcttggtccatcagttacgtttttttaattactcgatttaattggatcatttaaagtaatcatcaacgtttaacaaaaacacaaaatatggtccatttaatactattgtatatttttggcttcttttctcggtctcttgtaaattctaatataaggaaaacaaacgttggacaataattttgatacggtacaattattccatatggtcgctctttaaaaacacccatttgcagttatcttttttcctgatttgaaatggaaatagacatatataatatatatatatatattccttttggagcaaaagttaggaaataaatatatattcttcagagattttatggcacattgtatatatcttaataatattccatagaatcaatacgggtcatgaatctctcttcacgatggaatatatatgatttattaagatggaatcatggaatcatatcatttctttttcacactaataaggaaattatcatatatatcagaatctctacattacacgatccaatctcaaaagaataatatataatcggcttaaaattcgaaacagtaattaaaaaattttcacatcttctactccgagaaatttgggttacagattagaagagaccttgtcataattactacccagtaattttatttaattaccatcacgtggttaaacaaagatatgtagcatgctaacttatccgcgcattttagctattttccacttaaaacatactactgtttactaacatacgctgagagttacagttcacacatcttttctcttccttcttcttcactgtatattaagaacaataagcaatatcagttttttttttcctctgatcgaagccgcgggaaagttataataatataaagatatttttcgtgagagttgctcgtttatgggagaatcgtgtcagattaatttctatttttgttggtttaattttccatttttaatttaataattttaaggaaatattattagagtgaaaggaaaaaaaaaaagatcttgtgggtcgccattatatatgcaggtctttctccaaccttttgctccttctctctcaagtgtcaagaatcaaacagtggcttaaacccaaaaaaggaacatgggtatgtctcttttttctttctttcttttttctcattgttgattcttcttcatacgatttttgggtaagatatttcattattggttatggggttttcagtatttggtagttgcaggttaaagtttttgtttttcttcttcttcttgtggtttttttctctgttaagctcttttagaaatttacctaggatttgatgtcagtggtatctctctgtttattggtatttacaagaatacagagagaaagaagagattattattcatgggttttgttctgatttttgaaagtttctgtctttgaaactcactgatttttttatatttgggaattttttgattgcagatgttagtatg

SEQ ID NO: 31804 - DNA, 3003 bp, Unknown
  misc_feature (1)..( 3003): 2750-1469P.txt file - cDNA_ID_3045877; gDNA_ID_1971826; Annot_ID_176289
aatgtgttgtcccaaaaaatgtaaataaccagtttcttttttcctaaatcatagtattacaaattatctcgaagacattttgacctccaacactaaaacttaagaataaaagatgtactagtattttgagataaatgacaaatatcttcttgaattaggtcttagcttgaagatgaacaagtgggagagtagacaaaacgtgggatagattacgagaaattcagaggtgaaggaacatagtaagagaaaggtaggttcggccacagcagattcctagaccggctctcatgcagcacgatgctttattttgtatgcctaaccatgtgactgcagtctctccatttaattcagttggccgctacttgtttctttgtttttttttcctaaccatggttagtttgtaacactggttagtggttactcacacacttgttactacttccaaccttttttttcttttttttttgttgtcttcaaaatgtaagaaactttaatacttcttaatatgttgattggttttgtcactttgtagacccctgatttttaactatttcggtaaacttttgtaaaacaatttgggtttaaatctctcatgttttattagttgtacatctcagctaatgacaatagctcaagttaacgtatcatacaaaacagcaaaatagattcgaatttgatttttttcttttttctttcaggtagttatatatataactaatgtattgcaaatatttgaaaaacataaagttcaatgaatctaaatttgataattagattaacaaaatcgacatcacatgtatgaaatcgaattcctgaatattcaaaatattgtgtttttttcataagttcttgcatgcatttgcaaacgaaaaaaatcgatttcatatgttatatatatatatagtcgtagatatgtcgtaagtacatttgggtatgaatatttggataattcatcatgggtactagatttcgctgtcgttccatttgtaaaatatcaggattttttaagaaaaagttttatacaaaactgtattacatgtttgaatgaatgatcatacatatatatatttgttaaaatactactatttaacacattaaaaatgacatcctggaaaaaattatattaaatttgaaatctctacatatttttgtgaaatattttgaaaatcatgccaatatatatatgattatattcattcagtcatggtggatcatcattttgtacaccaaaacacattccccattttcttaaaagaaaacttctatatatatatatatatatatatacaaatactactattagatgtgaatatgtagaaatatttgagtcccatgcgaactttacgtaaatatgttgggaaacgattatatatatataactcacttttcttatagaaatagatagaacacaaatagtgtgtgtaaaactcacacataattaaattccatagtgttttcggttgttgaaaaacatggaaaatgccgaggaggtctcgaatctgatgtatttatttatcaataatttggtaatgtgaaataataaaccaaaaaaaataaaaacaaatctttaatgttgggaaagagatgtgaatgaaggtacggtcaatatatagacaatggtacgtaaagcgaagagtacattgccaccctgtaaactctgtatgctctatgttttcacgctattgattttcgcttttcctctgtctctcaacatttatgtgttccatcggttaattcttgaatctcgattgtatttaattccgacagaatcttaaaaacaaaactatttgatcgtaacaccatttacgtttttcttcttctttctttattaacaacatgtaatataacgaggatttaaaatcaatgttagtgtgtgactcaacaaatatcttggtccatcagttacgtttttttaattactcgatttaattggatcatttaaagtaatcatcaacgtttaacaaaaacacaaaatatggtccatttaatactattgtatatttttggcttcttttctcggtctcttgtaaattctaatataaggaaaacaaacgttggacaataattttgatacggtacaattattccatatggtcgctctttaaaaacacccatttgcagttatcttttttcctgatttgaaatggaaatagacatatataatatatatatatatattccttttggagcaaaagttaggaaataaatatatattcttcagagattttatggcacattgtatatatcttaataatattccatagaatcaatacgggtcatgaatctctcttcacgatggaatatatatgatttattaagatggaatcatggaatcatatcatttctttttcacactaataaggaaattatcatatatatcagaatctctacattacacgatccaatctcaaaagaataatatataatcggcttaaaattcgaaacagtaattaaaaaattttcacatcttctactccgagaaatttgggttacagattagaagagaccttgtcataattactacccagtaattttatttaattaccatcacgtggttaaacaaagatatgtagcatgctaacttatccgcgcattttagctattttccacttaaaacatactactgtttactaacatacgctgagagttacagttcacacatcttttctcttccttcttcttcactgtatattaagaacaataagcaatatcagttttttttttcctctgatcgaagccgcgggaaagttataataatataaagatatttttcgtgagagttgctcgtttatgggagaatcgtgtcagattaatttctatttttgttggtttaattttccatttttaatttaataattttaaggaaatattattagagtgaaaggaaaaaaaaaaagatcttgtgggtcgccattatatatgcaggtctttctccaaccttttgctccttctctctcaagtgtcaagaatcaaacagtggcttaaacccaaaaaaggaacatg

SEQ ID NO: 31805 - DNA, 3003 bp, Unknown
  misc_feature (1)..( 3003): 2750-1469P.txt file - cDNA_ID_3045887; gDNA_ID_1971833; Annot_ID_176344
gatgtgcacgatatatatttttctaatactcgaatctcacacgtgacaacgaccttacgtgtatgtacgtgttgaatagaattaagatacgttttataaacttctcttatctcacatattcaacatgtggatgaagatcttcgtattttttattttaatttttatgatacacccataaactgaattattactagctagtagaggctataaatacgaagaagatatctatatatatactatctatcagtgccaaaaaaaagtttttcaatatatgcaaatatacaatcctatttctccggtgaaaaccatggtgaagatttatcctcacctggcgtttccggtggatatggacgtcgtacaagacaagattttgccctacttaacgacggagcaagagaggttcacgatttggatgaaatctttggtgttcaatagcaaaggctgcacagtttttgattccaaaggaaacttaatctatcgagtggataattatgattccaagagttggagtaatgaagtttactttatggatttaaacggcaaaattttgtttactttacgtcaaaaggtaatactaaacatttcatcaatgttttctaagaatttataagttcctataattattattttattttaccttgcaagttcatttttgttgtgtgcatgtatatatatagaaactgggattcttcaaatcttgggaaggatataactcaaccgggaccagatttcgactaagaaagattttcaagattttgccaagagaatcatcttcgtcttacaaagttgtaatgggatcacgcatagttgatggtgatcaacaatcttgttataagattgtaaatcgtggatcagttttcgcaatcaaggatggatcgggaagattaatggcagaagttaaaaacaaactatcggatattagtggtttggatcttggagatgatgttttgacaatgatggtggagccacaactagatcattctttaataatgggtattgttatagcttataaacttaccaaatgtaaattgtgataatcaggtggtaatcttgaaggtaagcatgttttaaagctaattaaacgttggcataaaccccaaatatctggcttgaaattggatattgaaaagattgcaccagaatgcggagaagctcggcatcgttcatcctcataaaagtcaaaacaaccaatcagttctctctttttttatattttggtatggaaacctaattctcttacttaatattcaatccattcttttcctccaacttcttcgtaaatggcggatgaaactataaccctgtttcagcttattgccaaacccgaaccgcgcaccatggaatagtactgatccaacgagtatgtttgaacaagctcaagctgccattcaatcatcgctatcatgaccgtgattactcgttttcccggtcgtgagaagaccctttaagcgtgatttttatacggatgtatgttttactaatactagtaccaattccacaacataaaccaaaagtgttttgaaattagggtcatgtttctgttaacaatatctttaactagctgagttaaccataattgaattactaaaatatttatcaaactgaattaaatagatttggatggtaatttagtcagcagaaagaattggaattggtgaagaagataatagactaatagtaaaggggtcatggaagttatacgaatgcatgaaaagataatagagatatcaatcatacgattttattaaactaaaggaccatgtgatcagattgtaatttgtaatagcagaatgagccatctcatattccatacatggttttaaataggcttgtccatttcggtactgttcatatactgtatgttccaatttttatcccatatttgtgtgtttaaaaaaaataaaaatagctacttgaaattgtttatagaatgagatatatatatgtattattcgtttggttattcagcttttataaaattaatgaaaatcatctaaatatgtaagtttttcagaaatacccgtatcgaaagtgacctttaatttaaccgtcccgacatcaagccttacccaaattagtaagaatttgaataataaattttgctacttaaatttcttgaactcgttccgcgacccaaaattctcgtccctatcttatcgaaaattgtcatgaatgttttttgttatgtgaattacttgctctcgatttatgtgttattttactgtcctgatatcaagatgtacacgcctagttttaagtggcaacaacatataatttcttacgcatgtttcaattttcaaacacaaaaaaaacgtaacctgtgacactttgacattattttttgggtatgcgaatgaattgaaattaatttatagtgttctagagaataaaagaaagtgccctaaaagaaatgatatcaaatttatttgcaaatacaaagaaaaaaaaaaacacaatttttgcaaatataaacaatagcttttacagttaatcttcctgtcaaaacattcttttgtgcagtatcattccgataaactgtcagcattggacaacggatagaacacaaatggaatggaccacaactgaagaccgattctaagcctagcaactaataatttgaagttatcttattatattgtatgaacagttttttcaatattttttgctctattaatcgaatctcacaatcacattagtcacgttacaacgaccagacatgtagtaacaaacaaaaaggaccatacatttttttttgtttaacaaaaacgaccatacatgttatcgctacatgattttctctgttatttttattttgtatctcacattgaacatgtggacgaagaccttcgtatatatatattttctaatgacacaccaaaaactgaattactactactagtagaaagtatatataaatgcgaagaagacatataactatcattcagagccaaacataaaaaaaaatcaatacatatgcaaatatatagcaacaaccgaacgatg

SEQ ID NO: 31806 - DNA, 3003 bp, Unknown
  misc_feature (1)..( 3003): 2750-1469P.txt file - cDNA_ID_3045887; gDNA_ID_1971833; Annot_ID_176348
gtcagattgtacatttgagtcctgctcaaatcgtagctttcagtttttaatgaacatgctattagtttgcaacttagcattgattattttgacaaaaaatcaggtttagtttgtgtcaaaatggtagatgtgattatggcattgcattgacttgtagagttctgaattgtacttggcatttctgcgagtttcttgatcgctaagactctctggtggctctaaagggaaagataggttgaaagttttatctttcctggatgatgtgtttatggttttaatttacatcttctatgatgctatacttctttgaaatattatgtctctatggaaattggtagctgatggatttcgttagtcctgagtgtcagatggtattatttgagtagctttcagtgttttcgaggtagaactctaaaaatgtaagattgtcttcatgtttcagtcatgggacacaacgtcgatatccttaacagcgggatgtgatctattcatgcgctatgtgactcgaacatctgctttagaatttgaggacttcaactctgcgaaatcccgtgtgcttgaacgtgctgagaaatttggggaaatatcttgcaaggtcagtgttctcttcgaacgggaattgtttacataaatagttagtagaagaagagtttgaacagtaactggaaattttgcaggcccgaacgataattgcaatgcttagtcaagatttcatatttgatgggtgtactattctggtccatggtttctccagagttgtgtttgaaatactaaagacatcagcgcaaaacaagaaactctttcgagtgttgtgcacaggtacttttcttaagacttagagatcaattggatatgacatcttccagttatctcattctgattttcctaactgacaatcacatttccgttgcatccgtggaaacaaaatacagagggaaggccagataaaacaggtgtactgctagctaacgagcttgcaaaacttgatattcctgtgaagcttctgatcgattcagccgtggcctatagcatggatgaagtagacatggtgtttgttggagctgatggagtagttgaaagtggcgggataattaacatgatgggaacttaccaaatcgccctagtcgcacagagtatgaataaaccagtctatgtagctgcagagagttacaaggtaacctcccaaaactttaaaagttttaaaaacttgattgcaaaaacatcaatgatccatcatcttctttcttgttttcttgcaagcgaagtttgcacggctctacccgttggatcaaaaggacttagaaccagccttgcgacctattgatttcagtgttcctgttcctcctaaggttgaggtagaaagatctgcaagggactacactcctcctcagtacttgactctactcttcactgatcttggtgttctcactccatctgtagtaagtgacgagcttattcagctttacttgtaagtgaagctgtctaattcctatagctggtctgaaatctctcattttttgtataaaaataaaaacaaaaacaccatatttttggctatacacagacatagtttgtctctgattcttactgctaatgcacattttttttggtagtagcgagatctttgtgacttgtcatctttactcaaaatttatcacccaagtttcaatatatagttactagtatatattatagtatgatcatttctggtttttgatttcttgattagagatatgtattgctatattgttttattattgttagaatcatttgtgtttttttgcaaaagtatatatatccttttaacactttaaaatgtttgcacaaaaaaaaaaatggtatggtatgcgctggatattgaaaagttgcaattattgcagtgtagtgataaatgacctataatgtaacatggaatatcatatgatttgatgttttgaaaatgagagcatgagaaacgtgatagaattaaagatggtaaattcttagtattattttaatgcttggtctaagtaactactccctctgtttcataatataagttgttttggaacaatttttttgttttactatataagttgttttcaagtttctatacaaattatatattattttaatattttatgattatttatgttatgtagtctcttttgtgattagtagaattttttaaaagtaaatatttttaatttgcgtgtttttatttaaaacaatttatattgtaaaacagatggaatattattataggctataggcctatagctaatgtttggatctaactgctaacgttgtaagattcataaaacaccggccacttacaatcccacgttttttttaaaaatattacgttctttcctggaattacccatatacacgttttttttgttatcttcgtgctcaactgtttacaaaagtatactgtattcgggaaggtgaaaaaagataaaattatttcggaacatctaatatactaacacaataaatgaaattaaaaatatatttgtaaagacattaaagatggcaaatatatctgtccacaccacattttaattcttttttatatcattagtctataacatttgattaagtttcacgttttagaaaagtgattatgtataaactaaaaatataaatagattactttacaacaaacttttttttagcattttacatttgttcatttaacaacaactataacatattgaattcgagtttttttttccttttcccaatcattccattgaatgtatgagtttaggtcttagggttattttctgatgaatagcaaaagtagtaattcccgacaagaaattggccaatgtcgaaaaagtcaaattccacattttaattgagacataaaagacacatcactcaatacagtaaaatatctacttttatatattcccaaaaaccattcggcttctgcttccacttcatctctctctctctctcccttctcacatttctctccactcagatttccaattcctaaagatagagagaatg

SEQ ID NO: 31807 - DNA, 3003 bp, Unknown
  misc_feature (1)..( 3003): 2750-1469P.txt file - cDNA_ID_3045909; gDNA_ID_1971833; Annot_ID_176349
aaatatctacttttatatattcccaaaaaccattcggcttctgcttccacttcatctctctctctctctcccttctcacatttctctccactcagatttccaattcctaaagatagagagaatgactaaaatctctgttggattgcaacttgtgacaagagattcgagggaaaaactaaacaatatagtgatcaaatcttcactgagactaaaccgatccaatccaaacatctcggagctttgtttccttaaaacatgtcatctctgcaataaacaactccatcaagacaaagatgtttacatgtacaggtacgatatttttttttttttattactatattatatactctttgtaaacgaaagatgttctgttcttgattctcaattttttttttttgttgaaaacagaggagatttgggattttgtagtagagagtgcagagaaagtcagatgttgattgatgatagaaaagaactagaggcttcgacgaagatgatgttggcttcgtacagacgatgtaataacggcgccggaaaaagcgagtctcggaatttgtttgatgatctccggcgacgacgtcaattatttatagttccttgaggcttctttaagcaatatctaattatagtttttttggttacacatcttatgaaagttattagtaaaagaaagagaattaaattgtatctccggttgtcatttttcaaaatcttaaatgttaattggacagtttatgtggtgatctcattctcaggtggtttaattactgatttagtaaaaatgctcattaattagttaggttaattgtagctgttgaccaaaaataaagattacttgtagtcacacgttaattagtgagataattaaatgatacaaagtgtcatatgagatatgactcatatttcataactaaatctgattaattcgaagaacattttaatattcagattggatcgtgacatgatggatatgaactggataaagaattattttaaagaagaaaatctctctgataaataaattattcgatttgcttcttttttttttatgtatgggagatattttaaatgtatgtgacagggacatagacactctttggttgagaagatatgaacaactcatttagtcacgtgttgaatatgtacaggccaaaatactgtattttaaacaattggaattattgttttacttgtcaagtgatcactttgttcaacccaattccccaactaatttattgttttatagtgtcacactgtcacgagtaactaagcaggttcgtggtctcggcccaattaaaaggccaatcaattaaactaaatgcaagtgcctataactcgacctatgaagcccactatcttagcgattcggcccaaaaagacaacttgccttgtgtaaaatgatttcactttgtatccatccaatgattccaattaatgagaagttatgttcagatttaagaattccagttagtgaacaaaaaatcaactactggaatttgttttgcttcttataaatttggttagaaaaacaaaacataaggtttatatctataaacacaaagaaattgtactaatgtacagttccgaaacgagtatagtcaattattaaaagttaaaatagtgaaacaaataattgctccatgaatgacatattgacatcattatctgtttctttgagataagctaatttaggaacttgtctcaatcctgtaaaatgatttggaccctacctattttattcatctgtctttctttgcgttcacaatttgatcttaatatataaatatatagtacatgattgcactaatatatatatatatatatatatatatatatattatatgtagtataactatacacgtatgaagttgaattttataaaataaaattttcttttaactgaatttccaatagttgtttatacataatttagaaagttgcaaccataaaatatatttcaccataaaacaacaaaatatggtttccacgtacacatacacataacacatacctactgaatattccgtaatttacgatgcctgataatttggacctaataaagttagttaagagtaaacagaattacaaggaaattttaaattgagtttaagaaaactagtaattgatttggaatgctagttatcaaacaaaaggacaaatatatttttcggattatttttaataacttttttgtttgtcacgaaacgacaaaagctttgtcataaaaaccaaatcctatcaacttgctcaaaaagcttcaataatatcgtacgtgtcctgcacacgcagattcataaatgtgtttctatgcttttacaattttagccttatgcataacagcataaggtcttaatggtcctctctcctaatcaaaattacattcaaaagttgttgtatagtttttcattatattttcaataattcatttattttgtgcctatgttaaaacattttcataattcatttataatattatttaaatttaaatgttaaatatctgttctgcgttggctactcctgaatgcaaacaacattgcaaaagtatttagttgtgtttttaatgcctaatcacattaatagatactagatctaagggaaatagactttatgaaaaaatcaattgacgttaggtaaaaatttgtttagactatttttgtctaccagcagacaactctgactaaatttttaatcttatttactgcaactaactattaataaactaataaaatcctaatttacaatatagatctacagtaaatgaatataaaagtctggtagtaccgtaaatagtacatcaagataagggtataatagtaaacaaccatcgtactcgcttcatcttttattttactctaaaatctctttctgaagaaaacaacaaagcaaagcgttgaagagagaagaagaagcaaagatataacccccaaaagtatcaattagtttccattttcgccgctaagattctgttttcgaacatttacaccctcaagaatcgccgccatg

SEQ ID NO: 31808 - DNA, 3003 bp, Unknown; identical to SEQ ID NO: 31805
  misc_feature (1)..( 3003): 2750-1469P.txt file - cDNA_ID_3045911; gDNA_ID_1971833; Annot_ID_176347

SEQ ID NO: 31809 - DNA, 3003 bp, Unknown
  misc_feature (1)..( 3003): 2750-1469P.txt file - cDNA_ID_3045915; gDNA_ID_1971833; Annot_ID_176346
tgtctttctttgcgttcacaatttgatcttaatatataaatatatagtacatgattgcactaatatatatatatatatatatatatatatatattatatgtagtataactatacacgtatgaagttgaattttataaaataaaattttcttttaactgaatttccaatagttgtttatacataatttagaaagttgcaaccataaaatatatttcaccataaaacaacaaaatatggtttccacgtacacatacacataacacatacctactgaatattccgtaatttacgatgcctgataatttggacctaataaagttagttaagagtaaacagaattacaaggaaattttaaattgagtttaagaaaactagtaattgatttggaatgctagttatcaaacaaaaggacaaatatatttttcggattatttttaataacttttttgtttgtcacgaaacgacaaaagctttgtcataaaaaccaaatcctatcaacttgctcaaaaagcttcaataatatcgtacgtgtcctgcacacgcagattcataaatgtgtttctatgcttttacaattttagccttatgcataacagcataaggtcttaatggtcctctctcctaatcaaaattacattcaaaagttgttgtatagtttttcattatattttcaataattcatttattttgtgcctatgttaaaacattttcataattcatttataatattatttaaatttaaatgttaaatatctgttctgcgttggctactcctgaatgcaaacaacattgcaaaagtatttagttgtgtttttaatgcctaatcacattaatagatactagatctaagggaaatagactttatgaaaaaatcaattgacgttaggtaaaaatttgtttagactatttttgtctaccagcagacaactctgactaaatttttaatcttatttactgcaactaactattaataaactaataaaatcctaatttacaatatagatctacagtaaatgaatataaaagtctggtagtaccgtaaatagtacatcaagataagggtataatagtaaacaaccatcgtactcgcttcatcttttattttactctaaaatctctttctgaagaaaacaacaaagcaaagcgttgaagagagaagaagaagcaaagatataacccccaaaagtatcaattagtttccattttcgccgctaagattctgttttcgaacatttacaccctcaagaatcgccgccatgtgtggaggagctataatatccgatttcattccaccgccgaggtctcgccgtagaattggaataggtaagccttttaacaaaaaagagaagaaagaattggaataggtgaagaagataacagtagagtaattagagtagtagtatatagagtggtcatggacgcttcactcttgggagaagtacgaatgcatcaaaagatgtggcccctgtctctatattcgtaaaatgattatcatcacaatatcatataaaggcccatgggttaataaagactataaagggcccgtagagtgatctcagaaacagcttttcttattatttgagaagtttttttttgttgtctgctaaacttgtaaataacattgaaaatgaagtggaagtattacaaaagcattacttaaactagagtaaccttggccaaaaagaaaataaaaaacaaggttacaatacttagaattgatgatagaaatttatctgatccaaagtaacattagagatctctaacgcttccgaaagcgccttcccgtaatggtgttgcgaatctcgatcaattatttgagaatatccacaccaaaatccatatatttatttcataaataaaaatgtagattgttttggtattcaagaccagatctgatttctccaaaaactttaaaacttcgggttcaactggttgagctattccatctcaggtaacaccgtaaaaaaacaagatatttttttgcacatgtttcaatcatattaaaaaaaaatgcaagatcttttttagttaaaattttgtatgtgaacaaatgaatattaattgctaagtttagttgacaaaaaagcgttgacgaaagaaaaatgctaagtttctgtgaatgaaaatgaaaaaataaaaatatctaaatttatttgcaaagatagattttagagagaaaaatctacaccacaattttcaaaatatgattaaacaacaacttataacatctaatattatgaattataacgtatggacctgatcctgaaatgatatggacgtaacttgaatctgtttctagctttagctagtttgtctgctactcgattattacacccatcaagtttgacatatttctgtcttttcttcaacataaatcacaagctgttgctagccaccttcaatgatgatcaaacggattccctgacatcaaagacattggtaatgcgtgaaggaaactgaaatctttagcttcaataggatttacgctctttgatatgtccaatagatgaacttcttgcaaacatgaagacatctaagtcgtctcgagctatccaacccaaacccattggagcattatttgcttctttaaaactgcaatcgtggttgcattttctccatccgttagatgggtggtgccaagttcaagttgtatttgcctgattcgttgtaagggaatgttatagatcgttttggtacttatctcctgggatattcacattcgtccactcttttacaccgtctcgtacctttctcacatccgctaggagatttttatatatcctgaaaaattcaagtaattttcttaatttccaaagtatctccaaataggccaaaatgtgaaagcaacgactcaacattgtcttctaggttgcaacaagtatagtttaattaattgatgatatagcgggacgttggaaatccttcaagcagccaaaatatgtgaccaattgaagaggacgtgatgaattgtctccctaacttggcaccatcgttagcaacatg

SEQ ID NO: 31810 - DNA, 3003 bp, Unknown
  misc_feature (1)..( 3003): 2750-1469P.txt file - cDNA_ID_3045927; gDNA_ID_1971833; Annot_ID_176335
agaaactcggggagctacgtcgatctcctctagtcatttctaaactgcgatgaagcaggtgagagccgccgccgccaccttctacatcctccgacgatcggggaggtgaggaaacaaaaatcaaactgacttacgaaccaatgtaaatgattattattgggcctttttgggcccatatgttttgtcttacataaagtataaggttgtttttacataaagtagcttaatgactgttattacataagatgtttcttgttggcgtggccaaagtcgaaacgaagacaagtattcctaaacaatttaaaatacaagagaattgaaaatgaaaagcagactagtatgaccaacaaaggaataaaattatccaattaaccaagttaaaatgatgaacaatttccaattacaatccttggatttgcctaggaatattttcagagtggagacaaagcctatcgaagatctttagcgtggtggaggtagaactgtttgttgtggtcgcttctgtgaaaggataaaatctgcccatctattcagttgtggaattgtctgtgaaactgctagccatgaaaagctgcataaataatttacaagtcgtaaatgttaagtacttaagttgatcctttgtaactaataagaaagttaccttgctagcttcagtggcagactcgacttaaaatagcctcccttgaggagaaaatgtgttgaatcctctgtcatagtcagtccttggaacaaaagaatgtaagatagacacttatcaactgaaagaataaactagaccaagtattaaaacaatagttgaacacttacataagtttaaaattctcaacatagcctagagaggtgtaaactctcgtacgtttgaacatttcaacatcttgtatttgaactcttgtgagactcttgctctcaaggttgaagtaataaatgtaaaatgcgtatattagacagtactgtgacaacacaacttcacctccatcagtcattccaacaatggctaactccgtatgctgaactaagttgttccacaaaggaggcaatgcatagatacatttggtccatatatttttctcagcatttactagaacccagaacctaagacgttttggagacaaacatgtaaactgaagtgcacctagtttacccttgtagttgattagagtacaagagtcattcatcaacatgaatacatgtatgttgataaagctaaacttttcagacctcacatcaaagcacactaccatagaaacccttgcccgcatatcgaacccagctgtataatacaaaataccatctatgcatattccatcagatttaggataatggggtttgcattggattgttctccataaatggtttccattctccaatgtcaaaacttgatgctcatcacacgtatttgggatatcatcagacttgatgcacaatacctttagctgtttgcggaccggatcatatcctaaataaggtcttgtctcagtattaatactcttcagttccactttgggtaaggatacggactctcccgtgactgggttacaaattaccatagtatctagatttctcttacctcggcgacagatgaatccacaaagaggagaaccaatttcagaaaaagaatctgtggtatgttgaacatgataacgggtgggtacaagagacgtattctcgttacatggaatctgagggtgaggtgaagagaagaagaacaaattgccatcatcatcttggaaggtgaaaagaagcaacggtggacgaatcgaagacatagtcatgaacaactccttgaaatcaggacgacaaagtatggattcccagagtttggatacgcaacgaaacctagctatagactttgcaggaactctcgaaaagatatccatgaggagatcgatcgggatatatctaaaacaggaaacataacccacctggagaggttgcccctcttgcatcatttgcttactgagaggagctaaaccagtatcagactccttgatacctgcaagttacccgtatatgcaatttaatcattcggtaaatagaagtcactaatgaaagtaacaccactatctcagtgtgcacaaaccacatagatcgttgatcttctcggtgagttccttaatttctttctccactttcttgataggtgcagagtaaggcactaacccctgcgaaggattgagattttaacaaggtcagcaaaaaaacatatggagacgcaacatatcaaaccaagtataactatgaacgtttttttttcacttggatgacttattcaaacagtgaggcagagtcacccaaagctagttagtcatataagcacaaaaatgatctaaataggatcataaaatagcaattagctcgaaattactcatgagaaaacatcaaactggttcgcaaagaaacaaaatacagcaaaatttagggttctaaaagggtacacttacataagtcttgacgagagcgatatcatcttcgtcaagcggatcgtctacaatatctctcaccattttttttttttttttcggattttgatcggagatttgagatgtgagaagaagaaatcgaattacaccaacaagagtaccaactttgtccgagttattaaggtctagtaagtaagggccacgttaggtgccttgttggagaggccagagaaaataataccacgtgtgaattgggctatgaaacgcggcccattagcccaatatgcagtgatccgggtcgggtcattagagcgagccgggtctcgttatccatcgcctccctggttgctgcgtcaaagccagacacaagtatcttcgttgaaatttgctttttgtgtggcttatccttgtctgtcaaattcctgcaaaaactctcgcctctctcagacagtaagaggaacatatttccttaatgtattgttccgtataatcttacaagacatcctggttggtgttgcagagaagagtgtttcaaagtttcttcctttttcgttttcctggtctgaatgagctcccaatg

SEQ ID NO: 31811 - DNA, 3000 bp, Unknown
  misc_feature (1)..( 3000): 2750-1469P.txt file - cDNA_ID_3045931; gDNA_ID_1971833; Annot_ID_176334
ccaatatataagccaaaattttgaattactaattgaaaaatatgacttttctctgctaaattgctacgacattaggctgcttctgtgacttcgacgagccttccacgaacccacttcttcgttacgtttcctgattccaaagatgcagccttttcgtcaatcccgtggtaaccatttggaagaggatgattctcagcaagactgatagctccattagactctgctggtggatggactctcgttccgtttggttgcccaactatcccgagtttgatatcttctctacctccttgggatgtgttggattccatatcagaaacaaactggtttgtagtaccttctataacgaaagtcggtaaatcgttagatctcatgttcatgtgaagactctctccgttgatctgcaatgtgtgtgttccattaatctctcctggtcgttcttgatcgtttgtatctttggtttcagattcactgtcattaggctgaggtgaaagaagaaatgggtaagtcccatcttcatctgaagctatctgcctcatctctaaagatttaatcagttgtgttgcttctgctatgagctttttactctctaacaacgatgcttgagcaaccgggcttttcaaagcagcaatctcgaggactttcgcagctttctcagcttccgagatcaaaagcctgaggcgagaaaaggttaattcttgttaacttctgctcacagttgcaaacagagaaatattaacaattctgttttaagtgtactgaccttgctcgttccacagcatccatcttctttgattcttccgccactcgttttgctctgatgcttttgatcatttccagttttgaacttgccaaaggatctttatacgcaggtgttttgcgcttccttactttcaccacttgaacttggctttgacgttcaaactctgaatcccttgtacttttctttgtaggagtcttctttctaggttctgcatcgctccttggtcttctacgacgcctctcgacaccaacaggtataccgtgatattttgccaagccggagcaaactctttcacggtaagactgataagagaaagcaaactgagttaaatatgaccaagaacaaaacatcaaacaagtttgatttgatcaagtgactagacaacttactggatcagcccatttagcagctattgcttctgcaattctccttctttgttcaggagattttggcgctcttctgttacttttagctcctttaatggctttcctctgctcaacactttccagccattccagttgattctgttgatccaagatgttgtaagaatcccactgaagctcttcttcgtctgtatatccttgtttagcagcctccgctaacaagttttgccactcgaaatgacatgtctcctgcacttttctcctctccttcctccttgcccatcgcatccgcactccctctccaatcttcatccgtgtctccttgctgtaaaaatcatgcaaatttgggaagatagtattatgataacaaaaaccaaaagctccaacaggtttaaaagcaaacgaaaaaccggtactgacttttgtgcgtgcccaagattcgctaatttcatcttgatctgcacaaggacaaagacacaaaggttctatgaggggttgaaaattctgatgcatagagcaaacatatagaaccattcttacatgacatcacctttgggtcttgcattgcaatctttgtcctttctctaatcttctgtagggtctctgcataaacgcaaaagaaaaaagattatgaaatgtttccaattagaagcaactgaagatagattgctgaagatacgaataagcaaaaactactcacctggactatgcttcctgcctttgttccaaggagtgttccctctatttgccttagaaatcctcatccttctcaacttttctctgtcatccacttgttcttcgccatcatcagcacttccatttgaggatttcgaagaagcagaagacaaagaagagctccgttcgttttctttttgagccggatacttggtttcaagagtggccactgcagtaataagaacttttcctcttcggacatgactatgacccgtgtaaaatttcaaattcttggagaaacaagactgtctccatggattaggtagacttttagcatggataatactctgagcccccaatggaacaagatgagcttgaaatgaaggttggatagtagcaatatctgcaaagattaaaccaaagagtcatctccattagctagtaaacattctctagatactgtgcgaatcactagtcttttcttatacgcatttagaccaagattgcaaatgcaaataattgatactcaagaatgatgaaatccaatagaaaagaaacaaaattgagaagaaagagagtctcaatactgaagtagaattctaaacagtaaccaaacacaaacccagaaaattaagaggtaaatatctggaaactttaccagaaaaggtacctaaagaaggcattgggagctcattcagaccaggaaaacgaaaaaggaagaaactttgaaacactcttctctgcaacaccaaccaggatgtcttgtaagattatacggaacaatacattaaggaaatatgttcctcttactgtctgagagaggcgagagtttttgcaggaatttgacagacaaggataagccacacaaaaagcaaatttcaacgaagatacttgtgtctggctttgacgcagcaaccagggaggcgatggataacgagacccggctcgctctaatgacccgacccggatcactgcatattgggctaatgggccgcgtttcatagcccaattcacacgtggtattattttctctggcctctccaacaaggcacctaacgtggcccttacttactagaccttaataactcggacaaagttggtactcttgttggtgtaattcgatttcttcttctcacatctcaaatctccgatcaaaatccgaaaaaaaaaaaaaaaatg

SEQ ID NO: 31812 - DNA, 3000 bp, Unknown; identical to SEQ ID NO: 8513
  misc_feature (1)..( 3000): 2750-1469P.txt file - cDNA_ID_3045962; gDNA_ID_1971814; Annot_ID_58173

SEQ ID NO: 31813 - DNA, 3000 bp, Unknown; identical to SEQ ID NO: 8513
  misc_feature (1)..( 3000): 2750-1469P.txt file - cDNA_ID_3045962; gDNA_ID_1971814; Annot_ID_175876

SEQ ID NO: 31814 - DNA, 3000 bp, Unknown; identical to SEQ ID NO: 8513
  misc_feature (1)..( 3000): 2750-1469P.txt file - cDNA_ID_3045962; gDNA_ID_2926180; Annot_ID_200165

SEQ ID NO: 31815 - DNA, 3003 bp, Unknown; identical to SEQ ID NO: 19922
  misc_feature (1)..( 3003): 2750-1469P.txt file - cDNA_ID_3045966; gDNA_ID_1971851; Annot_ID_176409

SEQ ID NO: 31816 - DNA, 3003 bp, Unknown; identical to SEQ ID NO: 19922
  misc_feature (1)..( 3003): 2750-1469P.txt file - cDNA_ID_3045966; gDNA_ID_2926180; Annot_ID_200163

SEQ ID NO: 31817 - DNA, 3000 bp, Unknown; identical to SEQ ID NO: 8692
  misc_feature (1)..( 3000): 2750-1469P.txt file - cDNA_ID_3045974; gDNA_ID_1971851; Annot_ID_176399

SEQ ID NO: 31818 - DNA, 3003 bp, Unknown
  misc_feature (1)..( 3003): 2750-1469P.txt file - cDNA_ID_3046005; gDNA_ID_1971862; Annot_ID_176451
catatcatgcgtcaagaagcataacaaaagaaaatgataccatgtttcgcaaataccaccttcaccttagcctagttgaagatgacaacacacttctccttctctttccccttagacaatctttattgtaaccatataatcataagctctaacttggttctccataaaccaggacctgaatccatgagtcatgaaagctcctacaaagcttcagctcaagccgagttcattttcccaatcaaacaataaaaatcgttaggattttctctatataaatctgtctcgaaaacatacgcataagtcaggaactaaccattacaaatgctatcccaccgttgaatatgtagccagtagtatcatgaataatcccacgaagtttcatcccgatcagatttcacaatatcccacgttcttctgaagatgatgcatcagaactgatatttaggtttctgcaacttgagatgattctggacaaacttccaagatcaattccggatggagcttaaatctgatggacaagctgtcagctactatgagttccttgaatcaagatctttccatagacatcttaatcgtgatctaattccttctggtccatcgggaaaacgcatcataaaaccagtagtcacacactgttcttgatttatacttaacacagatttggacaacttctgcagttacttgcccagaaagaaacactcataacttctcgaatataaacccgattgaaactctgtcagttgctatggcttcatacaacgtgatctttgcagatatgtcttatttagaaactgattctctctggtttgacgggaaacatccttgtataacctcaacttgaagctaccattctctcttcatcttcttccttatatgcttctagttttacctagcccccttctctgatttactaggatctgcttcatctcacttctccttactgtcacaacgaaatctccatctcttaatgcctttcctttgcagtggtgatgatctcttttcctctgccacgtatcgtccttcgtctccgcttcctctcatcttcctcacggttatccttcatctcttccctttctcttctcctcttcaagcgttccacaatgactaacatactcaacaacaacggtagtggctgacctttaattagggttaagattaagacgacgcggtgacgctcggtttaggaacggttgcatgaatcgctttggtttccttcacttgtgaactctcttctctctcggatatggtaacgaccccactatagaactcatgtgttgatgctttggatttgctttctcaagattcttatttggtttccgttagtggctcagagaaaagggagatagattcacctatatatatgtgcaaccaacaacacacgtaacaaaaccctttaacattagggagttgcttcacttgggtttaaatgggctccatgggttccatgggctttgctttttgacaaaacgaatagggtgggctattgatgttgggtttggagtgttacagaataagtcgttctttatctttttggttttagttaggtgtttcaactctttcttctgctaatcaaggttcagtgttaagatagtgagaaaaaatactcataatgcaagcatataatggaagccataagatcagtgtaaacttttaagtttcatgtttgatcttattgtgatttattatgagtctgctattaacaagctactattttactcctttctctttagtaataaacaatgttgtacttctttagtttgtttggtttgtaaatttacttgttgtatgttgtgtcttcaactcgggttcttcaatgatggacgatgctgttgatatatatatatatatatatatatatatatatatatatatatatataaaggattcttttgaaacaaaaaagtatgcatttgcggatttgcctttagttacttttgtacgtgtttttcaattccagtcacctacctctctataatctttattattctttttttctttttttgggcaaacctctctatagtctatatgatgtataaaaggaataaagaaaactacggtattcatttttcgaaatcggtttttattttatttgatttgatttgtttcatgtgacctttatatatgaaatgaaattataaacaaaaaactatggtattcaagaaaaaaatgtaaaaaggcccagaaaatccaaaatagatgggcccaacattgggttgtaatgcattgacaactactcgtggacaagtacacgtgaataccatttccttccatacgtataaaaccaaattattttcccaaatagtatcctcttattattctattggtcaaatcaaaaataatgaccaatagaattatgtattctactttcatttttcaaatttaatagattttgatctatcaatagagaaaaatgcatggcgatgaaaatacatattccggatccaaccaaacaacatagcttttttattagactataaacaagaaaataaaatagaaagagactagatttagagagagaaataatgatgatagtgaagctgacactttctgcaagtttcataagtattttattcttttctatattttttctgtaaaaattaaaaaattgcaattgctcgaaattttcataatttttcgagttatgatggattcttgtagttgaaggcttgaagcatgacatttggttaaacaaaagcatagcatttttggaccatcatgatctctagattactattgaggataagattgtatcttatgcgataagtttgaatcctagttgtatatgtttaggaatcgacatttaagggtttggtgtttatcttgtgttgattccctcttgtataaatagcaatgttgagttcactaataaagcaagtcagttcgatatctaattctacatggtacagagctaaagatctagcaaaaaaaaaaaaacatctaaattttttcttttttttatcgattgtttcgatctttgtttttcttgcgtgacaagaaaacatg

SEQ ID NO: 31819 - DNA, 1675 bp, Unknown
  misc_feature (1)..( 1675): 2750-1469P.txt file - cDNA_ID_3046032; gDNA_ID_207; Annot_ID_143997
  misc_feature (1020)..(1022): n is a, c, g, or t
  misc_feature (1025)..(1026): n is a, c, g, or t
  misc_feature (1028)..(1029): n is a, c, g, or t
  misc_feature (1031)..(1031): n is a, c, g, or t
  misc_feature (1047)..(1047): n is a, c, g, or t
  misc_feature (1054)..(1054): n is a, c, g, or t
  misc_feature (1188)..(1188): n is a, c, g, or t
  misc_feature (1214)..(1215): n is a, c, g, or t
  misc_feature (1562)..(1562): n is a, c, g, or t
  misc_feature (1564)..(1564): n is a, c, g, or t
aatttcatcgaacatgttataggcaatgatgagtttgtggtgaataatgtgtgtgtaggtatacgctaaatatatgggatgttggtgggcaaaagactataagatcgtattggaggaattactttgagcagactgatggtttggtttgggtggttgatagttctgatcttaggaggttagatgattgcaagatggaacttgacaatctcttgaaagaagaggtatattcataaaagtatcaatatctattcaatcaaaagcttttgtaagctgaagcttgggttgctgtttttggtgaagatgattcatattcaaatcttggttttaatggcagaggctagctggttcatctttgctgatactagcaaataagcaggatattcaaggtgcactaacacctgatgaaattggcaaggtaagggttttgaaactcataagtcgatttggacataggggttatcgggttgaatcattttgtctctcggtcgggtttctcaacttcagtgaagattagtgggttaagtaagatatgttttgagttgtatattgtgtgttaaactgagtttcatcttcttgcttatgaaggtgctaaacttagagtccatggataaaagccggcactggaagatagtgggttgcagcgcatacacgggtgaaggtttgttggaaggattcgattggttggttcaagacattgcctccaggatttacatgcttgactaatcgactactgcattgcacaatcaatggcttgttatactcaactatatgcagtgactttgtattggctctaagtttttccttcagttctattgtaacgatgattagacaaaacataaatatttccaagacgaactcttctcattttgtttcattgaaagagacttaacaacaaaatgatgtctcatacaaccaaataaaacttattgataaaaatccaaccataatctaccacagatagatgaaagttgtctctgcagagtaagaaggaagaagaagcatacaaagagagatcatttnnnacnncnntnccttgtttcttcttgncgacttncatcagtgtacattatgcctttgcccttataaggttcagggggtttgcaactccttaccgttgcagcaaactgatgcactctttgcttgtcgattccagtgcagcaaaccacattgttcttgaaacaaaagacncgaaccgctggaggaaccgcaagttnnacttcgtgactgtaacccaatttgaggtataagaaacgccctgcttcctcagctctagctttgtatccaactccaacaatcttcaagaaccggaaaaacttggcttccatgtctctctatcctacagagaattaccctgccaaagaggaaaatttctcagcttcttcaaattaagaacttggaaaccaatagagttcaccattatcataaaacgatgctcaatcaaaatctgaaggcagtagattttgtctctctagccactcaaatcacacaagtaaatatgaaaattgaccaaccatgctacgaaaaattgccatttttttcattactttgtatctcagagacgnanaaacgagcgatgagctaacacagtaaatacgtcgaacactttccgtgcactatttcaagaacaatataaacggaaataaaaactccagataacctcatttacaagaacatg

SEQ ID NO: 31820 - DNA, 573 bp, Unknown
  misc_feature (1)..( 573): 2750-1469P.txt file - cDNA_ID_3046068; gDNA_ID_686; Annot_ID_144174
tcctaagtggtgtttgttttgttgtggtctaagaaagaatcgtaagtcaaagacaacggataagaaaaagaagaacagggaagcctcaaagcagatacacgcgctagaaaatatcgaagagggcaccaaaggtaaccagaataaatcctctgtatcatttggtttcaacatttagtttcagttcattgctgaacacttttttgtttctttctttttcttaggcactaatgatgcggcgaaatcaccagaggcggcacaattgaagttggagaagaagtttggacagtctcctgtttttgttgcgtctgctggtatggagaatggtgggcttgctaggaatgcgagtccagcttctctgcttagagaagccatccaagtcattagttgaggatacgaagataaaaccgaatggggaaaagaggtaatgtagagctctttaaaacactttttagcactttatctttcattttgcgatatggtttttgatttctttcatggtgtttgtgaaatttattcaagattgggtggatctacggatctgtcaccgaggatatccttacgggtttcaagatg

SEQ ID NO: 31821 - DNA, 823 bp, Unknown; identical to SEQ ID NO: 22
  misc_feature (1)..( 823): 2750-1469P.txt file - cDNA_ID_3046082; gDNA_ID_884; Annot_ID_144617

SEQ ID NO: 31822 - DNA, 3003 bp, Unknown
  misc_feature (1)..( 3003): 2750-1469P.txt file - cDNA_ID_3046100; gDNA_ID_1971666; Annot_ID_175059
catatgtactatcttctattctttctattctattggattattggatttctatcttctatttcatttcaacattccttctaattattgttattggatttcagcaatctaagcagaaaagcatgaagttaaggaaagcacggaagaagaaaaggccaatgcgaagtagtttgccaacctttgactagtcccattctatcggttaaggaggccaggaaagatcctcaggtagaactcagtttgggaacaaaaacttttccgagcccagcaaaataatcgcaaggagcccagcttcaaactaatagcccagctccataacaggcgagcagccaacaaactatgacccgaggcaaggaacattccccatccagctcagcccggcaagtgaaacataaaacacaatttgcactcttccagccgacttctcagcatagcaggaccaaccaatcagcacatttggcacttacgccagcaaagcatatatgcaagtcaggctcaagattcacacccaaactaggctcagcagcataaagatgcccgtggtatagactactcgacttagactaagaaggaaccgagaaagtaagccaagcggcgtagaccaataatcaatgtagactttgacacctaacaattgcactagattcaaggaaacctaccaaggaacaatcacatcgggattagcaagtcaggctccgcattcgtactaccaagctaagcagaaagattaccggtaaatggattcctttacttagaagtccactcacccgagcaaggaagaaaagcaatgcaaggaccaatccaactaaggacaatcaaacaataccagcatgggagaaaaaggagactcatcacattccatcagtcactcgagtcaaagcataaagcagagcaatcgtactccactcaagaataatcccatcaaacaaaaatgggcgattcacatttcccttccctcgacctggctctcttcaacttgtttcgaccggcttctatattctgaatgtttcaaccaatttaactttcacccttatcgttctaaatgatctttctctttgacttcgagtttcagtattcgtgtgacttatgctccacttgattagcgtagctgccttagcttgccccgacttgactgattggctgggttcgcttcacctcgctcggcttagttggaggactacagaaagagaagcatgacaagcatgacgttccttaattatatctatatatagttaactatccgtatatcatagtaaggaaccgaaaagtagttacccattcacgtacatcggttgtgtcgaatatttgtaatcaatcggtcaaccagacatcacgtaactattcagatccaacttctagaaataggtttcagtcagctcgatgaaatagactaatattgaccatttatgtcagatccaatagcttgcctcgaatgccagcatgaaacctaattacgatagcggtggcgaagacttgaagtaatcactttttcctggacaatcggccagctaaaggtcagacccaataatagcataatttcacccatcagtggttggtaccagtccgtaaaagtccagcacttaggtagcagccccatcaactgtacaataccgacctaacaggaccagtatccaccataaaaaccgtagcataacaagctaggttcccatagcatataaaggtagggcctagtctaatagactgaagcactaatcacaaggaatcacaaatagcatcccatggacaagtatttcaccaacatacagaggagcggaccaatttcaacgagtagacaaatccatttgaaaagacaactaaagatttattaaatttccggttaacttatgatcccggcctagctcgtcttttcttctataatagcttttggtcaccgctaatcatcaggtgacgctggtcaagatcagtactcttattaactttctgattggcattagtatagaatgggcgactaatataatagaagcatcaatctaaaatcaacaatcacaagtatctacatgtttactcaatgcctggaccaccttaactactatgtctagtcttcaaaatgcctggctacgctataataaaggcttgcaatgattgtgatctcttattgtatttgatcctattaaagtatcatgagaaagctacgaatgttactatgcacgcataaaaagaagtgagtcgaatatcttgagtgagaaatatggtagctttacgtgctagaatggaccaatacattataaaaaaggatctctctttgaaacctttatagaccccaggcttcaaaccggaccttagaaccctccaagctcaagagtacttatctagacatcgcaagtcaggctcaacagtcgtactacaagctcagcagcaatatgaccatggaatggagtcattgagaagaaagggagatcctacctccaatacgagagggaatcgtacgaaaggaacaaactcaacttcaagctcttagcccagcagcaacaaactatgggattggtccgagacaaagaagacagaaacagcccggcccagtaccaatatcatctaacgaattgtacgagaaagctaccaatccagcccggctcagcaaggcgtggaaaatgaagcacatcgggtccacatgggacagcgcaagttagactcaagattcgtaccatccacgactgagtgaagtaggacgaaagcaaccaatctaactaaactagatagaataatgtttcaactaattaaactataaaccttgttcgttctgaactatctcctttcttcgacgttcactgggttggcgtgactggcttaaactctctgaaacctgctattatatcaaccgatgaactaactatctcttacatatctctatatagaatagattatctataatgtttgattcttagtctactgcccgtttaattcccttgacttggccttacttcttttcctttcttcgcttgggcgttcctatcaaaagaatctgtcatgccaaagacccaatccatg

SEQ ID NO: 31823 - DNA, 3003 bp, Unknown
  misc_feature (1)..( 3003): 2750-1469P.txt file - cDNA_ID_3046102; gDNA_ID_1971666; Annot_ID_175057
cccaggatgcgaagggaatgagctcggctgcttctcctccacactgatttttctccgtgcctgctccgcatgcgcttccccattgggctttgctctcctcttattcttcattggacggttcggttcggatggacttcgccgttctttcccaactaaaaaagaaaaggctgtatcacatcgagatgtcgattcgttttccgcccccaatgagatggggaatttgtaaccccctatttctactttggggcccttcatctttctgaatccaggcccgtcccggctcgtgtcgttccaacaaccggcggggagcatctcagtatacgatcgcgcgcagtaactgggagtcctattacacctaaggcgaacttcaattcaccaaaccaaggttcatctcgtgtagtgattgtggactctactaaggatattgagtagacggttgatgtatcagactcgaccctatctttcgtagcatgcattcccatcggtgtcgcaactgattcggtaagctacgtgtccggtgcacggagaactgccttcggtcctccaaacttacttattcgtggcaaccttccggccgcccaacgacctataacgctagtcactactcccactggggctagaaagtaagccccacaacccaaagcggcgaagaacaaatagaatttgctacaaaagccggctaacgggggtattcctgcgtatgagaacatagtaatggagaaggtaatagccgaaataggattcgttttggctagagcgcccaaatccgctatatatttgacacgggtttgccgtaatgctgaaactatggcgaatgcatccatcgtcattaatgcataaataaagataccaattagtagtgattgaattccttctatggttccacatgagaaaccagtacgaatataacctacatgtccaattgaactatgagctagaggtcttttgactttcgtttgggccatggcggccagtgctcctaagatcatagaagcaatgctgcagaaaaagaagatttgttgcaatgtagctccataggaaccataaatagaaacacgtaaaatattagcagaaatagagattttaggcgcaatagaaaggaatgctgtaaccggggtgggtgaaccctcatagatatctggtgcccacatatatagagtcaaagggaatatggagtccgagggggagggggttttcttcggggctcgagagattgaatagacccacaagtttgaaattcgccactggggaattcacacgaaagggaacgaggaattctcaacgaaaaaagtgctctctgaaccgaacgtgaaagtttttttccatcagacggctgttcctgtaactccactctcgacttggattatatatccaaaaaggtccgctctcggccattccacacgctgcctagccgaggtgtggtttctgaagtggattctctcttttctagtagatgccgaacctgctgccccattgactaagaagaggggcgggcgcagcagctacatggaccccttcctttctgttgttgccagcgctttcccgggccgagccggaatttttgattattattctaatgggcaggcaaagccgcaggctgctatcccaataggccagcgggcggttcgaggagaggctccggcaatcatagcaccgcggtcgaaaaagcgtgctcccttcagataacacgcaccgtagctatcctcggccttcttcgttttcgatgcaaaagaaaggaaatctctcgatctccgaaagccttttccttaccccgccgcatctccctcccttcgtcgagcctttccggggttgttccttccttatcagaacttggcgggcattctttccagccgggggatgggttttgtttgaacataggctcaaacataattttaaggtcctagctacgccatgcgttcaataccaaatctggaaagctgcagaaatgacaaaaagagggccgctttcctatgttgcactgaaaaaagaaggacctaagagcgtcttctcttaggttttttcctcccgcgcccgccgccgcctggcccccgttagagggaaggggaagattagcaaagcgaaaaaagacagaggaagggggagcagcatcttattctcttcgcgagaacttccggattgaagaagcattcggaacgggctccagcgttcatttcattggcgggaaacgatccaatccattcggggcttcggccaaaaacgaattcgacttgattcatagatagaatcaatgataaataaacaaaagatagatgttcgagatatcttttctttctataaaaaaagaggaatagaatagacatccctttctttagatgtctatctatccttccgattttatatcgttatatctgctctctcaatttttttttagagagagcagatagatcctatcccctatatcgaacactaattcctatctattgataggaagatcttcgtctaatagcggactttgcctttttttaggaatttctcatatccaaggcagcttaccacaagaaccccaccccatacaactagttgggggggctgttcgccttttgaatcaaacaaagattgaagtaggtaggggcttcatagctactttcattctaaaggaaagcgaagaaccaatctttagtcaataggagccctacttccctcgacctcatcacttcaattgttgcgcaaacctctttcttagtcaccgggggagcgcacctttgtcacagtatttcgagctgtttgatagtgacttcttgcgtttggtagggcgacgaaagggctacttccttcaatctaggaaacagccggaaactcgagaaggtcgcctttggaacggttcgccagtaaccaaagcctcactccttccttttgattatgtcgtgacgctgactgaatccaatctataaaaaaacccggaaactcaacaaagtgcgttcccttcgtcaagtaggtaaagtaggcatacgaaccacttttgctttgcggaataaaacaatg

SEQ ID NO: 31824 - DNA, 3000 bp, Unknown
  misc_feature (1)..( 3000): 2750-1469P.txt file - cDNA_ID_3046116; gDNA_ID_1971666; Annot_ID_175045
acctttgtttaactgtacgagcgagaataccagctaatcatgtaactgccaagaataaggattctaaaggaaagagttaggtgtgccagagatcctgggattacctttggagaggaaagctcctactattactattaaggagcactcaaagcttcttcgctaggacaggacagcacagaagagtagatagcttgcttcgctaggagtgtgctaacttattctcataggcgtacccgcgtagaagaagctaccttcctcaaactcctctgcgcaacccagccataccagagagtgctatcacaaggaaattgtctggtctcagaagatgagagcttcttttttagcagaggtactgatgtcaggagagtgtcgacgcgctcttccccagtcgtgttgaagaagtttgagggaaagatggattctgaaggaaatcggctgacctatcggatgaagcagactgctgcgaaagtggtgccacgagtcgagaactcttagaattgtgctcgttcaggccctttagtgcacctaagtgcgaagctggtgctgcaagggaggatgtgggcgggagagcggtcagtcctctacctctcgctatcgatcccttttgcgtcctttctagctatcgactctatccctttttctttctagctatctcttcttccgtaaggacctttttgttcccccccacgctgatcaacaaccattgagataggatagagccaatgcaggaggtgaccgaagtagctcaataaaagaatgaagaaattgggaatggtaattcgagcaatgaaaagaaagaaagagttcgcccaatcgtatagctttttccttcaaatgcttctatctcacttgtttgctagcttgcaactgctgggcactgaaactcagtcggccgacatcgataagggagattttcttccaaccccttggaagagaggaagagaaaggagtggtgatggcttaaagaaccacgttgcataagccggaagcacagaatgttactcggaaacaagcctgagaacgactcttcaccgttagccattatgtttacctggtcaaatgccgtcgtttatgataggtcggtctagtgagagcaaatgatcaagcaagaacgtgcctacatccgttgatgcacttcgttgactagtgaagggtttttccttggggcccacgttgccactggggtcgctcatcttactctagggtagcactctctatggaaagaagagtggttgtgcttcactactagccaagtccatgcagatggggataagggggttcactgctgtctgatatcatcatatctattttgacctaaaagcttacttgggatatctaagagctaattaaatcttttctcttaaaaaaacgggtaataagaaaacacttattatctttttatttgcaagcaacatctgctcaaaaagaaaaggaagttgacttcactccggtgaccggcttcgcgggatcgccttacgtataaggacctgatccactctaggcgaagcttttttgggcgaaagctacttactatgttatcttccaattgagttgagagagttttcaatcgaattccaatttttcgttatataagctatttataattgaatgatttaaagattgagtttcaaaaagaaaataccggagaaaaggtgatgcaaacaggaaacctgcttcgcccgttgatggtccaagcccaagtattcattccttaaggagctggacgtattgttcagcttcctatgaagctaggctggcacttaggaagattggacgagggtggaaggggcacatctggtggtatcgtatataagagagagcttcttttaagaatgatctgaaactatcaatttcataagagaagaaagaaagtagcctagttcagatgaaaaggtatgccacaatgctatccgagttcacaggtgtcgttccgtctacttttctttccaaactttttctaaagtgcgaaataaacctatcaattggtagagtacaagatcgaaaagaaccctataggcaggctaaaagcgctgtccgtcttcatggcctcaataatactcagtattgtactggccgaatccgtttcgcagcacggagtatacctcaatctccgttagttccgtttcggctttttccccaatttcccactccttctgtgaggcaaaacctcaccacactacacttcgacacaagagaagaggaccgggcgcttgtatcttcgggataggagttatcggtcttcttttaagaaaactcaaatcaaatactccttatctcatggatcaacttattgctgatttcgtttctaggatgggtttggctctgcctgtacttttattcttgtagccgttaggtctggccaaatgatccatcaaataaatagtattaatatggaaataatcctgactgatgtagcgcgagatgcgcttcaagaaaaaatcgtgtcccaactctcaattctgttgagagtatatagggatactaatactagtgagagtgtgaccttacctttatccggagtaaatctccaagaagtcgccgctcgtagtttttttaacaacgagagcattccatggttttttcatctatttagaccttgtcaatcagggcacgaaaaaaaaccactttgcccacaagctctggagttagtgctttcgttcagttcataaggtagactttttttttctaaagcggtattcctccttgcctctaatcctcaaatctaatatgattactcggctgttcgcccaactggtatcgttatcaattgtaacttattggaatgacgctattgttgcgacaaacttttcctggctcttcataactttctttgttatgactttcacctttcgtaccttctcgcgctacttcaaaaaaccgatcatttggactttatatttttttttatgtttaatagcctttctccttctttgggcagcccgaatccatataaatatccttttctcatttgcttttggagatgtttatagcttcttcatg

SEQ ID NO: 31825 - DNA, 3000 bp, Unknown
  misc_feature (1)..( 3000): 2750-1469P.txt file - cDNA_ID_3046120; gDNA_ID_1971666; Annot_ID_175044
aatcagaatccgcaagataagcagccaaacgagcagagcagtagaaggacaggtcatctagaatcctattcttccgatgctttgatcggttccttctgatatggaagagttgactacccagcacatctttgtttgctcgactcggtaagtacagccgcttcctttattcttttctttgaaccattaccctcaagggactactccgtggcccagtgacccttggtcttttgttgctgttccccgttccctttatcagctctttaccagctatccaattaccaatgaacaatagctatgaccgtataaccaaggttcgtagaaactctataaggagaggcatagaccggtggtccccttcccaagtgcctctttgttttgtacgagctgtttccaagtgttttgattagtcgagtcttcttctgagtccagcacttttcctttgtccgatcgtccgtctcttcctctcctcttggtcgagttgctaaagcacctatctttctttgttgcctccggtgtgctaccgagcctttcccaggtatttacttactgccggtttactccacagcattgccatcttctttgttttgttggtatgagctgatcggccctctcaagcgtaaagtagtcctctgattgtgttgtattggctccttaagcaacatttgtttacttatgaccgggtgctgcttatgcctagacatcttccccaggacttattctcgaaagacgttgacctatggtaggtgctgagtccagcacagttgttcctttgttactgtgccatttcgagaccttcgtccgatcattgttcctttgaagacctgtcttttattccttctctttccttgcagtaattaactcacatttatggtaatgctgatgcttggcagcttcactgttccttcttgttgtgcgtaggcttggcgttgtttactccaccgtgctatctttgtgctgctaatcagtatagtatattctttgcatactgctatctttgtgctaatccatttcagtaaacgggaaagtggaggagtaatgattggttccatcaatcttattatttcctttgttttggcttgggtttctttcatacgagtaatgctatttatcaatctttgtgttcatcagtagactcttcagctcctggctcctgatcaatcttccactctgcgcctgctgctgatccatgtcattcagatgttcctcgtcctgttgataaagcacctttgcaccttttcctcgaggttggggtttcggtatgcttacaggggttttagggcggagtatgagcgtgttgtttattcatcggcaccttgaccttgactaatcgacgtaaagcgtcttggcttctcgtacggcttggtgctgtaatctttctttccttggtcagtggattatggttcagtacagatagtgataatgctccaatggttactgcacctgtgtagggaatcttatttctttttctttctttcgtaattaagtccattttatcagtcggggaagggagggagagtcctgcttcggacctgtgacctgcttcggggcataagtgtattagtgcttctgtgtacgattgtgctgatcagtcgttcgtgcttttgcgataatgtgataactaaaataaagaagaatgtgaaagtatgagttttgtacttgagtgatgtgctactgatcagttgtgtgagggcttttgtttccatagagcgtgtgcgaagtgtggagtttcgtacttgactccatcccgtgatcaatgtgctaatcatttcaatattgagactccatcctgcttctgctcctgatcctttgtgctgctaatcagttttgtatgccaaactgctcctttgtgctaatcatcagtagaaagtggaggagtaatgcttggtcaaagtgctgtagatttgtttcggtacgagcactgcctttgtgctaatcatcatttcagtatattctttctttcgtgttccatcctgattaatctgtaatctatgttttgtacagctggcttgggaatcatcagtagagtctttcagctcctgatctgtcaactttctttcgacggctgcttggcgtgctgtcatctttgctactcagcttcgtacggttttgggtgaaggttcaatcttttgtttcgtacgagtcggatatgtttgtgcgagaagaaggacagctttcgtagagagtccgatcaatcttccactcttgcacttgcattcattcggttctcctctcagttccgtctaaatcccctcgtcctgactaaagcacctctccgtgttccgtcgatcacctagataaattaagtatagtaataagaatgaaaagtatggcttggcgtgttggatcaatcattcattgctttcatcttgaattaagtatatagaaaagaagtgttgtctgtgccaagtctagaagtggtagtattagcgatcctattgaggtgtttatcgggttcgctgctcgaatttcaataaagtcaagtttcctcaatcccgtttctgttgagttgccaagatttctcaatccttgtattagttgatccttttgtttattcgaaagatcggcgggatgctacttcaggtagggtacgggcgctctatcattgtctgattttaggtttctgatcgctagcctgccgggccccccatcaaactatcaatctcataagagaagaaatctctatgccccctgttcttggttttctaccatgtttttgttggtcaacaaccaaccacaactttttatagttgttactcctagaggcttgacgtaagctgtctggagggaatcattttgttgaaatcaattaatctaatcatgcctcaaaagccaaatctacttttttgcagttccacgaattccggaactaacgacgttctgccaggagtgcctattctggacatgtttcctaatatataagtagacaccataattaaccaccccttctagtgttcgggtacagtagctctcgcagaagaattggtggatcctattattatg

SEQ ID NO: 31826 - DNA, 3000 bp, Unknown; identical to SEQ ID NO: 8285
  misc_feature (1)..( 3000): 2750-1469P.txt file - cDNA_ID_3046124; gDNA_ID_1971666; Annot_ID_175037

SEQ ID NO: 31827 - DNA, 3000 bp, Unknown
  misc_feature (1)..( 3000): 2750-1469P.txt file - cDNA_ID_3046143; gDNA_ID_1971666; Annot_ID_175023
cctgaattaattctttttctataggaaggaactcaagcaatccggcatccccggcagctatgcaattacttaattcagtctacaataatttggtgtccgattttcggctagtggacagctataccaataatcctgtatacagctgtataatattttttctaaaggattatcggtgagcaagaattaaaatgtagttttgagtttcgttagttaacctacctttttcttttggtggtgagtttccttttagggggttacgagcctttagcattcagattgggcaatgcgagatagattgatttacatttacctcgaggatagtctttcttttccaagcgcgctttcccaacctgccatatgtccgatacatagtcgagggctctatacgagcgcctttctttcaactctatctattcttgcttttcaaacattgtattccttatagaatatcatctcatgtctatctatagtataacgtttctcatagtggcatagcggctccgaggtgattctttctggtatccgtcctctctcatactgctttaaggttggaggatttagttcaagctagtctcctatggtgaagatctctatatttgttaagactgtatgaaagaaatcacatatagtaatcatctaagaatatatctatactataatggttgcatctaacatttctcatagtgtagataaggcagtccccggagctaagaaaactacgctattcaaagcaatccgcccaaggaaggctagctagtcgagtctaatgctaggctaggtgattcctctctatcaatgaccgaagcttaatccagagagagagctcactataccaccaggttgccacatttgcttatgaaacaagaacagcttatcccgaggctctgaaagactgagggtagtcactcaaaaagtaatccgtcacttcgcccgaaaagcactataggggattccggccaagcgagcataaaaatacaatacccaactttctgtttcagcccactccacttcattgaccgagactttctattccgaaccggttcggttaaagacctagccacgagaccaactccgggctgtctcgtaaaagatcaattcccagatgctcttactcgacgcccacaggcaagcttgtttagagaaggagagttctcttcatcagggaaactgctcaacctccactatttccataagcatgattatgcactagcagacataaagtgccaagaagagaaaacgcataactcataagccaaagatgtattcgatcctgaattgaacgtaattttttccgattggttggaaggtaaggatagcatgattgactggttgcgggtcccttggatcatgggccacagctatttggatagattcagatcctttcatgtagtagagtctttgatgggctcggatccttttcatgatttcatgtgaggacacctttggcgggcttttttgatagatccaggatttctgtgcgatatcgatcttctctttatggctttggttaatctatcgtctagctgtcttggtcttccgaaaaggcgaagacaaacgcatggatttactttattctatgactaaaccagaatcaccccggagtgagctgttccataaggggctcatattatccgacagagcagagctatcatgccgaagaagcctttttctttctacgccccggtggcatcttgactttcctaggtctctaatagttccccataaaagagtcaatgggctgagctgatcgagtcccattttctggctgcaaggcccggcccgagtagtcaatggttgctaccgctcactgcgcttctctgtaccatttcatttctagtcaaaatggatgctgggcatatctactgacccgacaagctgacgtaattctatccatccgtagctgtctgtgccgctacctctatccagcagatccagtgccaaccgatctatatctagctttggccggccgggccaacccacctatacagagttgatgccatgcccgcctaaccacgaaagaaagcatccaatatttcaagactttctccacagagctctaaaatcctttctccgaagatccaggctcactttttcaggcaatggaatgacccgagcaaaggaaagggatcaaggcaataactacgcgcatcaaggtgatacctagaccgagcgaatctgaccgtagcctatcatactgagtgaaagcgtgccgaaccaagggaacttgcctttaatcttaggctcgcagctactaggtgcgtacccttgaacctagcccgccctagggtacaggcattgaaagacggctttcagaataggcttttttgtacgaagagaaggttacactactatataagataagtaattcattataagataagtaattcattgtgctaaaagaaccactttgaggatcaatcccttactgaatgaatgtccttttgatcagtgatcacagaaggagaaggcactgtgaatgagaacctctttcctttctggctaccaaacgtgctaataaaagagcttattctgagttttaattcctcgaattctgtaagctagcttggtctacctgctttgttctgatttcattgtattcctccgtattcagcattcgcgccggtgtcacaaaaagcaaaagcatatcaattcgttgaggcaactagtcttggtaaggttttttccactgaatgagaagtttgtatgatccagatgttttgaaggcgtgtttgcccctgtgatacgcgtacgaggagtcgacggggaagagccgtgctggggttggaagaggttccagctttagaggagcctccctatcttatcccttgttggtcttatttgacagctcagctttgtctcgggcagattttggtccatgatggactctttttatttattttgacgattggatttctatatgaatggaaaaggggtgcttcggatcgggagtaaagtgatagggcacaaaatgggggggaaaagaaaggaaagagaataatg

SEQ ID NO: 31828 - DNA, 3000 bp, Unknown; identical to SEQ ID NO: 4636
  misc_feature (1)..( 3000): 2750-1469P.txt file - cDNA_ID_3046178; gDNA_ID_1971690; Annot_ID_175071

SEQ ID NO: 31829 - DNA, 2585 bp, Unknown
  misc_feature (1)..( 2585): 2750-1469P.txt file - cDNA_ID_3046188; gDNA_ID_1971693; Annot_ID_175104
tggactgtttagggttcttcttaaagaaggaaactttgtggctcttctttgtgctcttcttgcttacttcgtcttctttaactcttactcttcatcttcttgattcgtttttttgaattcttgtcattaacgaaaacattcacagctagtatattgaaatctttcctcattattatttgtactttagtttaacaagatttgatttcttgaatctgaaaatatcgatcttctttgttggattgatgtgttttctgatgatgtcagagagaatgcttccacgtcacaataccgacacgtgaagtaatttacattacttttgtttatttatttgagagaacacagattcttcttttggtctctttgtttgtcggtcattctctgtctctgtccatggaagagcttctgaaacctgaactataatatgggttagaaggcccattggggcttacgggttaccattaatggcccattttatcgtatatagtggagaactgttttagtgacaacgtattaaatacagtatctactaggccagacgataaattgtgtttgaaggaggaagtgcatgtgattaggtatggtccaagctgaagttggttagtaaaaagcttaaaagatgataagttgcaccaatttttcataatgtagcaataataacaagtgtaagaagatgctcaatccaagtcaatgcatagttcatacgataattctttttttgataaaagttcatacgataattcaaagatataattatgaatatttgacaaaatatgtacatacattcaatgctctggatccttcatgagtaaatcgatcctcaatgctcttgaatctttatccacaatgagtaattctcaaaaatctgttagtattgttactttgatttggtttgctttgtcttcaaatattatcgaatgccattggttggtggtagtaaatcatgacatggccttcaaaagaataattggtctgtttgaatgtttctcctttagatatactaatactatataataattaaatgattatggtccaaaattagcagtaaggctgcttttatctctctttttttttcctttacactaatttgattgcaaaactagatggctaatacataactttacactttgcattacaaaaaatagctagcaaaatatccaaaaaaatttaatactgtacattgttccttagtattattaaaatgactctttgggtgttaactgttaataaaagcagtcaccgacagcattcaaagtattttacttctgtcttctatttatttattattgtatttaccacacacacgcatcaagttttctaatgtcgacagagaaaatagatagtactgttaccctatattctaagaacttaacaaaacattagaaaaatacaaaagcggagacgactgtgatgaacaggttcacataatttagcattgtaatttatacaattttgactaaacaacaaggataaaaagaatcttaccacaaatgtaattgtcaagcctatctatgctcttttatcatcataaacaacgtggagaacacctcaaaagtgattttcaagagaacaaagaaataaatatgctactgaatatgttgaatttatgcagaagctaaatattttctatgtaaatgtaattatttgatttgttttgtcttctcagaattaacctttgtatgttctaaatgagttgggctcacaattcacatcacatgattgaacaatgaacattttttctcaaatatctgaagttgatgacactccaacgcatgtggccctgtttattttttttcctaagagattcaaatgtattttttttcctgtgatactcatcaaaattaaattccttcttttaaagtttccaacaacatattagtctcttttagttctaaatctaaataccaggttaattcctgtgctttttcctcttctttggtgggtcaagttctgttctttccccttcaaccatttttttatttataaatatccaatttttatgaagatattttataagtaatttcaacttacgaaatagagtgtaaaatcataccttgtgtaatttttttttttttaaaacatcacattatgccttgtcccttttgcaaggtaaaatacaaaagggctatttcaagctattttcttctttcacaaaagaaaattagaattaatagaaaaatattatttttttgtaaaaaaattaatagaaaaatatagtaatttgggtcctttaagtttcagatacagtgaaactaaataactaataaacaactaatataaatacaaagatacatagatctgtgtctgtgattattcaatttcttctgcttgttcgtatctcccttgtttgcttaaagcgttattgagcgagctattttttcaaatctttgctaattttctacaaacgattgatttttccgtctgggttttataaaaggtttgggtttcagagaaattcacggaacaaggcacagactttttcttctgggtgggcaccgactaaaaaaggagctctttctccaattctgggtttgaaatttctgtgtgtgtgtgtgtgaagcagtgaagcaggaggtggcagaagcatg

SEQ ID NO: 31830 - DNA, 3000 bp, Unknown; identical to SEQ ID NO: 29050
  misc_feature (1)..( 3000): 2750-1469P.txt file - cDNA_ID_3046188; gDNA_ID_2926192; Annot_ID_201156

SEQ ID NO: 31831 - DNA, 3003 bp, Unknown; identical to SEQ ID NO: 29049
  misc_feature (1)..( 3003): 2750-1469P.txt file - cDNA_ID_3046192; gDNA_ID_1971693; Annot_ID_175102

SEQ ID NO: 31832 - DNA, 3003 bp, Unknown; identical to SEQ ID NO: 29049
  misc_feature (1)..( 3003): 2750-1469P.txt file - cDNA_ID_3046192; gDNA_ID_2926192; Annot_ID_201154

SEQ ID NO: 31833 - DNA, 3003 bp, Unknown
  misc_feature (1)..( 3003): 2750-1469P.txt file - cDNA_ID_3046196; gDNA_ID_1971693; Annot_ID_175100
cacacccatcaccggatcaggcattctatacatgtaacgttgactctccccttctcctaaacgttgaccaactcctcttaagtcataaaccggaccagttggtctgctcggtacatttgaaccggactggggagctttctgtcctcgtccgtagatcgggacaagcgtagcctcggagacatcagatttgcataccggacattttggtggttccctcttatgatcgtattgatcgactcgttgtcttgaattgttggacgcataagtccacttgtgaatgcagggccaacaaaacaggtggccacataaagtcacgaccgggtctcgaacctgatccaaacatatgttgcagtcgaagtctcctccagaatcaaccaatgttgtgtcgtcctcatccttctcaatctccattttactaaaacatacaagacaaacaaccattcacttgaccagtcgttgtttatttaatgagatttcacctaaataagtaaatagtaaatactaaagtctaattccaattagagatttataaaatcaatgatacttcatagaaacaagaaatatcatcaaaatatgaagatcaatatagattataacagaattgttgtgtatatacttagcatgatcgatcttgaatttaaaacttacactaaccaaaaaaaaaaaagaagaagattagacgcaaaaaagtaaggatcatattctttaacaagttgaagttacgaagacttgacctaatcactttctgtttccgacgctttgctctgttttcacttaatcccaaagcacgttattgtttaagaaaaaaagctaaataattaaagacaaaggagtggttgattaaacaaacaagtgatattatgatcctttaaaaaatgacatggtatatcgaaaacaatcatcttcttgcgtagcaactcaaaaacggtgcagatctactactaattcgatgcctttagatagacacacgcaacaatatataataagagtgatgattccagaaaaaagaaacgtactctttggaaagattgtaagtaccgatggatctcttctgtctttaagcctttggaaacttgagagagcttgtacaggttcatgcgacaatggcagaagaacagagaaaatgatttatttgggttaagagaatggggtaagaatgtttagatcgagggtggtgcagaagcaggagaccttattatacacacatacacaattatttttattcttattttcttaaggtgtgcaaaattaaaatccggacaagttatgattttaaagaggaagaaacgtctacctaattaaaaataagtagataaagtaacgaaacgccattcatcttttttttcttacatgtctgtctttatttcatgaaaaggtcagcaacggatagcatcgttttaaaaaaaagtaaacaagataatataattatttatacacaactaaatatatatttatagaaaaatatttattttagtttgaataaaattgtatgttgaaaaaaaagtatgaattggaaatatgccctaatgagtccatgagaccatgacttttgtaggggaaatatacacagaaattgcaaaattcccccataactttatcccaatatcatattcataagataagaatttggctctgaaaaaaacaaaagataagaatttggcagtttctgtttctggcaacacaatagtagatactgaaccaagctcgatgacgtggcactccatggctgcaccgttactccatcaaattcacttgaaaaaaaaaacaaaaaaaaaatgctagtaattttgaaaattctgcttattttggtactttacttttttttttatggaaattgtaactattaggtgttgagtgaataacaatggcaatttggtaagttgtttattcaaagttggaactggagaatactaagtttgcgactaaagccttaatcaaaggccttatcaaccaatagttgaattagtttatagaccacaaagataattaggttacacgtcacggaagcaaggagctattggtgtcaccagaccatagtatttaatttcaagtctattaattgtagaaggcaacccaaaatccactccttgaaataataaaacactgtcttaaattcgtatttgttgagtccttcaccaccattatgtctgattctgcttatatacaaatttaagtaaggttgttagacggttcatgtctccgaatctttgatcaattgtaaagtgtaatgtaaaatagttttttttttttttaattttaaatttgcgactactatatctaaaagtctactatcaactacaacttcacttgtaaattgtaatactctcgaatagatcatttttgatgaaacaagttagacaatcatccaaaattaatcaccaatttgagtgcctccgaatttattcacaatattcattattgaaaagcatttttggatatggccaaccaataaaatgaaaattgaactttaaaaaaaaaaaactactataccaacaatgtaaaaacaatgtgtgtgttcaccatcattagaacaagatctactcaatgttttaaatgtatatataatatgttttgcgcaaaaaaacgtatatgtaatattatatatatcacgttcatgataatgttttcaaattctcatatgaaattattggagcaagttgcatttacgatccggagaactgagccaagaaatgggcggttctcaatttattatgggtattattaaccagtggtggttgaaccaaaattaatctattcattttctctatcaaactttttgttactttgatggtttgtctcaatcgattaaaatagtaactagttattttgttttggcatgtcactgaattgatgttgtttcttctaatttatgatccgctatatccgcagcatttttctctcctcctataactctaatggaaacaggaaaaagaaaaaacaagaaacgattagaaactcaaatgtgacaaaaagtcaaaaaatagaggaggaaacaaaaacatg

SEQ ID NO: 31834 - DNA, 3003 bp, Unknown; identical to SEQ ID NO: 31833
  misc_feature (1)..( 3003): 2750-1469P.txt file - cDNA_ID_3046196; gDNA_ID_2926192; Annot_ID_141107

SEQ ID NO: 31835 - DNA, 3003 bp, Unknown; identical to SEQ ID NO: 31833
  misc_feature (1)..( 3003): 2750-1469P.txt file - cDNA_ID_3046196; gDNA_ID_2926192; Annot_ID_201152

SEQ ID NO: 31836 - DNA, 3003 bp, Unknown; identical to SEQ ID NO: 29048
  misc_feature (1)..( 3003): 2750-1469P.txt file - cDNA_ID_3046200; gDNA_ID_1971693; Annot_ID_175098

SEQ ID NO: 31837 - DNA, 3003 bp, Unknown; identical to SEQ ID NO: 29048
  misc_feature (1)..( 3003): 2750-1469P.txt file - cDNA_ID_3046200; gDNA_ID_2926192; Annot_ID_201150

SEQ ID NO: 31838 - DNA, 3000 bp, Unknown; identical to SEQ ID NO: 29047
  misc_feature (1)..( 3000): 2750-1469P.txt file - cDNA_ID_3046202; gDNA_ID_1971693; Annot_ID_175097

SEQ ID NO: 31839 - DNA, 3000 bp, Unknown; identical to SEQ ID NO: 29047
  misc_feature (1)..( 3000): 2750-1469P.txt file - cDNA_ID_3046202; gDNA_ID_2926192; Annot_ID_201149

SEQ ID NO: 31840 - DNA, 3000 bp, Unknown; identical to SEQ ID NO: 28983
  misc_feature (1)..( 3000): 2750-1469P.txt file - cDNA_ID_3046225; gDNA_ID_1971712; Annot_ID_175121

SEQ ID NO: 31841 - DNA, 3000 bp, Unknown; identical to SEQ ID NO: 28983
  misc_feature (1)..( 3000): 2750-1469P.txt file - cDNA_ID_3046225; gDNA_ID_2926199; Annot_ID_201712

SEQ ID NO: 31842 - DNA, 3000 bp, Unknown; identical to SEQ ID NO: 8311
  misc_feature (1)..( 3000): 2750-1469P.txt file - cDNA_ID_3046255; gDNA_ID_1971714; Annot_ID_175151

SEQ ID NO: 31843 - DNA, 3000 bp, Unknown; identical to SEQ ID NO: 8554
  misc_feature (1)..( 3000): 2750-1469P.txt file - cDNA_ID_3046280; gDNA_ID_1971715; Annot_ID_175163

SEQ ID NO: 31844 - DNA, 3003 bp, Unknown
  misc_feature (1)..( 3003): 2750-1469P.txt file - cDNA_ID_3046286; gDNA_ID_1971724; Annot_ID_175195
taggtggagtcgttaacaagccggtctgctatttccggtgggatggttataaatattatggtgccttcggtgatgaagcgccatctcaaccccccacgccgcttcctcttcctcctcctcctcctcgtgatccagatggaaaaaagatctctacaggagttattgtggctattgttgtttccgcagttatcttcgtggtgctagtcgctttaggattagttatttggaagcgaagacaatcatacaaaacactgaaatatcatagtgagttactttttttgtttttgtttttttatcactctcacattacttattggaatgcatattagtaaccatgcatatgttatatatttgcagctgatgatgatatgacaagtccacagtctctgcaatttgattttacaacaattgaagtggcaacagataatttttcgaggaacaacaagctaggtcaaggcggattcggtgaagtttacaaggtatatttgagctgagctctacatatatctatgactgcttgatttgctgtgaaaactaagaacttataagtttttcatatgtagggaatgttacctaatgaaacagaaattgcggtaaagcgtctatcgagtaattcaggacaaggcacacaagagttcaagaacgaggttgtgattgtggccaaacttcaacacaagaatcttgttaggcttcttgggttttgcatagaaagagatgaacagatacttgtctacgagtttgtttccaacaagagccttgattatttcctctttggtaataaacaataacacttggtttaatttatgttcattcatcaaattttcttataattatagtgtaatttagatccaaaaatgaaaagtcaactagattggaaaagacggtacaacatcataggaggggttacgcgaggacttctctatcttcatcaagactcaaggctaacaatcatacaccgtgacatcaaagcaagtaacatacttttagatgctgatatgaaccctaaaatagctgattttggaatggcaaggaattttagagtggaccaaactgaagaccagacaggaagagttgttggaaccttgttagtactccgataatctctttaaaattgataaacctttttctatttgtttgtttctgattaacataaacctttttatgttgtatatttgcagcggttacatgcctccagagtatgtgacacatggccaattctctaccaaatctgatgtatatagctttggtgtattgatcttggagattgtttgtggcaagaagaacagcagcttctttcagatggatgattctgggggaaatttagtgacacatgtgagcagaaaacaatttaaaattttactttgtttagattgtgaccatcaaggatttggattctgaatatgagtttaatttcttggcaggtttggaggctttggaacaatgattcacccttagatctcatcgaccctgcgattaaggaaagctacgataatgatgaagtcattagatgtatccatatcggaattttatgtgttcaagaaactccggcagatcgtccagagatgtctacaatctttcaaatgcttaccaatagctccattactctgcctgtgcctcgaccacctggatttttcttcaggaacagacccaatttagaccccttaacctatggatccgagcaggggcaatccagcagcatgtctgttcctttttctatagatagtgcgtcaatcactagagccactcctcggtgagatgattgcttttgcactagtcagtagcattttacttgtaacacaagcaactccagttttcaaaggtccagttaatttttatggtaatatgggtacatataaaaccaaacttatgtgtagccgtgtaggtagagtattcctttcttgttttttcccatggcaagatgagaatttgtcaaacctcaaatatgatacattaacctctaagaacaaccacttacgaacccatttttttacttcttcagtcatctatgatagtcaccagcttgcttattcagctttttgctcccccagattttctataaagtggcaacaaattttattatttcccctgaaatatccatgcaactacacttatattatgatgatgttccaatgattttgatcaccaacatttgtagatctctaaggtttttatgtttcatcaaactctatctagcagcttcacatgtgctagtatatttgtaacgtctctcatccaagtcctctctttcaaagactggttttcgctatttcaagaggctataaagacttccggaagcacacttaattaactgtgacaggatgtttcaccgaaaagataagtggactttggtgacatagattgcctctccgaagcactatatacaccactatattcctttaatagaggtgttacaatatcatcttgataaatattaccaacaacatgctattgcttgaacactaaacgtattaactcataatcgctaacgaatttgaacatacgtcttgaaataagaccaagaatcgacacaagctaacgagttctcctatatcacgcgtggtgtgatctttagcgtacatgtcaatggaattaaacacactatctccagtataccaccagaacagagttttaacagtactgcaagtaacaaaccctttatatagtactgtttgtattataatactttaacagaaaaagtccgcaacactaacagaaaaagattttatatttatcgcattgacttgactatgtttgtctcaacaactacttaacgaaaattcctaccacccatactttttgactaatcaacatccaaaatgttctagtaaaaccattaccgagctgacttgaatatgctttcctcaattacttaacaaaatttctaaccaaccatgctttttgacaaaatcaacgaccctaagtgctacagtaaaataaaatgtgtacattatttacaatctgtaacacatacctgaccaaagtaaaatatccaaaaaagatatg

SEQ ID NO: 31845 - DNA, 3003 bp, Unknown
  misc_feature (1)..( 3003): 2750-1469P.txt file - cDNA_ID_3046290; gDNA_ID_1971724; Annot_ID_175194
aaaacacaaactacacatgcaaaagtaatgatcttttgattcatacacaatgtagatctcatataaggttgatagagcaaacaaaaaacccaattagtagtaaagagtgtatcaaaacaaccctagaaaatcagaaagaacccaaaatagcagtcaaagaagaacaacaaaccaaaagaatcagatagcattaagcaaagaatcaatttttattttttaaagatttagagaaaaaaagagatctaataagagacacagatagagacataagagaaaaaaacaaaacatacccgagttacagtgagaaacagagtgtgtaaatctcaaacatttcttcatcgacatggagaagaagaagaagcaatagagattacaaaacactgaaggtggtaataagagaaaccgatcatgttctttgtaatgtaaacaaaaagatagagaagaaaaaaaagcaatcaattagttttctccatcaaggcatcattttgtttctttatttccctcttcgagtgtgcaaaaatctatctctctctctctctctctctcgcagtcactatctctcacacactgtacttttgctttagcttttttgttgtctgtttctttttcacttgttctatcaaacaaaggtttttttcacttcaatgaagtgttgtgtgtgacctaagacaatcttaccctttgtcagaaattgtcgctaaaatatatagaagggtagtttcgtcatttaagtaaacaaatctggtgagacactgagagagattaattaaaattttggatcggttcgtgaaccacaaaaaatattatttacttgtttctcgggaagttcatgtgggattcctatccccaattaaaatctttcgactctatgttaattttaattttatttcgaaaagagtttatgaaattaatacttgtgtgatttattggaagtggtatacttaatttttttaagattactattaaacaatatactctgatagctagttttctatccataatgggccgcatcgtaattgggaagacccacttttgaccaaactttcaactttaaaacattttggtccaaattggtaaaagacaaaaattagtttatagggatttgggattgaatgactcgtcactcgtataaattaatttggtgactccatttagtattttggagaagaaagtttaaagtttgtgtttgtgtttgtgtttgtgtatgtttgccctttgattatgaacggtgaaatctagactaattttgacagtatgtacaagattaatctagattattgcctgcataggctgcattaaaaaaattggtgtgtttaattgaacgacgccgtgctaaaatatcgaacggcgagatttatagcttcagtttttttatttgaaacactgtcgttttgcataaataaaacgacagcgtttaggtcgataaatgactgcgtattggtaagttgagacgacaacgtttaaagccggcgtttttaaattataaacggcagagttttggttaagggaacgacggcgacgatgaatatggtgtttccgaagtagtttcaggcgatgatggtgaataatattacgaaacgacagtgtttagatagattggcgtttggatttgcattactcgaaaacattgttgaaggcgatggtgtttccgacgttgcgcgatacccatgtctcttgaacttttcgggtatggccatgtctgggaatctcacagatgaagtttctagtgaggaaagaagtcagagcaaatgatataacttgtcataaagaagaacaaaagggttttcagattggtgggattaagccaaagggttttgctcatggaagtgtttgagaaagactgcttcttgtgaagatgcttcttgcgacatagctaatgagggtgaggtttctttggatctgatattgattcggagtatctggttttagaaatgtttgtgatagagactaaaggagccattgttggccaaattaagaattgaatcgtatatagaagacatgagacatgacttatataaagagtgtttcagtttccgaatcatcttctgcttcaaagtaaactgttattaatcactttgagtaggtggctctttttcttttctcttcaggttaagattgatgtcttttgtgttttgtgttgtttctttctgatttttggaattcttttggtcagctgcactgtttaatctgaagcaagcaaccactcgctttctgtcaattcggtggaagtgtatgctgaaacttccgggaagacttgaagttgcagagacattttaaagcagtcaatgtatctaacagctgttctccgcttctcaaatcactactttgctcggtaaggccgatataccaaacaaaaacacaaatgttcttctgttttggcctttgatgatgaaacattatgttattagattacttggatgctacggttctgtacttctgttcatgtttactagaacctctctagttatccgtgttgagtcggtatattgtgctatagttaatgcgtttctttctggttcaagcgagcatgttttggaccaaaaaccttttggtaaaaagaaactttgcaaagtgcaatgaagtttgcattttgtttgttttctataatttacaaaataactcaagaaaatgtagtcctcagatttatcacagtgatcatccatttcaatcaattgcttcttcaagtactcagagagtcgcgttgatttagaaaatgttattcatgatactccaaaaagctattgattgtcctgcaacaacatgttcagagtcttgttatggcttgaagtagtagttgagagtcacagtgacttgttggaataactctgagtggtccagttcataatttctttctaacaagttgccattgttttatttatattctctatccatataataaaataatgtttacaacttgctcttatgaaaggcatggttgtgtaagttagtctatattcagcttgagacactaaagaaactcatctattccttttttggaaaatg

SEQ ID NO: 31846 - DNA, 2755 bp, Unknown
  misc_feature (1)..( 2755): 2750-1469P.txt file - cDNA_ID_3046377; gDNA_ID_29952; Annot_ID_146795
aaaagaacaccatttttttgtctttataggcataaatttttgaattcgtaacagaatttagtgaataatattgtaattaccaggcaaggactctccaaacggatagctcgaatatcgttattaaagagtaaatgatccaatatgtaagccattgttgatcatctaacattgttggactctctattgctcgaaatgatgcatacctaatcatttattcagttaactatcaagttgcatttgtaaaaaccaaacatttaaattcagatttgatatcacttacagaggatagagaagcatgactccaggcctgcatgcaacaagaaaaaggaagaaaataatgttaaaaatttgacaaatatagtgtttatttttattatatgagacagaatttgaataaaatcctacccaactagagcatcaaaacgttttgcaatcgcaataatgaaacccattttctttttgagtttttactcttctttcaacagaaactttctcaaacgtctttagcactgtgacgttggatatatacacaaaagcttgaaatttcttcaagcaaaagaatctttgtgggagttaaggcaacaagccaggtaaagaatctccaacgcattgttacgttttcatgaacctatttattatatgttctaagaaaaaaaaaatatctcaaagtaaactttggaaaatttctgatgaagggaaatccaaagtcttgggtttagtatccctatgaatggtatttggaatatgttttcgtcaaaacaaaagattcttttctttttcacaagagttagtgatcaataacttatgcactaattaatgagattggacgtatacacaatttgattatgatacttgagtaaaaatcacctgtcctttaatttggaaatctctctttcttacccatttatatactacttcttttcattaaaattaaatttcaattatcaatcatcgttcaatttgataaagatttaacattttttgtcacagggctagtaaaagcaatctttacataattcatctytcttacatatatatattacctttttcttcattagtattctatttgattatgattattttgtcataaagctagtaaattaaacactcgatatgagaattatattacttcacgctaattaactcttaacacaacaagaactagtgcatattcaactttcaaagcatatactatatattgagaatatagaccacgaaagtcaatcaaaagacctaccagctctcatcaagttctttcttgaaatgattttgcagaatttccaacttaattaattcgacatgaatgtgaaaatgtgtgttgctcgttaagaaaattgaatagaagtacaatgaaaatgatgaggaatgggcaaaacacaaaagagtttcctttcgtaactacaattaattaatgcaaatctgagaaagggttcatggataatgactacacacatgattagtcattccccgtgggctctctgctttcatttactttattagtttcatcttctctaattatattgtcgcatatatgatgtagttcttttgtctaaattacgtaatatgatgtaattaattatcaaaataaatattcagattgccgttggactaacctaatgtccaagattaagacttgaacataagaatttggaaaaactaaaccagttataatatatactcttaaattgccatttctgaacacaaccaaataataatatatactatttacagtttttttttaattggcaagaacactgaaatcttattcattgtctcgcttggtagttgacaagttataacactcatattcatataaccccattctaacgttgacgacgaacactcatataaaccacccaaattcttagcatattagctaaatattggtttaattggaaatattttttttatatataaaatgccaggtaaatattaacgacatgcaatgtatataggagtagggcaataaaaagaaaaggagaataaaaagggattaccaaaaaaggaaagtttccaaaaggtgattctgatgagaaacagagcccatacctctcttttttcctctaaacatgaaagaaaaattggatggtcctccttcaatgctctctccccacccaatccaaacccaactgtcttctttctttctytttttcttctttctaatttgatattttctaccacttaattccaatcaatttcaaatttcaatctaaatgtatgcatatagaatttaattaaaagaattaggtgtgtgatatttgagaaaatgttagaagtaatggtccatgttctttctttctttttccttctataacacttcagtttgaaaaaaaactaccaaaccttctgttttctgcaaatgggtttttaaatacttccaaagaaatattcctctaaaagaaattataaaccaaaacagaaaccaaaaacaaaaaataaagttgaagcagcagttaagtggtactgagataataagaatagtatctttaggccaatgaacaaattaactctctcataattcatcttcccatcctcacttctctttctttctgatcataattaatcttgctaagccaggtatggttattgatgatttacacttttttaaaaaagtttcttccttttctccaatcaaattattagggttcttcagttaatccttataaaccatttcttttaatccaaggtgtttgagtgcaaaaggatttgatctatttctcttgtgtttatacttcagctagggcttatagaaatg

SEQ ID NO: 31847 - DNA, 74 bp, Unknown; identical to SEQ ID NO: 183
  misc_feature (1)..( 74): 2750-1469P.txt file - cDNA_ID_3046401; gDNA_ID_25024; Annot_ID_146486

SEQ ID NO: 31848 - DNA, 115 bp, Unknown; identical to SEQ ID NO: 7
  misc_feature (1)..( 115): 2750-1469P.txt file - cDNA_ID_3046422; gDNA_ID_268; Annot_ID_144055

SEQ ID NO: 31849 - DNA, 9 bp, Unknown
  misc_feature (1)..( 9): 2750-1469P.txt file - cDNA_ID_3046512; gDNA_ID_147; Annot_ID_143949
agtttcatg

SEQ ID NO: 31850 - DNA, 3000 bp, Unknown; identical to SEQ ID NO: 7788
  misc_feature (1)..( 3000): 2750-1469P.txt file - cDNA_ID_3046534; gDNA_ID_1621163; Annot_ID_173762

SEQ ID NO: 31851 - DNA, 3003 bp, Unknown
  misc_feature (1)..( 3003): 2750-1469P.txt file - cDNA_ID_3046534; gDNA_ID_2926161; Annot_ID_139729
tttactcgacttgcagaaaataatatatatatgtatatatatatatacatatatatttaaacatagttattatttgtgttttggatataactgaacgcatccaaagcacttcggagcttgtgaatcgttataacatgcaaactattttgcagaatatgatttattattatattgtattgcaaatgatcttaattttttttttgtgcaaacaaatgatctatactagttttttttaaacgacattagcatctacaaaataactatcgtcattagccactgattgtaatattgttacaatataatttgtatagctgtaaactatttatgttgtcagttctagttttgatatatttactgtcgctaattctaacatgtttgcattcaaaaccgctgattaattgacattgttactatatagagcataaaacggtgcttcattggatgactattgactaatataccaaatgtgactatgtgagtttatgatttagttacataaatatacagatatgtttatctatttatttatagaaagtctttcaagaaatctacaaaaattaaagaaataaagagagtatgcctatctgtacgtcggtggctgtatattgtgaaaataattaatgtcgtatattattgcaagtacttagggatcagggctgagtctacgacaagatacgtatcaatgcacacgtccaaattttttttttttttgtgtacaaatggtcatggtctccagacggtgacattttaaaaaacattatttgattggtctttgtaatttttattttccaacctgtcttgtcatttcgactacgaaacgtacgattttttcaatcacgtttactaatatcatacaccgaaaataaacagttcacaaacgcatcttaattattcaaattcatgaatgttttatataatcgagtatcatatcaacatttatttgatattttgatgtcgtatgtatatcaatgttgttagctgtaaactgtccaatgaaaatccatttaatatttggacaaattattattagggaaattaatgtaatgtggagtattttatatgaaatgtgtattaatgacgacgaccttacttgatcccggaagtgtgtattaatttaatcgcggtgcatcgctgtccacacggttgggttcatgcgtacgtggtatttgctggcaagtggcagtgaagtttcttgtttgatactgtatgttccattcatgtctttccctagatgcatgtttcttctatttttatatattaatatttttttgtttttcttattatgttttctttccctttgtgaggagaataattgcgatacgattatttgttttaacagaaaaaagtgaagcgaaaaagatgattcgaagtttgaagtacgattaaaatttttctttttccggatccgagtttgatcttctttagaaacaaaaattatatttgtttagaaagtctgtcagttgggttttggcccaattgatttacctggtagtcagaaatgtaagtgacctgactacccttgacattagtcagaaaacattctaaactcgagataaacactgtggtagttctttagaaagaagtcgactctaaagtactttggcgtaaaacaaaaaaatttcccttgaaattatactttatttgtttgacataaatgtttcaaatataatcttcttttaatcaatgtagttaaatttttttgatagaagcacgtcagaatttcacactagtaatgtataagtggtaatcatcattgcctaaaacaatgattaattaaaattttagaattcgtcgtcgacaaagaatttttcttatgatgaaggttttgtgcataattatgaacggatccatttatttcactctaactaggaatagatgtttgatgggatacaagtgaacacgacacaaagtaacaaaaattcatttaacgtcacaaattattctcaatcgaatttcgaagtatcaagaaaaagggcaattaaaaacgtaatctcattatgtctttgaaatctaaattaaaagttgagtttattttaattattaatttcctttttgatgatgtaggggatgacaattgacaaccaatttgatttgaaagattaacataaatcattttgagcatacatatattgcttaaatcacacccgtttatctctaaaaacctccataatttatatcaggaaaataaatctagttattgatatcgccatcaaatatttttttcttaaattgtttttttttgttgttgttgaaaatttaattagaaagataagtggacaacgacgcgagacaaagacacaatctttagggccttgagtaaattagggacagcataaacacatgcactagtcctgtctttatttaattatgtggtgtttactctaatgacgtcgctttgattaaccaagtggtcataattaatatatcgatcgaattatataattatcataaatttgaataagcatgttgccttttattaaagaggtttaataaagtttggtaataatggactttgacttcaaactcgattctcatgtaattaattaatatttacatcaaaatttggtcactaatattaccaaattaatatactaaaatgttaattcgcaaataaaacactaattccaaataaagggtcattatgataaacacgtattgaacttgataaagcaaagcaaaaataatgggtttcaaggtttggttatatatgacaaaaaaaaaaaaaggtttggttatatatctattgggcctataaccatgttataacaaatttgggcctaactaaaataataaaataaacgtaatggtcctttttatatttgggtcaaacccaactctaaacccaaaccaaagaaaaagtatacggtacggtacacagacttatggtgtgtgtgattgcaggtgaatatttctcgtcgtcttctcctttcttctgaagaagattacccaatctgaaaaaaaccaagaagctgacaaaattccgaattctctgcgatttccatg

SEQ ID NO: 31852 - DNA, 3003 bp, Unknown; identical to SEQ ID NO: 31851
  misc_feature (1)..( 3003): 2750-1469P.txt file - cDNA_ID_3046534; gDNA_ID_2926161; Annot_ID_198785

SEQ ID NO: 31853 - DNA, 3003 bp, Unknown
  misc_feature (1)..( 3003): 2750-1469P.txt file - cDNA_ID_3046544; gDNA_ID_1620806; Annot_ID_50533
attacatggaaacaaacagatgcaaaatgacaacatgtcaagcactacttaaataatagtttactcgaataagcacatgactcccaactaattagaccttttatttatttaatggtttatgatttagattttagagaacataagataaaaaaaatcataagctaacactaatttaatgtatcgtatgttcacatagactaaaattaacgtactaatatagacatgttgtcaatactataaccatcatattttagtataccattcgtcagaatccagtaaaaccaaacgttaaacccggagttgaccaaaaaaattcaaaaatatttaataaaattaattgtgataaaaatataatattaaagaaaattacatcaaaacctgctctgtttgattctcggttttgtttccggtttaatctggttatggcgttgatttgaatttgatgggaggcactaggcagttagccttagtttggtttattggtattcgaattcaaattggaattgagtactaaaatgctctgttactcatttctgcatctcgagttgttatggattaggttacgaaatgttcaatttcgtttggtctagttcggttcgtttcgtttggtctagttcggaaaccctattcaagattgtgatcatcacgagaagcttgtgcatccttggaaaggtacacacacttttaacttttaaggttcttacttttcttcttaagattgaattgcaatgtgtgtttagtgattgtgtatacgtggctgaaacaggcattgttgttaatattccaactacaaaggcacaagatggtcgacccgcgggtgagagtggatcgaagctaagggatgagtatattctcagaggattaaacaatggtcttttgtttgacaaggcttatagagtagatggtcatggaaagaaggactggatgaaaaaagacggtcccaagttaggtctttacgggtggatagctggtgctgatgattataacggtaataatatcatcggagaaaacttgaggaagaccgtgaactcaaaactatagctgagcttacgaaagaagaggcgaggaaacagcaaatgcttgtgaagaatctgagacaagttgtagaagagaagataaaagacgtgaaggagattgaggagctttgttcagtgaagtcagaggaacttaatcagttgatggaagagaaggagaagaatcagcaaagctgaatgctatacaagagagaacaatgaggcatattcaaaagatagttgatgaccatgagagattgacgaagctgttggagtcagagaagaagaaactcgaaatcaaaggtaatgagttggcaaagccccaagtgcacaatggaaccgagagaatgaaattgtctgaagatcttgaacaggtaaaacatttactctctgtatctctcttttttgttaagatataagtccatgtgttgatgtgtacttaacagaggcaaaaggaggagcttcatgagaaaatcataagactagaaagacagatagatcaggtacaagcgattgagctagaggttgagcagttgaaaggacagctcaatgtgatgaagcacatggcatcagatggcgatgctcaagttgtgaaagaggtggacatcatcttcaaagacttagttgagaaggaagcagaactcgcagacctcaataaatttaaccaaactcttatccttagagagcgcaggaccaatgatgagcttcaagaagctcgtaaagaattggtaaatgtatgtatcaaagtgttgttcttttcaattatatcagaaaacctctgagaaagcttgacattttggtttgtttgtttcatgtgccttatgtagattatgagagaatagaaaacaagtatcggtgttaagtgtatgggagagctcgtaaggaaaccattcgtggatgcaatgcagcagaagtattgtcaggaagatgtggaggaccgagcagttgaagttctccaactttgggaacactatatcaacgatccagattggcatccatacaagcgggtcaagctcgaaaatcaagatagagaagtggtaagaccgccttcttgacacggtttgttatgtcgaatctctctgaaagattaaaaagctgtttttgtgttgttgttgttatttgtgtttaggaagtgatagatgatagagacgaaaagctgagggagctaaaggcagatttgggagatggtccttacaatgcggtcacgaaagctttgttggagataaacgagtataacccgagtggaaggtacattacaacagagctatggaacttcaaagaagataagagggctacacttgaagaaggtgtcacttgtttacttgatcaatgggaaaaagcgaaacgtaagcgcggaatggcgtaaaggtttaaaccttttcttgataaccgaacaaaaatatgttttcatgtgcaaaatataattttgctcatactggatttttgattgatgatttgcagctgcaagagggactgaagaaaaagcttagttgcagagaaatgtgtttggtttttggtttattctttttgtttttcttctcagaacttagtgaatagttgacacaactttgatgtcttgcatcgttttgatgtttcattgtgaaatatttctaggagtatgccgcctctttggacaatgagtagtaaaatgtatcataatgccattttgtaatatatttaacatgtaaaacaactagatgtggcctctctcttgtctcatatcttaagcatgtcatttagaaccttttattgtaaaaaacaaactttgtcacgagttactttcttttcttctagtcaaaaaattgaatattgaccctttcattgttatgttaacgtttcatcttataacctataaatttacattcgttttgggccttttggctaattacgagatagacccttgtcaatgtggaaaaaaaaaaaaaaaacttcgaactgggtagttttgtcgaacagttggtgtccatcactagaacaccgatcaccgatg

SEQ ID NO: 31854 - DNA, 3000 bp, Unknown; identical to SEQ ID NO: 20782
  misc_feature (1)..( 3000): 2750-1469P.txt file - cDNA_ID_3046544; gDNA_ID_1621163; Annot_ID_173753

SEQ ID NO: 31855 - DNA, 3003 bp, Unknown; identical to SEQ ID NO: 31853
  misc_feature (1)..( 3003): 2750-1469P.txt file - cDNA_ID_3046544; gDNA_ID_2926161; Annot_ID_139739

SEQ ID NO: 31856 - DNA, 3000 bp, Unknown; identical to SEQ ID NO: 28507
  misc_feature (1)..( 3000): 2750-1469P.txt file - cDNA_ID_3046549; gDNA_ID_2926143; Annot_ID_197586

SEQ ID NO: 31857 - DNA, 3003 bp, Unknown; identical to SEQ ID NO: 17479
  misc_feature (1)..( 3003): 2750-1469P.txt file - cDNA_ID_3046549; gDNA_ID_1621164; Annot_ID_173806

SEQ ID NO: 31858 - DNA, 3003 bp, Unknown; identical to SEQ ID NO: 29216
  misc_feature (1)..( 3003): 2750-1469P.txt file - cDNA_ID_3046557; gDNA_ID_1621164; Annot_ID_173801

SEQ ID NO: 31859 - DNA, 3003 bp, Unknown
  misc_feature (1)..( 3003): 2750-1469P.txt file - cDNA_ID_3046565; gDNA_ID_2926143; Annot_ID_197594
gctttagaccatcgccaatggtgctttcaatttcacatttctttcatcttgaagatgaaaataaaaagattttttccaatggtactttattttcatcttaaaaatgaaagacttaagtatcttcaaattttgaagataattttttttatttacaaaatgatctttacaatttaacaattgcatcataaatttgattttttttattcatgttatgcaatgtggtttgatttaaaataatgtttactctagagaaaatttgttgaactatttgcttgctataaaataaatgtgtaaaatatataaatttagaaagtaaaggatattattaccaattaataataaaatatagatagtatacaatgttctttttgaagtagaaaaatgaaagaaactattgaaaaagtcttgcatcattttttcatttattttgaagaaacttcaatttttttttttttttgaagcaaacaattggagttactcttaattgagaactttggttcattctaataggatcacattattttgatattcggttttccgtctttaaacatctttgtaggcggcagatccacatacaaagtaaaatggagtgatcaactaactccatctaataaagtttacaaatcttttagtagtaggttaagaacaaaaatttaaacgaccctagttaattttcttcttctagtttcacttaaaaactataaattttatagttgaacaaaaaaaaataaaaaaaatttaatggcgattcatagatatataaggaatgccataaaaggagatctctccctaacaaactaagaagaacatatctacatatacatttttgcaacacctttataaaataaatcctcaagttgggatttatttacaacccaatgtcattggcatttaatgttttaacaaatttattctcaaatctaaatataaatcaattttgtttctaaaatttaggaaactaaaagaaaaaatcacaaaaattatttaaatcttttcaaatctacactaaaatatataacacttacattcctttttaaggggatcacttaaaactataaattttatacttgaacaaaaaatattatataaattataatggcgattcatagatatctaaggaatgtcattaaagaagatctctccctaacaaactaagaagaacatatggttatggtattattaaggaaataaattatattttttaataaaaaaacttcaggggcaaatatgaaattaagaagaagaaaacatatgagaacctaggtaaaaactgaaagatataaaaactcattccacgcgacttctcaatttaaggatttttatctcttaacgattgatttgttgtgctttttctctgaaatggcggtagaacataattagaaggtaaggatttactacgattttgagagttactgattatgggtattgatgcttagattcgtttatggtttgagttaaaaaagaaattttgtatataattagattaaatatctctaatctaatttaatatttcttgtgcaaattatatttatgtcatatttgcacttcaagacataaacgaatcttagattataatatcagaaacgcgaagttatcaaggtagattcaaagctttttatttatcgtaaactatcataaaatttctgtatacttattcttgattcatgtgtttctttttcaaggctacaagaatgacagtgataatatgtcaattgacataacattgttgttaactgaagagcagatgaagctttttctgaataatgatgaaaaaatcgaagaggatgtcttggaattttgagactatccacaaccattaggaccaacaacatgcgtttgttgaacaaaactaatgtccacacaaaatatgaatctcccgagcagagtaagaatagcccatttttcattgttttgtttcctctctataaataattagttatcacttaattaatattaatatcagttttttggtccttcaagattttaaggaagagaggctaaaatggtgtggtgaaaggaaggtatgtaaatcagacactatgggtcttgttttagttattaaggcaatggtcttgttttagtaactaatcttactcctaatacacatgattatatggtggatattttaacttttgagcggaataagttagagtccaaattagcaattgtccaaagagttctcaatggagaaataaacatcagtcccgatcttgatgtggtcttggaaaagaatggtttttaaaaatatggcaagacagtgaactcatcaagaagctatgactacgtcccagaggatcttatctcgatgattagagatccttcaaaatagatgcattaaaggcataattagattacgtgaataaaagactgggtactatcaactctgaaagccagaagcactctggatcaataagctagatgattttgataaagcacttgaggtatgaatgaattagttttatgattctccacaacaaattatgtgtctgttatttgaactgaactttcttaatattgcaaggactctggtcaagactctcaagttaatggcgattataatatttagtgcatagatggcacaaatataatttccattcttatctataaatgattatggtataactgtctaccaaaggttccaaaattagtatttaacaaaaaaaatatttcaaaagtgaaataaaatgtatacctcccatctcttagatctaattttaattttattacatattttaaggatatgccaatttttcgattttttgttagagacaagttatcatatttcaacatttttaggtatctttatataaagatttattctatatttggaaaattattctttcctaaattattattaaaatctgaaacttaaaaaatatataaaaaattaaatatatgaactaaaatttatacaatctttttcatataaattgtgctttttgtacctcggaccatagtagttctctttgcatctgaagtgttgttgtaaccgatccgaagatg

SEQ ID NO: 31860 - DNA, 3000 bp, Unknown
  misc_feature (1)..( 3000): 2750-1469P.txt file - cDNA_ID_3046565; gDNA_ID_1621164; Annot_ID_173797
ttagaccatcgccaatggtgctttcaatttcacatttctttcatcttgaagatgaaaataaaaagattttttccaatggtactttattttcatcttaaaaatgaaagacttaagtatcttcaaattttgaagataattttttttatttacaaaatgatctttacaatttaacaattgcatcataaatttgattttttttattcatgttatgcaatgtggtttgatttaaaataatgtttactctagagaaaatttgttgaactatttgcttgctataaaataaatgtgtaaaatatataaatttagaaagtaaaggatattattaccaattaataataaaatatagatagtatacaatgttctttttgaagtagaaaaatgaaagaaactattgaaaaagtcttgcatcattttttcatttattttgaagaaacttcaatttttttttttttttgaagcaaacaattggagttactcttaattgagaactttggttcattctaataggatcacattattttgatattcggttttccgtctttaaacatctttgtaggcggcagatccacatacaaagtaaaatggagtgatcaactaactccatctaataaagtttacaaatcttttagtagtaggttaagaacaaaaatttaaacgaccctagttaattttcttcttctagtttcacttaaaaactataaattttatagttgaacaaaaaaaaataaaaaaaatttaatggcgattcatagatatataaggaatgccataaaaggagatctctccctaacaaactaagaagaacatatctacatatacatttttgcaacacctttataaaataaatcctcaagttgggatttatttacaacccaatgtcattggcatttaatgttttaacaaatttattctcaaatctaaatataaatcaattttgtttctaaaatttaggaaactaaaagaaaaaatcacaaaaattatttaaatcttttcaaatctacactaaaatatataacacttacattcctttttaaggggatcacttaaaactataaattttatacttgaacaaaaaatattatataaattataatggcgattcatagatatctaaggaatgtcattaaagaagatctctccctaacaaactaagaagaacatatggttatggtattattaaggaaataaattatattttttaataaaaaaacttcaggggcaaatatgaaattaagaagaagaaaacatatgagaacctaggtaaaaactgaaagatataaaaactcattccacgcgacttctcaatttaaggatttttatctcttaacgattgatttgttgtgctttttctctgaaatggcggtagaacataattagaaggtaaggatttactacgattttgagagttactgattatgggtattgatgcttagattcgtttatggtttgagttaaaaaagaaattttgtatataattagattaaatatctctaatctaatttaatatttcttgtgcaaattatatttatgtcatatttgcacttcaagacataaacgaatcttagattataatatcagaaacgcgaagttatcaaggtagattcaaagctttttatttatcgtaaactatcataaaatttctgtatacttattcttgattcatgtgtttctttttcaaggctacaagaatgacagtgataatatgtcaattgacataacattgttgttaactgaagagcagatgaagctttttctgaataatgatgaaaaaatcgaagaggatgtcttggaattttgagactatccacaaccattaggaccaacaacatgcgtttgttgaacaaaactaatgtccacacaaaatatgaatctcccgagcagagtaagaatagcccatttttcattgttttgtttcctctctataaataattagttatcacttaattaatattaatatcagttttttggtccttcaagattttaaggaagagaggctaaaatggtgtggtgaaaggaaggtatgtaaatcagacactatgggtcttgttttagttattaaggcaatggtcttgttttagtaactaatcttactcctaatacacatgattatatggtggatattttaacttttgagcggaataagttagagtccaaattagcaattgtccaaagagttctcaatggagaaataaacatcagtcccgatcttgatgtggtcttggaaaagaatggtttttaaaaatatggcaagacagtgaactcatcaagaagctatgactacgtcccagaggatcttatctcgatgattagagatccttcaaaatagatgcattaaaggcataattagattacgtgaataaaagactgggtactatcaactctgaaagccagaagcactctggatcaataagctagatgattttgataaagcacttgaggtatgaatgaattagttttatgattctccacaacaaattatgtgtctgttatttgaactgaactttcttaatattgcaaggactctggtcaagactctcaagttaatggcgattataatatttagtgcatagatggcacaaatataatttccattcttatctataaatgattatggtataactgtctaccaaaggttccaaaattagtatttaacaaaaaaaatatttcaaaagtgaaataaaatgtatacctcccatctcttagatctaattttaattttattacatattttaaggatatgccaatttttcgattttttgttagagacaagttatcatatttcaacatttttaggtatctttatataaagatttattctatatttggaaaattattctttcctaaattattattaaaatctgaaacttaaaaaatatataaaaaattaaatatatgaactaaaatttatacaatctttttcatataaattgtgctttttgtacctcggaccatagtagttctctttgcatctgaagtgttgttgtaaccgatccgaagatg

SEQ ID NO: 31861 - DNA, 3000 bp, Unknown; identical to SEQ ID NO: 7808
  misc_feature (1)..( 3000): 2750-1469P.txt file - cDNA_ID_3046577; gDNA_ID_1621164; Annot_ID_173791

SEQ ID NO: 31862 - DNA, 3003 bp, Unknown
  misc_feature (1)..( 3003): 2750-1469P.txt file - cDNA_ID_3046615; gDNA_ID_1621165; Annot_ID_57198
attgtagatttacatactgagaaaagtatttttcaagattacgaaacaaattcatttccatatgagggaaaaatattcattcctttataaaaatcaataaataaatgaaaaaaacaaatatgcaatcttttctgggatgaaaatgataattagaattgatcttaaaagatgataataagaattaactaattttatatgctgattttttacactgataaattttatattaactataccaatatgcacctattcattttagcttctttggtttcttaaaaataattttaatcaaggtcgtacattgccaggtagtgtagtcaggttatatagagcgttcttacattgagtaaaacattataaagttgtaaatttcatagcagtacattaattttcaaaaagtttaaaactttaaaggaggacaacggggattggattcacattctttttgggttttcgaacacatactttgatctctaaaacaacaccaacaatcccgtttgaaaaaactaactgaacattgggcagggacacactttccaatagagatcttgttcgagccctctatttctccaacatccatctgcatgcctacacattttgaaactacacgatcactaaccaaacatcaacaataacgaaaacaaagggagagcagtttttatatatataaatatgtgaaaaaaactctttacatacactgatgtagagcaaagaaagagaagatgaatatggagatgagaactgtttgtgatttcatcttttgtttgtcgtaggcaattttattgtttatttcaaccaacagtatgtgacttttaatgtcatagtgaaatctatatatagactgtaatattgaaataaaaggtatatatagtagtatatattagttatcattattatttaaattagtcagcagatattactttaccaaaatggtgtatatatatcctctatataccatatataattaattaaggaaacaaaaatatgacttttatattggtaaaattttacaaatttggaagatgcaactaccaaatagtaaaaaatggtaggaatggtggtaatcaatctggtagattatgaaagagtcaacagtaataacttttcaaagtaaatactcttgttccttgccaattagagtagtcaacgtctctggattttccaaattgtgaaactttcttttgaccatactttaaggttaatatttattaaatacccttaaatgattgtggccagtagctaaaatattaaaaacgttatttatttagacccattagttttattatttcggtcttggaatcggagataaaagtccataagctggcattagatctttcatgcacttgacaggtgttgcaatatctcaagatttatctatacgatagattaaaacttgggttgtccgaaaaaaagaagaagatgaaaatacaaatgattttccgaatattatatcaagaacaatactccacggctctgctgcctgcatcacattactgtattctgaatctcataattttcttgcacgccaattgtttcttgcctaaaatggaaattattattttttggatctgttaccgatacctttaccaactagccatatttggtaatttaaatttggaagttccagttagcaactactatattataaatttataaaaaaaaacctcggaaatattaagcagtccatgtgcacgagttcccccactaattaattccacaatacacaaaaccttctccagcgccaatagagtccaaattatctttaacctccacatgaggctgcatttcttttctcttttggtctgcatatctttcacgcaactatgataatattaccttttaaagttaaaatatgaataactttgttgccagaatttgccaattgacgattcctcatgtatgaaaagaatcataaatcttaatttatttgtagttcattttgaacatctcaaaattccgtattaactattagcagcacaagatggttgtcattaagagtgtttgacaaccatggacgaacgtaactgatctacctttatctcgaaattatgccaaatataactaaattatatacttcgaaatcacaagttttactaatacgtggtcttatagtaaaacctgtgattttgaagtacatttgattaacttggttatatcaaacatatacgattatgttatgtgattaagcatatgaatttaaaaaagtttatgctaacaaacatgtgtcaaccccaaagtcttaccattcataaacagaaatccacttacttatccatattccacataatttgcctaccgataatgtactaattagcaacaagtggaaacgaaaataagtgtgattaaacattacaactatgattaaaatggataaggttacagaagacagttagggaattggtcggattctatgaacgaaccttccagcgccgatccagcccacttcaccgtttctctcaaccaatcacacagtttccctcaattattttaataataatcatctctaaggtattcattattttattaacaaaatattcccccaaaaatttagtggagacattacaatattattattattgcggaaactcggagttttgagggagaggtcaccaccgttacacatggcatgattcagcttcaaagattgtcaatttttgaaaactcattttgttttctagttttggtgagaggtgggcagatacaagtggataacaaagttttttgttggatgataaaagagacagagagagacgacgcattttcctttattttctcggggaaattcaaagttttcgaattttcttcctttctgggttttcgtcaaaggagcatcttctttatgttcttttgaaagaaggctctcttctctatttctctcccctcttccggggagtttttgattttttaggataaaggagattcctttacctcgattttttgcttttcatttttattaaatctccgatttttgatttttgggggaagaagtagaagaagaagatg

SEQ ID NO: 31863 - DNA, 3000 bp, Unknown
  misc_feature (1)..( 3000): 2750-1469P.txt file - cDNA_ID_3046615; gDNA_ID_1972120; Annot_ID_178942
gtagatttacatactgagaaaagtatttttcaagattacgaaacaaattcatttccatatgagggaaaaatattcattcctttataaaaatcaataaataaatgaaaaaaacaaatatgcaatcttttctgggatgaaaatgataattagaattgatcttaaaagatgataataagaattaactaattttatatgctgattttttacactgataaattttatattaactataccaatatgcacctattcattttagcttctttggtttcttaaaaataattttaatcaaggtcgtacattgccaggtagtgtagtcaggttatatagagcgttcttacattgagtaaaacattataaagttgtaaatttcatagcagtacattaattttcaaaaagtttaaaactttaaaggaggacaacggggattggattcacattctttttgggttttcgaacacatactttgatctctaaaacaacaccaacaatcccgtttgaaaaaactaactgaacattgggcagggacacactttccaatagagatcttgttcgagccctctatttctccaacatccatctgcatgcctacacattttgaaactacacgatcactaaccaaacatcaacaataacgaaaacaaagggagagcagtttttatatatataaatatgtgaaaaaaactctttacatacactgatgtagagcaaagaaagagaagatgaatatggagatgagaactgtttgtgatttcatcttttgtttgtcgtaggcaattttattgtttatttcaaccaacagtatgtgacttttaatgtcatagtgaaatctatatatagactgtaatattgaaataaaaggtatatatagtagtatatattagttatcattattatttaaattagtcagcagatattactttaccaaaatggtgtatatatatcctctatataccatatataattaattaaggaaacaaaaatatgacttttatattggtaaaattttacaaatttggaagatgcaactaccaaatagtaaaaaatggtaggaatggtggtaatcaatctggtagattatgaaagagtcaacagtaataacttttcaaagtaaatactcttgttccttgccaattagagtagtcaacgtctctggattttccaaattgtgaaactttcttttgaccatactttaaggttaatatttattaaatacccttaaatgattgtggccagtagctaaaatattaaaaacgttatttatttagacccattagttttattatttcggtcttggaatcggagataaaagtccataagctggcattagatctttcatgcacttgacaggtgttgcaatatctcaagatttatctatacgatagattaaaacttgggttgtccgaaaaaaagaagaagatgaaaatacaaatgattttccgaatattatatcaagaacaatactccacggctctgctgcctgcatcacattactgtattctgaatctcataattttcttgcacgccaattgtttcttgcctaaaatggaaattattattttttggatctgttaccgatacctttaccaactagccatatttggtaatttaaatttggaagttccagttagcaactactatattataaatttataaaaaaaaacctcggaaatattaagcagtccatgtgcacgagttcccccactaattaattccacaatacacaaaaccttctccagcgccaatagagtccaaattatctttaacctccacatgaggctgcatttcttttctcttttggtctgcatatctttcacgcaactatgataatattaccttttaaagttaaaatatgaataactttgttgccagaatttgccaattgacgattcctcatgtatgaaaagaatcataaatcttaatttatttgtagttcattttgaacatctcaaaattccgtattaactattagcagcacaagatggttgtcattaagagtgtttgacaaccatggacgaacgtaactgatctacctttatctcgaaattatgccaaatataactaaattatatacttcgaaatcacaagttttactaatacgtggtcttatagtaaaacctgtgattttgaagtacatttgattaacttggttatatcaaacatatacgattatgttatgtgattaagcatatgaatttaaaaaagtttatgctaacaaacatgtgtcaaccccaaagtcttaccattcataaacagaaatccacttacttatccatattccacataatttgcctaccgataatgtactaattagcaacaagtggaaacgaaaataagtgtgattaaacattacaactatgattaaaatggataaggttacagaagacagttagggaattggtcggattctatgaacgaaccttccagcgccgatccagcccacttcaccgtttctctcaaccaatcacacagtttccctcaattattttaataataatcatctctaaggtattcattattttattaacaaaatattcccccaaaaatttagtggagacattacaatattattattattgcggaaactcggagttttgagggagaggtcaccaccgttacacatggcatgattcagcttcaaagattgtcaatttttgaaaactcattttgttttctagttttggtgagaggtgggcagatacaagtggataacaaagttttttgttggatgataaaagagacagagagagacgacgcattttcctttattttctcggggaaattcaaagttttcgaattttcttcctttctgggttttcgtcaaaggagcatcttctttatgttcttttgaaagaaggctctcttctctatttctctcccctcttccggggagtttttgattttttaggataaaggagattcctttacctcgattttttgcttttcatttttattaaatctccgatttttgatttttgggggaagaagtagaagaagaagatg

SEQ ID NO: 31864 - DNA, 3003 bp, Unknown; identical to SEQ ID NO: 31862
  misc_feature (1)..( 3003): 2750-1469P.txt file - cDNA_ID_3046615; gDNA_ID_1621165; Annot_ID_173829

SEQ ID NO: 31865 - DNA, 3003 bp, Unknown
  misc_feature (1)..( 3003): 2750-1469P.txt file - cDNA_ID_3046641; gDNA_ID_2926141; Annot_ID_197477
attgaccaaaaaacatttgttaattttccttttggttagtaaaattaaaatttaattttttagatttacacatagtatatgtaaattttttcttttgtgagtttttctatttttttaagagagaacaaaaagtttactcttttccaagacatgtcaacatctgatcgacagacttgacatatggcataatcgtatgagttactaactttaaaatccatactttatataataagatttctttcttgttttagttttatttatttctttaagagaaaaactggtcaacttttttccaacacatgtaaacatctgattgatagacttgacatgtgacacaatcctatgattcatattttatataataaggttaatgatgtcttattggcttagcccaataatacgatgatggatacccgaatcaaaacaaatcgagctttgacgaaatacaactttgtgttctccgccgaaaaagacttcgaattgtatccctcacccaactctcatgtgtcaacaacatctttgattcctttttggatcatcgcctatgtgcctccatttttgggtttatctcaattttgatcaactttttaaggtaagcttcaagcttcttttctcaatttaatttcaaattgaattatagatgtttactccaattgtttcatggcatcaaattttactccgttttggttattatgattacatcaatttccattttcgattatcatttgttatttgattgaatcaatcttttggtacaacatctccgcgaggctcttctcgattagagaaaccaatgcattttagaatttatcatttgttttggtcatagaaaacccaatctctatattattgcttcatttgtttttttttctgtgccacttaattttgggtaactataattgtttttttcgttttggtcggttcatatgccactatcgagttaaattttgttttatgaacttctcatttctcttaggagctattagtgggggtgtttgtaacatcctagtttcaagaatacggtaatgcatgctttaaaaaaattgatttgatgtcaacaaagtacacttatattttcggtcaaatatccggaaagaactccacaattaaaatgtgctaatgttggagcaatttcagaataggtgattttcgaagaagtgattttccaaaccgtgtaagagaggaaacaatatggagaaagatcacatagttatttgtagtttcattacacaagcctttaaagccttatggtagtggaccggacgtcggatacggatgagcccacaaaccaagagagaatgtggggcccaccaaggatgatggtcggggtgttacaatcctaatgaaaatgttcgcataagaagctgttaagacaagtatattgtctaaacgatggaggagtgtggaagtcccttagtccaatggttaaccaagggttcattaatacttctacactatgtctagggctcgagtttcagagaacacgatttcttgcagattaatggtacaaagcttatcggaggtccggaattccacatgcagagtcgttcgtagtggtctaaagtgcggggagagcatgttcatcacaaggatgtcgtacatctagaaccgaattatgaattagaggaagccaagtgtttaaaaaaggttttaaaatatttacaagggattttaaaagagttttaaaacatttacaaggtattttaaaagggttttaaaatatttacaagggattttcaagggctttaaaatatttacaaaggttttttatagatttttatagggtttaaaagtattttgaaaaatttacaagagattttaaaagggttttaaaagatttataagagatttttaaagggtttaaaagggttctaaaagatgtacaagggtttttaaaagatttataatgaatttacaagaagatcttttaaaaactcttgtaaatctttttaaaaccttttaaaatcccttgtaaatcttttaaaacccttgtaaaatctcttgtaaatctatttcccgccaaaacaaatttacaaggatttttaaatgcattttttggctgagaaaaaatttgttaaggaaaaaattttggcgggaatttttttttcggctggaattttttttttgcgggaaaaaggtattgcggaatttgttttttgcggaaaaaataacttttttggtgtcaaaaatttagcggaaaaatttcagttttcaattacatgtttctattagatgaaggtaatttggtcattctgttcaaaggaagaggtatttttaaaaatggacaacataaaagggtattgcttcaaaagggtagtaaaaaaaagatagttttgcaaatcttccaaataaaactgtttatatgtcatattaaacaaatttactgtttatattaaataattatctttcaagagtcaagacatatttgttatatcataaaattgtaaaggtgtttatgtttctactatagttaattgtctactgcaacatgagatcataaagttttgttagaaatgatgataaaagggaagatagtgatatgatataaaaagatgatttgtgaatatgtatatataaatatatcaaactacttcgttataaacataatggctaattcttctaatacaatttaataatactttcaattaatattttcaaatttgtgagatatgttacaaaccaaatttcaattgaagaaaaataaagtaatttgcattcaagataaaattaaataggaaatttgtgatatgttaaaaaacaattgtgttatggtatcattaaaatacaatgacatttattttttgctttcaattttttggtttacctttaggcccgagcataatagccgaatccgaagaaccgacccgaccccgacccaaaaaaccttatccgaacccataattttcaaaatacccgaacgggtctatacttcaaaactcgaaaaaactgaacccaaactcgaatatgtacccaaacatatctcaaatataagtatataccatg

SEQ ID NO: 31866 - DNA, 3003 bp, Unknown; identical to SEQ ID NO: 31865
  misc_feature (1)..( 3003): 2750-1469P.txt file - cDNA_ID_3046641; gDNA_ID_1621166; Annot_ID_173862

SEQ ID NO: 31867 - DNA, 3003 bp, Unknown; identical to SEQ ID NO: 17496
  misc_feature (1)..( 3003): 2750-1469P.txt file - cDNA_ID_3046670; gDNA_ID_1621167; Annot_ID_173876

SEQ ID NO: 31868 - DNA, 3000 bp, Unknown; identical to SEQ ID NO: 7842
  misc_feature (1)..( 3000): 2750-1469P.txt file - cDNA_ID_3046680; gDNA_ID_1621167; Annot_ID_173870

SEQ ID NO: 31869 - DNA, 3003 bp, Unknown
  misc_feature (1)..( 3003): 2750-1469P.txt file - cDNA_ID_3046694; gDNA_ID_1621162; Annot_ID_173724
cgaagaaaggggaaggttctttatcagtccatgatgtaactcaccttgacaagacacctagcaaaggtttgcctcagttaaatgtgactgagaaagttactgatgcaagtaaagacttgagcagccgctctagctttgcccagtcaactttgaatacttttgttaccatgggaaaaagaaaacatgaaaacataagcaccatcctctctgaaacacctgtcctcagaaaccaaacttctagttatcgtgtggagaaaagcaaatttgaagttcgtgccttagcttcaaggtgtctcgtggaaggcgatcaacttgatgatatggtcatctcaaaggaagatatgacaccaagcgaaagagattctgaactaggcaatcggatttctcctggaacacaagctgataatgttgaaagacatgagagagtaagtaggctattgtagttaaaaaaatgtcttagtaggatgctaattgtttgtggctatttcttttgttagtttatctcctaaaattactgttattcaaccactatatcatctacaggaacatgaaaagcctataaggtttgaagaaccaacatcagataacacactcaccaagggggatgtggaaagggtttcagaggacaatccacggtgcagtcagccactgcgatctgtggccacagtgctggattccccagctcagtcaaccggtcctaaaatgttttccacattagaatttagtttccaaaacctcaggacaaggaggttagagaggctgtcgagattgcagtccacaggttatgtatctaaatgtatgaatacgccacagcctaaaaagtaagatttctttccttcttcttttgtgtagtgtgtttctatttgcatttagagaaatgggattctttaaaatgacaactacgtctacaggtgctttgccgctgcaacattagagttatctcaaccggatgatgaagagcgaaaagcaagggctttagctgcagctacttctgagctggaaaggctttttcgaaaagaggatttcaggagaatgcaggttgctatctttttgactaagcgagcaccgaaagattgatagattaaaaaaatttcattctactctatcctggctcggtcgagaaatatatttatctgttttttctgtgtgataggtactcgggcaattcaatcttgggttcatcattgcaaaattggagcgagatctgttcattgtggatcaggtgagtcttcatatatgcatgcttccagagcccttttttcctccttcgatttgtttagttattggttgagttgtggaaaatggaagtttctatcatttcagagttcttccctagtctgatttttgaagaaatggtatagactagtgattgaattttatggccagcatgcagctgatgagaaattcaacttcgaacatttagcaaggtcaactgtcctgaaccagcaacccttactccagtgagtttctttgtgagatcaatctagattcttgatttcattacactgctttcactttttcacatcaaattccccggcggcattcttttatgtcccatgttactttagctatacttgaaccagtagtaatacctcttttccactactctatatgttacccatatttatctatttttttcctaaactcaggcctttgaacttggaactctctccagaagaagaagtaactgtgttaatgcacatggatattatcaggtgaaggatcaccattacttcttttgtaacattttcttattcttgctatcggtttggagattcaataatgtaacaactttccagggaaaatggctttcttctagaggagaatccaagtgctcctcccggaaaacactttagactacgagccattccttatagcaagaatatcacctttggagtcgaaggtagtttttctgtacctctgctgcatcaaatgtcttttgcattacatgttaatatttactttattgttttgggcagatcttaaagacctgatctcaactctaggagataaccatggggaatgttcggttgctagtagctacaaaaccagcaaaacagattcgatttgtccatcacgagtccgtgcaatgctagcatcccgagcatgcagatcatctgtgatgatcggagatccactcagaaaaaacgaaatgcagaaggtaaccaatgcttaccctaagataaacaacaatgtcccttgatagctaacgatggaatccatctctattaaattcaacttgaattgtaaaacacattcttctgcatatgttaacgcttttgtcatttgggttttggtcagatagtagaacacttggcagatctcgaatctccttggaattgcccacacggacgaccaacaatgcgtcatcttgtggacttgacaactttactcacattacctgatgacgacaatgtcaatgatgatgatgatgatgatgcaaccatctcattggcatgaacactcaaaagtcttaacgtatttagatgtgagaatccttaagattaacattgaggaacactcggttataactacaatcgtaaatgtaaattgtcttagtctatatgatctttttggtcacaacaggtaatttcattttcctttgattacttctcgtgaaaaaacaaattaacagttgtggttttccattgatttcaaaaattatctcaaattttggctaaaaaaagaaaaagaaaagagagatgcttcagaatcagaagagaacagtccacttaaaagtcttaaaccctaaaatgaaatccttccatctaaaacgcagtaaacgtcaccgtttgattcttcgtgacccacctaactacgatacactagcttgtagaggataaatgctccgagccctataaacacaaactatgtggagctactaaaggagaagtctttctctctcgatcaagccaagtaaaaaaaaaatcctaatctttgcgtcaccgttcgtgtttcctcttctctctagggttctccttcaacagttttccagtaaacatg

SEQ ID NO: 31870 - DNA, 3000 bp, Unknown; identical to SEQ ID NO: 7781
  misc_feature (1)..( 3000): 2750-1469P.txt file - cDNA_ID_3046702; gDNA_ID_1621162; Annot_ID_173718

SEQ ID NO: 31871 - DNA, 3003 bp, Unknown
  misc_feature (1)..( 3003): 2750-1469P.txt file - cDNA_ID_3046702; gDNA_ID_2926183; Annot_ID_200425
aataccacaagcacgtatacaagagataaggaggtaagattcttcatctacttgctttttctggagtaattgactcccaactagtagtcaaatcttttttactttaccacattcattttcactcacaatgacgcaaacactatggtcaaactctgttttatcactcctatttttttttttttaagtgtttttttctaacaccccaaaaaagaagcaaatgaagtaaagaaaaagtcacccatttgtattttgatcaaaggtatataataaaatcctcaagaataggtttatcgaaaccaaatcaataatgtttgaccaagaacatgaataaaacaaaacaaaaaacatgaaatcgttgagaatatttttgaaagaagaaaaaaaaataccgaaccgggtagttcgctactactacacaacaacaacaagagcaacatacgtttcgttcgatgaacagaaacactttgggagtatccgttcgtctaaccgtttgttttgtattgggcacgtgttcgcatgaattcagtctcttaatcagtctttttgactatatacatccatgcatgccacatcacgtgaccttttcgtaatttaatttaagtcggttacaatgtgtatgttcatttccttcaaaaggaaacttaaatacataaaacttatatatatatataatattcattgtgttaaaaaaaaactttatataaattcataatatataactctatagaaatgtattaactacaaaatctaggaaataatgtcattttttaaatattgaatatctactaagttatgactttctttgtctaaaaaatgcttcagcttttgaacaaaataataataaagattatactttataacaaagaaaatttgagtcaaattaacagcataatattttgtttttatgattcagcgttttgaatgcaaagaccaaattaccacaagatctctaaacttcaccgactaaaaactaagggtaattaagtcattttacaaaaaagaagaaaaaaagacggagatatataaaaatgtgacacgtttaggcacttttagataatcttattcttttttatgcacttatgagggtgaggacactttttccattatttgactttttttaagacatttttacccctaacttaaacaactacttttattttgaattttaacacaaattaaatattttttctctcttccacgatccttacgcaaaatagaaaaaaagatctctctctctctctctttctctctctcacatttgtagtgcctttctctctccacgtctccataacttctaggtttgattcctcttatcgattatgacggcggctcactaaaaattggtgataacgattctgcaaataaatgggagaagtttcttaaacaattcgatctcgattatctcaggaatttggtaaaaaattttggtatccataataacaagtccatttaaatatatccattcagaaacctttttactgatccatatccaatctatataccatgtcaataataacaagaaattcgattaaccgtggttcgtatagaaaccaaagttccatgtccataagatcttgaaggtggaggtctctccaaactgaaagaaaaatcaacaaataattttttggtatctataataacaagtccatttaaatatatccattcagaaacctttctactgatccgtatccattctatataccatgtcaataataataggagattcgattaaccgtgttttgtaaagaaaccaaagttccatgtccataaggttttgaaggtggaggtctctgcaaactgaaagaaaaatcaacaaacaattttttggtgtccataataacgaatccatttaaatatatccattcggaaacctttttactgatctatatccattttatataacatgtccatgataacaggagattcgattaactgaaatctcgatgctacgtagatgaaacgagtttgacacatgagagagaacaaaaatcaaatcaagccgccattgttgaagatgaagaagtttcttctcattttttacaaagatgaaaagagagagaggtgaagagagagagagatgaagagagagagagatgaagagagagagaaagagagaaaacgtgggttaagagaatattttagttaagagggtattttagtaaaaaaacatagagaaaatgcctaatcttttgaaagtgcctaaaaacggaaataattttaataaaatgtttaagagtgtaatattctctatataaaatcgtaaattttgtatttttaatcatcaattcataaatcttccaaattagaatggggacaatggttctaccatggcagggcttcatatccagggaagtgagcaacttatgtaactcaagaaggaacgagctgactcttggagggttagtgacattctttggtgagaaaattcccagtggtctcaaactcgagaaacagatcgcactcggaaaatgagtcgtcctcgtgggaaatgtaggcaccacacggtcagaagaagactcatcttatgaaggaaacctcgagctcaggcttagggaagctgatttcccaataggccaaaaccaaccgcatatgggagtgtctctaaaaaattcgaaagatgatttaacagtcacagccaatctacgacatcaagtctctgtgggaagacagacaaaggtaacaacttttgtaagtcttgacagcaagaggaccgggtgtttcactgtccgaacaaacagctcagatcagttgcagattgctgtcatggctctgcttctccttgccatgtgatgtcaacctacatgaagatttttcgatcagaggaaagaactgatattaatctttaggattaggttgttttaattacgttcttgccaaatttgatttgattttatggaattaattgtaaaagacttggggctatttatatgaaagtttcgtgattttcattgataagtaggtcgtcaaagaaatagagaagaagcccaaaaaaataaaataatg

SEQ ID NO: 31872 - DNA, 3000 bp, Unknown
  misc_feature (1)..( 3000): 2750-1469P.txt file - cDNA_ID_3046706; gDNA_ID_1621162; Annot_ID_173714
gacaattaagtgaaatcagacaatcttaactgtcgtgtccaaaaacacaaaaactctcctcgcttctcttctcttgttgtagtaagtaactttggtaattaacagtgttattatcaaattcgaatctcttacattaatggaaactcagatcttctcttaaaaacacataaagcacagatcttttacagagaatcttgtaagaagaaagaagatgattgagaggtgtttaggagcttaccggtgccggagaatccaaagagctttacgccaattaaaggtaacgattctctgtcttcttcttaccgttgttgtcctacgtagcacaatcggcgccggtaaattcggaactccggagcaagatcttgacgagatccgtcaacatttccacgcacgcaaacgaggtgagcctcaccgtgtcctcgaagaaattcagaccggaggagattcttcttccggtgacggtggaggtaattccggtgggagtaataactacgagacgtttgacatcaacaagattttcgttgacgaaggtgaagaagagaaacccgacccgaataaaccttacactctcggacccaagatatcagattgggatgagcagagatctgattggttagctaagaaccctagcttccctaatttcatcggacctaacaagccacgtgttcttttggtgactggttcggcgccaaaaccatgtgagaatcctgtcggtgatcattacctcttgaaatcgatcaagaacaagatcgattactgtaggttacatgggatcgagatcttctacaacatggctcttctcgatgcagagatggctggtttttgggcaaagcttccattgattaggaagcttttgttgtcacatcctgagattgagtttctttggtggatggatagtgatgctatgtttacagatatggcttttgagcttccatgggagaggtataaagattacaatctggtgatgcatggatggaatgagatggtttatgatcagaagaattggattgggttgaatacagggagtttcttgcttaggaacaatcaatgggcacttgatttgcttgatacttgggctcccatgggtcctaaagggaagatccgtgaagaagcgggtaaggttttgacccgtgagctcaaggatagaccggtgttcgaagctgatgatcagtctgctatggtttatctgttggctactcagcgagacgcttggggcaataaggtacaaactgattttgactggtatataactatgaacttgattccatttcagcattggtttgatgtggaaaaaaaaaaaaactaaatttggaaacttgtggtttgcttgttgtggtttatcatgtctcttgaacatcaaaaataacaatgtgagttgctttttgtggtttatcatgtctcttgatcatcaaaaatgacaatgtgagttgcatcttgtggtttctgacatctgtgtaagggtctattattgaagtaaactcaaatctttgcttggtttggattttgttgagctactcatttgagccactgcattgttgttataggtgtacctagaaagtggatactatcttcacggttactgggggattcttgtggacagatatgaagaaatgatagaaaactaccacccgggtctaggagatcacagatggccattggtgactcactttgtcggttgcaaaccgtgtgggaaatttggtgattacccggtggaacggtgtctaaaacaaatggacagagcctttaactttggagataaccagattctgcaaatctatggtttcactcacaaatctttggctagtcgtaaagtcaagagagtgcggaacgagactagcaatccgttggagatgaaagacgagctcgggttgcttcatccggcgtttaaggcggttaaggtacaaaccaatcaagtttgaatcggttttgcgtttaggatttgtgttatgtttctcgctatatttatgtcttgtgtctttgcttgttgttgtactaagatggatgataaagtattgtgcagagacatcagttaattctttggttttactttgtctctacgtctagagttctattacgaaatcaaaatgttgtttttcttcctttttgttctttgtaatccattagaacttgagattttgtagcttcatggatcaataatctgtgttaattcaagaacttttttttaacctgatttcacattcaactaattatttacttttagtatgcaaaatgtgaaaaaatcacattgagttagtatagttctgagatcatattcacaagttttgtgtagtttaggagtttaattcgaaaaacaaaatttggcatgtggtcagattcttttgcagtatgggttgttgtatctgaaatctgaatgtctttaattgataataaaatcatgtatacgggctattattagggggaggccttataaaagcccatctgaaaactaaaatcacggcctaatatatggaatccgtgttatacaaaaatccaagataattcgtagataatggtgagaaaatcgtttgtggccaagcaatttcgggtagggaggatcaacaaagatacaaaaaagatttctttcttctttataaaacccaaatctcaaaatgttatctcgttttttattttaaatgttttattttattttgttgttgtgtggtttttttggtttttagtaaagagaagatataacaaaaccctaattctcatgagttcaaaaaccctagatttagtgagcccatcaaaacattttccattggggaagattttaacatttggagaattgtgcataataaaaacaaaatattaaacagtaaatactttccaaaaagtgactaaaatattctaaatttactcaacaaaaattgaaaattcttgacaaaaaaattactgttttttaaaatgatacaatgtttttcaaattttaaccacaaatgattattgtacttcttcctcaaataaaaaaagaaactctatatattttggcttgagccaatg

SEQ ID NO: 31873 - DNA, 3000 bp, Unknown
  misc_feature (1)..( 3000): 2750-1469P.txt file - cDNA_ID_3046732; gDNA_ID_1972148; Annot_ID_179371
gtggtcgtagcacacttgagaaggctatttcattcgtcaatgccaatgataattggaacgctagagttgtatatggtgacactgataggtaaacattaaccaccatctttcatggcactattttaacttcctacaatataaagtatagccagggtttcatgcttgcataagttaatatatattcgtattacttccgagtgtttattatggtcatttcagcagccttgacaagtatgtatcacagtttctttatttacttcttcctcgtggcctcatgcattttaattacttctgtagtatgtttgtcctcctaaaaggacgaactgtaaaagaagcttttgtagtcggacaagagattgcatctgcaataactgaaatgaacccacacccagtcactttaaagatggagaaagtctatcacccttgtttccttcttacgaagaagcgttatgttgggtacagttatgaaagtcccaatcagagagagcctatatttgatgcaaaaggtattgaaactgttcgaagagacacttgtgaagctgttgcgaaaactatggagcaatcgttgagactcttttttgaacagaagaacatctctaaggtacaaatttgatttcttgcactctttcgaattatcagctgaaactgcagtgtcgtacatctgcttttctctattcattgtgcaggttaagtcgtacttgtatagacagtggaagcggatactatcagggagagtgtctcttcaagattttatctttgcaaaagaagttcggttgggtacttacagcacaagagactcttcactccttcctccagcagctattgtggcaaccaaatcaatgaaagcagaccctcggacagagccacgctatgctgaacgagtgccttatgttgtgattcatggggagccaggagctcgacttgttgatatggttgttgatccactggttcttttggacgtcgatacaccctaccgactgaatgacttatactacatcaacaaacaaattataccagctttgcaaagggtatttggactcgtgggtgcagacttaaaccagtggtttttggagatgccccgtctcaccagaagctcccttggtcaacgtcccttaaactctaaaaactcacacaaaacaaggattgattatttttatctatcgaaacattgcatcttgtgtggggaagttgttcaagaatctgctcaactatgcaaccggtgccttcaaaataaaagtgctgctgctgcaaccattgtttggaagacttcaaagttggagagagagatgcaacacctagccacggtaagtactccaaaatctaacgtttatgaactgttacagaacttggtaacgtttacaaccatcatcttactgtctttactttccaagagatcgtgtgcttcatagaaacttgtacactttctgatgtgagcatttgcatttaatcttgcacacactttgaattcaaagagacagtttcatctcatggtagtcgcaaaacaatttatgctaaaaagtggagacttattagtttcagattatctttcagaaatgtttgctattttataacaagaacgagtgtagacctctttccatgtgtgcttaagttgtgaccttggtgaatctctgtagatgcattcagttccaactttgttggtccattaattgatttttctttatattatcttatttgcagatatgcagacactgtggtgggggagactgggtggtgcaaagcggagtgaaatgcaattcccttgcgtgctcagtcttttacgagagacggaaagttcagaaagagcttcgtggcctctcctccattgctactgagagtgagctttaccctaaatgcatggctgagtggttctaaccttgacgaaaactcaaaaaaaaaaaaaaaaaaccagtaatctaactctatcccatacgtatttccactcaaactaatctaaaccatcctatcctgttaagtaacgatgtgaatttttgtatttgcaggattttgagcgaactagtaggtttatatggttgtgatcaaagagcatttttttcaaggacgtgtgaatatgtgtatagatagtagtagcacccacgagtacagtactgtcactcatcattctgttcaactcctttgtgttgtgttgtgtataagcaatcttggaaaaaataattataattttgtatagcataccaagttcacgagaaagatagatagatagataaagaaacaaaaacaacataacaaaaaaaattaacagaagaaacaaaaacgcctacgagtcttttgggtggtggtgagatggtgcaatgcttcaatctctctctttttaagactttcgagcacaaccaactgtttcacacaaaatgggtgataatcccttcaatgtaggcaaaacttatagaatgcttaagaaaactgaataaggaaaaaacctcacctcttcaatagcacgctcccgcaaaatcgtaaagtgcatagccctgtgtttggatataatcttcgtatccatatatgataaagcaactacatggaaactggcagagttatatcaaacatataaatggtcatggatatgagtgtacaaaaagtaaaacagatttggtcatacacaatttgaatttcttcccgtaataaacatattcttaggctctatatatatatattgtatcaatgttattgagatcaataacacataataaagagttttcccccaaacccttctctagttagtagtttctataattttggcaaatagtattcaagtgctcttgcattctcaagtgattaattcaattcctaggtttcggtttcggtttcggtttggttcggttcgtctcggttattttaggaaaagaaaacaaaattagagagcaaacacgattggtcaaagtcaactcttctctaccttcctcacttcccagcttcactgatcatcgccaatcacaaaaccaactacacacattcatcatcatttcgattatattttacccgaccatg

SEQ ID NO: 31874 - DNA, 3003 bp, Unknown; identical to SEQ ID NO: 17524
  misc_feature (1)..( 3003): 2750-1469P.txt file - cDNA_ID_3046732; gDNA_ID_1621169; Annot_ID_173917

SEQ ID NO: 31875 - DNA, 3000 bp, Unknown
  misc_feature (1)..( 3000): 2750-1469P.txt file - cDNA_ID_3046739; gDNA_ID_1972148; Annot_ID_179372
aactctttcaccggatctcaacaagtgtaaacagcttcaacggttgatcctctccgctaacaacttttccggtgagattcctggtgatatctggccggaattgactaatttagctcagcttgatctctctgctaacgaattttccggcgaaatccctaaggatatcggagagcttaagtctctctctggtactttgaatctctcctttaaccatttatccggccaaatccctaattccttaggaaatctaccggtgacagtctctcttgatctccggaacaacgatttctccggcgagattcctcaatctggttcgttctctaaccaggggccaaccgcatttctcaataatccgaaactgtgtggtttccctctccagaaaacttgtaaagacactgatgagaactctccggggactcgaaagtcgcccgagaataatgcggattctagaagagggttaagtactggattaatagtgttgatctcggtggcagatgcagcaagtgtagcttttattggtttagtgttagtttacttgtactggaagaaaaaagactctgagggagggtgtagctgcacagggaatgcgaaactcggtggtggttcggtgaaggggaaatcgtgttgttgtatcacggggtttccgaaagaggatgattcggaagcggaaggtaatgagagaggagaagggaaaggagatggagagcttgtagcgattgataaagggttttcttttgagcttgatgagttgttgagagcttctgcatatgttttggggaagagtgggttagggatagtgtataaagtggtgttagggaatggagttccggtggcggtgcggcgacttggggaaggaggggaacagaggtataaagagtttgttacggaggttcaagctatggggaaagtgaaacatcctaatgtggtgaagttaagagcttattattgggctcctgatgagaagcttttgattagtgacttcgttaacaatggaagtttagctgatgctcttagaggtattacattacttcttccttcttctttttctgcttatcgaattagtctactaactaaagtttgagatccggttctgttctattgacttaagaaatttatgttgactttgactttgtcaacgctagattagacattactaccttagtgagagatgagattagatctgagagatagtttgtgggattgtcaaagcaagagtggaccaagatttctttctctttttaggcatattttggtattttaatttagaatttagtcaagttacatgtaaaagagacatgtcttgtaagagaattcgacatgtccgaataataaatatcttttttaagtattagtatatgatttaagtgtggtagagtcttagagtagaagtaattagtaaaaatagcagaatgaggaaacaatgatgagagaagtttacttgtgggctaagagtaatgattttatacacccactctgttgagcctctagctgtcccgtctttttctcatcgtaactcattacttactttaatattggatacttgtttgttttggtgtgtgaatagggaggaatggtcaaccatcaccgagcttaacatggtcaacgcgtataaagatcgcaaaaggagctgcgcgtgggttagcttatctacacgagtgtagtccaaggaagttggtacatggcgacgttaagccttccaacattcttcttgattcctccttcactccttacatctctgacttcggtctcacacgtctcatcaccatcactgccgcttctgcctcttctaacgaaccttcctcctcctctgctgcgggtggtttcttaggtggagctcttccttacacttccatcaaaccctcagatagatccaacggctataaagcccccgaggcccggctccctggagggaggcctactcagaaatgggacgtatactccttcggtgttgtgcttatggagcttctcaccgggaaatcgccggattcttctccgttaagctcttcctcgacgtctacggtggttgttgaggtgccggatttggtgaagtgggtgaggaaagggtttgaagaggagactccattgtcggacatggttgatccaatgttacttcaagaagttcacgccaagcaacaagtcttgtccgtttttcatctagctctcgcttgtaccgaaggtgaccctgaagtccgtccacgtatgaagaacgtctctgagaacatcgacaaaatctgattcaattattatattcttttttctttaatttttcctattatatttttgtatctccgatagttcttacacgaggtcgttacgtcactcccacgtctgggactagtggtcgatttgtttttattgaataattatttgttatgaaaattgaatcaaatgagttatactttaggctttaaatggctttgtcttttattttgctgtctttttctcatctgttaaaagacaactcctagttaacgggcacttgtcttgtccttcagttgaagatacacatacaagatctaatatcttccaagaaccatccatttgaaatttcgcttttcatagagtttatgcaaatgtggatttgggtttttagatttaaacgggtcacagaatatttaacttggggtaaattttcaaaaaagcataatggataattaaaatttagattggcccattatatttatcaggcccactaattaaatgtttgttgcttttctgctttttgacattttacaccggcaacctttgtcggagaacggttaagtagctgggataactcaggcggcgtcgcggttaggtagagtagaagaaactacaagcaagagagagcgattcactgaaggtaaccacgtcttaaacaaaatgaaccgaactataaccgtttggttagaagatttaaaacggaatgatccggtttgattttttggtttcagattctgcgggtactggcgccaaatcataattcgtggttccggtcaaagtcacggcgaaacagccatg

SEQ ID NO: 31876 - DNA, 3003 bp, Unknown; identical to SEQ ID NO: 17525
  misc_feature (1)..( 3003): 2750-1469P.txt file - cDNA_ID_3046739; gDNA_ID_1621169; Annot_ID_173915

SEQ ID NO: 31877 - DNA, 3000 bp, Unknown; identical to SEQ ID NO: 27980
  misc_feature (1)..( 3000): 2750-1469P.txt file - cDNA_ID_3046744; gDNA_ID_1621170; Annot_ID_173934

SEQ ID NO: 31878 - DNA, 3000 bp, Unknown; identical to SEQ ID NO: 17537
  misc_feature (1)..( 3000): 2750-1469P.txt file - cDNA_ID_3046752; gDNA_ID_1621170; Annot_ID_173932

SEQ ID NO: 31879 - DNA, 3000 bp, Unknown; identical to SEQ ID NO: 7881
  misc_feature (1)..( 3000): 2750-1469P.txt file - cDNA_ID_3046792; gDNA_ID_1621170; Annot_ID_57251

SEQ ID NO: 31880 - DNA, 3000 bp, Unknown; identical to SEQ ID NO: 7870
  misc_feature (1)..( 3000): 2750-1469P.txt file - cDNA_ID_3046792; gDNA_ID_1621170; Annot_ID_173955

SEQ ID NO: 31881 - DNA, 3000 bp, Unknown; identical to SEQ ID NO: 7871
  misc_feature (1)..( 3000): 2750-1469P.txt file - cDNA_ID_3046796; gDNA_ID_1621170; Annot_ID_57250

SEQ ID NO: 31882 - DNA, 3000 bp, Unknown; identical to SEQ ID NO: 7871
  misc_feature (1)..( 3000): 2750-1469P.txt file - cDNA_ID_3046796; gDNA_ID_1621170; Annot_ID_173954

SEQ ID NO: 31883 - DNA, 3003 bp, Unknown; identical to SEQ ID NO: 17532
  misc_feature (1)..( 3003): 2750-1469P.txt file - cDNA_ID_3046804; gDNA_ID_1621170; Annot_ID_173948

SEQ ID NO: 31884 - DNA, 3000 bp, Unknown
  misc_feature (1)..( 3000): 2750-1469P.txt file - cDNA_ID_3046808; gDNA_ID_1621170; Annot_ID_173947
caagcattcccaaaagctcataagcatcagccacggtctgcacaatgtgcttgtccggaggcttacggtcataactctccagatccttgaatagcttcataacccacataacaaaataaacacaagtttgaggtcaccacgaaataaagtaacttactagttcagttaagtatcaatgtgcaatgttttcttatttagttttcggtcagtgaagacaagggggaaaaagaaccttaacaagttcctgtaacatgttgttccggaaatatatgcgcatcatttgtaagcataattgccaaggcacagaatgcagatcgttcccaactttctttcgccagataacatgagcctcttctgctctacgatccatatctaacgcccgtatcaactgtccgtacgtccccatcgtgttcccttgtcccttacttaggatccactttatcacctacaaacgattaaacaggggaaaagaaataaacacctccccaagattctattctactttttcagttactatagcaatagacatatgttcttggatatttgattattcatggttcatgagtcccagaaaagagatagaacactcaggtgatagatacctggaccattcgatgccattgatgttccttttcaagactagctattactattttgagggaagcaatggggaaattgcgctcccaagcaacccaagcatccagagctccataaacagcctctttattatcttcaatatcaagaagctgcattcacagatgagagcaaaataagaaccataagagtaaaaaactaaggttaaacaagaatatgaaaattctcataatcgacaaaccattagaaaggcaaaaagaaatagcttagtgtacaaaaaaattctgcttacagtgttcacaagaaactttattttatccttcttgggtatgttctccccaatttgatgtttcctagggttttcagcgtttcccttctttgatgaatcagaaaaatcttcctcatcctacaacaagatgaaaaatatgcatcctaaggatctctcgttggtgaaaaataacgcaagaaatataattgatgaaaggcacaattctcaggaatttactaaccaaaaatacatggaaaacagaaagtaatttgatcatcagatatatcagtgatgtgtttgactatatgaactactgagatcgacaggccagtgaatgagaacacacactttagttatgtgctatgaactactgagatcgacaggccagtgaatgagaatacacactttagttatgtgctataacttatatctaggtgaagatgtataagatctgtctgcaagagaaacataaattgagctcacactaagacttggacagcaaaacacaaagccgatcttcagtgtaatctattgtacctcattcttcacaatacgtttaggagatgaatgagaatcagcgacaaactgatagctcatagattggacccttaaaaaggcgggcttgtttgtctggttgacctgagaaataacatgtatcacaaaatgaataaaaggaatctgaaatatacgtgtgcaccttttatttattggggtttttgaagtttaagatgaaaaacatttcacaactgaaaacttaccccaagaagatgatgaaatggaccagttagtgcgccagcattaccaacggtgttgtactttctgtagaagaatggtaaagtatcagattcaaatcaatacaccaagactcaagatgcagcttgtttttggcagtacaaaagcgagacttggagagcagaaagaaatgaagctaattgatccaatctgagcttttaccttattccattggaatgagaaaacactcctggctcacctacaataagtttcaaatcataagagactccgactatatgaagacctcaaccaggttacacaatctagcatttcacatttgtatgcaatttaatcaacttatcagaagaaaaagagagacctttcaaagttttacagaaattgtctacttaattaaatgaccatttttacagaaatcagctccaaattcgaaacttagagattccaagtcagtaaccaaacattagagtgctatcttcttccgcattaaacttttaagtatacaaacgaatttatcatgagcaatactaaccataattttcgtcacatcctcctccaatgaagagatttcttgctgctgaaatagaagctaacggcgccgttagatttcttgttgcgctactaacggcgcgtttcagaagcgttctaggaattagagaactgaaacccgccattggagacggtgctacgagaaccaacgaagacggaggcgtattaagggaggggttttcagaaatgatactgttacaattagcccattaataaaaaaaattggcccattaataacaaaaagaagcttcttctctatgtagtagtagatccgttgaaatagagatgataaaacgtgtagcccattaagaaaagaattggcccattaacgagaaagacgcttctctcttttctattagatccgttgaaagcgagatagataaaccggatcggtttaatgaaaaggggtaacatcggaattacaaagtttcatgattcttcttcgttcgctttccaagttccaacgtccgttttggggggaaataaaccaggggacaagaaaatccaagaaaaaaaaaattcaggtttctgcgagaaaatctggatgaaacagacctatgtgttctgggattttttttcaaagggaaaaaaactcaagggtttaagatcctctgcaatcgtcacgaaattttgcgcatgtagcctcgtttatgtttctatgttgttgacgtcgatcagaaagttttgaagctgggaaagtgaaattttggttcttgattttatcatggatccgttgtgattggattttcaaaagtttgtgttgatgtttctcccgttgttgggtattgtcgagccgggatcgttttagaaaaatctgaccaaattccatcataacaatg

SEQ ID NO: 31885 - DNA, 3003 bp, Unknown
  misc_feature (1)..( 3003): 2750-1469P.txt file - cDNA_ID_3046820; gDNA_ID_1621170; Annot_ID_173940
aaatcagatcttttgtttaatatcctaagacgcaaactctaataagaagctttattttctcttattatttataaatgagagtattaaatttgtccggttatgagcatttgtaggtttctttgtggtttgtctttaacaaaacccaaatttctcaaaccctgattgttcgcctatagactcgatcttcgttttttttttgtcttaatcactcaataatatattgtctaaagtacattgtatatcattagttatgaattatgatgatatagctcgacatataaattaataatagaattcaaatgctcgctcgctgactgtagtaccctgatatcactagccaatacaacttacgaaaaaatgaaaaatgaaaaaaattttaaactcgaccaatcaatcgtccatggtatagttgtatcatcagacagcctttactaaggaaaaatgttataaattgggttcgtggccaaatttatgactttcaactgtcaccaaccttacattttgctatataaaccctaagaaactcattataaacttcaacaacataaaagacgatcaatataatctagaaaaaaaaaaagaagagagaagagagaaatgtcgagagctttgtcagtcgtttgtgtcttgctcgccatatccttcgtctgtgcacgtgctcgtcaggtgccgggagagtctgatgagggaaagacgacgggacatgacgatacaacaacaatgcccatgcatgcaaaagcagctgatcagttaccaccaaagagcgtcggcgacaaaaaatgcatcggaggagttgctggagtcggtggattcgccggagttggtggtgttgccggcgtgggaggtctagggatgccactcatcggtggtcttggcgggatcggtaagtatggtggcataggcggtgcagctggaatcggtggatttcatagtataggcggtgttggcggtctaggcggtgtcggaggaggtgttggcggtctaggcggtgttggagggggtgttggtggtctaggtggcgttggcggtctaggtggagctggtttaggcggtgtaggtggtgttggcggtggtattggtaaagccggtggtattggcggtttaggtggtctaggcggagccggaggtggtttaggtggagttggtggtctcggtaaggctggtggtattggtgttggtggtggtatcggtggtggacacggcgtggtcggtggtgtgatcgatccacatccttaatagagagtatttgttggttagggttttaattaaggaataattaattagtttcgatgttattgttggtcttttaattctgtgatcattagggtgacttttgatctattttctagtttgggcttttgtaacgtttgctttgatttcggccgtggtgttatgaaatgtgcgactctctatgtttgaatcgttttggtttaggaggttctcttcttccatacttttgcatgttcaaagacaaatttttaattaagaggaattatcaaggtttccgacgagatattttttgaaaatgaaattggtttgaacttgtaatgatatttaaaatatgaaaacatcactcaaaaatggatggagtacaaactttttccactatatatacattacatgtaaaaagtgtatagatttcgtttttgttgcactgtctaactctaaataagtcggatatcaaagttagtatatagtaaaaaaaaaaaaaagttagtatatatatccaagtggtaaaacccgtaaaattaacatatatatatatatatatatatatatatatatgagtttggtcaagggttttgaaagatctcgactaagagaagacatatgagttttggttcaaaaagtccttcgataatcattagaaacgaattaatatatagtaaaattgagtaaaaatgttaatctattaaccaaaggttaactatatagaagattaatatattataaaactaaccaaaacattggatattggtatatccggattattttcctcgttgatgatcgcaatattgcattcagccatctactacacacttcctcgttgatgatcacaataatgcattcagccatctactacacactgacacatatgattcgtaatttcgtatgaaatgtttgaactcatacttttaatttacatatttaagatggacgtaacaatgaacatttgttcagaacttgagattgtactacccctataaataacgcctatttactaattactatgcatggttcatcatggttggaaatttctttgcaaatgatctagtgtatattaatccaaaatatataggaaaaatacattaattgtgggaggaagacagcaagaatccacaaaaaggaagcactaataaatgacgtaataattgcgttgggatgagagggacacaaattaaagaagataggatttgcatgtcaaacacttgttgtcccatttcatgcatcgtcctctctattgtctatttcgctgtcacaacctctaaatttacatctcatgcaatttattacgacgtatacatacacccttcaaatttttattcgtttgcatttgtatatatatacatatatattagctagtaaaattaatcacaatttataattttgtaatcattaaaaatattgtagtaaaaaaagcaaaacccaaaaaaaatagaaaagaaaactgaactggttggtgtttgtggtattttttttaataattttgttaaggatttgatatgggtttcaattttaatggtggaccgaattgaaaatcatcgagtgaaaattgagctacttacaaagcccaattagatccaacgggcctcaaaatatcttttatattccattttttttaatttgtttttgtttaataaatcaaaaattgaaaagcgaaaggcagagaaaatttccaatataggcgaaatgtaaagagcgggaagctaaagcctagagagagattctcacactgccaaaacaaaatttccctgtagagagagagagaaagagtgagtgatg

SEQ ID NO: 31886 - DNA, 3000 bp, Unknown; identical to SEQ ID NO: 15422
  misc_feature (1)..( 3000): 2750-1469P.txt file - cDNA_ID_3046829; gDNA_ID_1621171; Annot_ID_173984

SEQ ID NO: 31887 - DNA, 3003 bp, Unknown; identical to SEQ ID NO: 17540
  misc_feature (1)..( 3003): 2750-1469P.txt file - cDNA_ID_3046833; gDNA_ID_1621171; Annot_ID_173979

SEQ ID NO: 31888 - DNA, 3003 bp, Unknown; identical to SEQ ID NO: 21610
  misc_feature (1)..( 3003): 2750-1469P.txt file - cDNA_ID_3046844; gDNA_ID_2926134; Annot_ID_197125

SEQ ID NO: 31889 - DNA, 3000 bp, Unknown; identical to SEQ ID NO: 7896
  misc_feature (1)..( 3000): 2750-1469P.txt file - cDNA_ID_3046844; gDNA_ID_1621172; Annot_ID_174014

SEQ ID NO: 31890 - DNA, 3003 bp, Unknown
  misc_feature (1)..( 3003): 2750-1469P.txt file - cDNA_ID_3046902; gDNA_ID_1621173; Annot_ID_174033
aaaggaaatgcttttagaagcaaatggaacagataatggtgcaagacttcagtttacaactaccaaaaaaggttcaatttggtttgatcaagtctcagccatgcctatggatacttacaaggtttgtttacttcattgagacaacggcttatagagtctagcagcattttcaaggcagagtaattttgatttttcttgatttggtcacagggacatggtttcagaaatgaccttttccaaatgatggtcgatctaaaaccgcggtttatccgattcccgggtaatttctagagagtaaaatagcatttcacttggtaaaatatgtatgaacataaaaaatgagaaaagctaaaagaattagcaatgttttgggagttaggtggttgttttgtggagggtgattggttaggcaatgcattccgctggaaagaaaccgtgagagcttgggaagagagacctggccattatggtgatgtttggaagtactggactgatgatggccttggccactttgaattctttcaagtaagggatttttttcttttcggttctatatccatttaaagtgtttcaataattactaagctcgaaacaaatatttcttgtagcttgcagaagaccttggtgcatccccaatatgggtgtttaacaatggtaattcttaagctctatatctcaagactttgctttatttacatgtattaacctctgagtgactgtttcagggatcagtcacaatgatcaagttgaaacaaaaaatgtcatgccttttgttcaagtatactcatgaaactttctattttaataaagagagtgatagtaattcattagtaagccaaaaattaaactaaaatgtgtatttctctgtctaaggaagcgattgacggtatagagtttgctcgtggagattctaattctacatggggatcggttcgagctgcaatgggacatccagagccttttgaactgaaatatgttgcggttgggaatgaagattgttttaagagttactacagaggtttttgcatttctctctgttatttaaaaccattttgaaagatacaaacaagagagctttggttatactaacttaaatacacaactttttacaggaaactatcttgaattctataatgctatcaaaaaagcttatccagatattaaaatcatctccaactgcgatgcatcggctaaaccgctcgatcacccggccgattactttgattaccacgtaaaaaatacaaaaaacaaaaaaaaactttcaaattttaccattcatatcattgattttgacagaatcttgttattcagatttacactcttgcaagagacttgttttccaagtcccatgattttgacaatacaccgcgaaacggtccaaaggtgcggtaatagatgaaacaaaagagttcattttcgacaatgaaaaactgcggttattcgccttgtatattcttctaatgaagaagctttcaacattttcttggttataggcttttgttagcgaatacgctgtaaacaaagcagatgctaaaaatggcaaccttttggccgctcttggtgaagcagctttcctccttggtttggaaaagaacaggttttttttttctcaaacctctatcttcttctttggttttgaaaagaaaagttaaaacactcactgtcatgtttttgttgcagtgacattgtagaaatggttagctatgcacctctctttgtcaacacaaacgatagaaggtatctctcactttagtttcaacggtttttatcggtatatcttgaatgcggtaatcagaaacaagcccgttgcttttgttttgtttttcaggtggatccctgatgcaatagtttttaactcgtctcatctatatggaactcctagctattgggtccaacacttcttcaccgagtcaagcggagcaactcttctcaattctacacttaagggaaagacttcttctgttgaagcatctgccatctctttccaaaccaatggcaaagattacatacagatcaaggtttgcttatctcccatacgcacaaaacaaatgtctagaaccaaatgaatgttctgaccaaatatgaatacacaggctgtaaactttggagaacaatcagtaaatctaaaggtagcagtgacaggattgatggcaaaattttatggatccaaaaagaaagtacttacatctgccagtgtgatggatgagaactctttttcaaacccaaatatggtaaaacatatgaagaatcaatcatacaagagttagggcttagtattgttctgaatcttgaaaacgttgctaagttgttttctctgttcttttctgtagattgtgccacaagaaagtttgctggagatgactgagcaggaagaccttatgtttgttctcccgccgcactcgttctcttccttcgatttgttgacagaatctgaaaatgtcatcaagatgccaatatctgattcatacaagaaaacttcaacaatgtgaagagaaacatcatcttggagactttcatgtcttttgtctttactcttcagtggttattaaacacataaacctatatgttcgtgaataataccaaagttagttgattataatcacgttatgcccttagattacttgatatgcaagattactcttccttggtaaaaaaaaaacaatggtaacacattagaccctaaacagttcagtcaaaggaacttacattgtgtcgtcaaaatgcagctaaaaatagcccaaagtttaattctttattgtttaaaatccttatctaacaaacattgcttctcacagtttcttgtttttttcttttcttcaaactataattagaaagacatcgagaacatatcttaatacttgagaaactaaaatcccctaaattccagcaatttatctgtcctttcaaagcaattttaagattaagagaaccataaaattaaattccattactctcacacaatttttgattatattataacattttgtatgttggagcaagatg

SEQ ID NO: 31891 - DNA, 3003 bp, Unknown; identical to SEQ ID NO: 21318
  misc_feature (1)..( 3003): 2750-1469P.txt file - cDNA_ID_3046942; gDNA_ID_1621174; Annot_ID_174099

SEQ ID NO: 31892 - DNA, 3003 bp, Unknown
  misc_feature (1)..( 3003): 2750-1469P.txt file - cDNA_ID_3046944; gDNA_ID_1621174; Annot_ID_174096
agaggaaccatatatcaaggtaacatgttagaaatacctaacattaaagaaatgagacgttgagtgatatatgaataatatggtctaatccacttttgttttgaattgaaaagccaaaataattacaattaatatataattgtttaacatttaaaattcaatgtatcatttcttaaaattatttgtagctgagacgaattttctttccagatccctatgacaactttaggtgtactgttgatggataaatcaggaagacgaccattacttctagtaagaaaaaacaagtgactaacatttttttataatgttattagtcaaatacaaagtaatttttacaagtaccttttctcactatattaaaaataaagtttttaaagaatttatgttataactgtagttccaacttattattgtttttttatcttttattattattattatacattggtggataattatatattgcctccctagtccctatatatatgtcaatatgtatatgttgaaagaattacatataatgaatttaatattttatctcttcagatttctgctactggaacatgtatcgggtgtttcctcgtcggtttatcattttcattacaggttctctccttatttatattttaaaataatatcttgattttatctatttttaacatattatgttttagtatattaatatcagtataaaaattgaatattttttgtctacagtggtgccatatgactttattgttaccataattataattttttcttctaatagagatttaatatattttctcgatctatgtctagatctagatgataaatatctagaaatattaatttttattgtttgattgtatattaatattaaaacttctcaagtagttgcatatatgcttcaaaatgtttataatttcatattatgtactataatttttgggttcatcctgttgtagtttgtaaagcaattgagtggagatgcttcatatctagcacttacaggcgttttggtaagtttgacgactaaaatctagatttcctttttttttatcctcaatttgaaaagtttgaaaatagttgatatgaatatgatagttttggcatactgaaacgttgctgtttgaaagtgggaatgactgtaccaataagatggtgcatgaaaaaaatagaagaactgatatacacatctatatcatcaaaatacgtttatttttcctgtaactcgttctgaaagaactatatagtagacgtgtttgagttgaaggaattttacgatgaatgacttgctaaaacaaatttccgaatactatgtcggtgaggaaaaactactagaaaagaacaaataatatcattattgttattaacaagtatttcgtggcttctgggatagcgaaccaactattggatgaaattagaacccacacacatactttgaaagatcgtagacgtccataaatgataaatttatcttattttttcaggtgtacaccggatcattttcattagggatgggtgggattccttgggtcattatgtcagaggtaagtaacattcataaaaattctttggttttaaacatactcttatacttaataatccgatcgatgtcttaagaaatattaaactttatatcataaacctacggtttagtattaaaattaaataataaattatttaactctcatatggttgtatgtggtatgattttgatcagtgtatataaattatgttcctttatgatttatttattgattctttgtttatataacattttaattcaatttagttggtgcgtagatattaattttatgttttatatgataaagatatttccaatagacataaaaggatcagccggaagcctcgtgactgttgttagctgggtcggatcatggattatatcttttacatttaactttctaatgaattggaatccggcaggtataaaatttgtttaaattttgcttttatcaataaattttgttctttatctaatagtggcacaagttttaaattttcaggaacgttttatgttttcgctactgtttgtggggctactgttatttttgtagcaaaactcgtaccagaaaccaaaggtcgcacacttgaggaaatccaatattcgattggttatgtagaattgtaatgtatagtagttgattacgagaatatcagtccctaattataacgattaaaagtaagattttttatttttcttctttccttttggtataatcgtatcatcctttttgcttagtgaatttgaataaatggtgttgtttttggttaccaaatatcggagaacataattgaaggtgtcgaggaaaaaaatcgaggttatgacgagtttacaacttctaaagacagtgaaagatattcgaagtttttttggacatatatgttgggttctacaaaaaaattataaaatatttctttgagatagttagaccgcttacaaaaatgttatgtatggaggtcaattttgatttcatggatgagtgcaaaaaatcaattttaaaaaatgattgtttgacaaatatccattcaaaatatactaactaagggattagatcacgatattaatgacatattcttgttttccattttttcctttaacacacacaaaccaaaaaaaaaattaaaaaaaaattttaaaaaaatagtcatttttcctctttttatatctaaaaacaagaaagaaaaccaattaaaaagaagtgacagagattgaagtgtgaagccatctgacgtgggacttatcttacgttctcttctaatctctacaggtcatctttctcggtggcacctttattcaccaagcaaaacaccgcttctttcgatcatctatctctttcccattttcttttcttgacttttttttctctctcttcttgttctattataaacaaaaaatgtgtaataattattcatcaatcctcagaataatacaaataggggagtaggtatctatcttgtcaccctctctctctctctcttgttaccaagatg

SEQ ID NO: 31893 - DNA, 3003 bp, Unknown
  misc_feature (1)..( 3003): 2750-1469P.txt file - cDNA_ID_3046948; gDNA_ID_1621174; Annot_ID_174095
tgtttagacccatttgcaccaaagcagttaatgcccaacgactagtgatttgggtaatcaattgctttgtatgttgaatcatatctttcttttttaggttagatttttttttttcttagtcaacatgaataatcagattatataccctaaattttttagaaattgctacactataatttcattcaccctctttattctagctaatcagaagctatcccctaatttttaaaaaatatatttaattattattgaatttgctgttcaccatttaaaaaaatgtactccctctagtcaatgtgttctcaactatattacatgcattaataaagacttaaagagtgactaattcgaaatcttgtcagattattgaagtaagagttttattacgtcgttgttagtatacagattatataacaaacaataaaatgtggttcccgtgtaaagataattataagttataaccttatattagacgacaaaaaaaaaaatgttataaccttatattatttgagaagttacaaaaaaagattaaataaatatggacgaacaagagaaactatatctgtatatagtacttaagttataaccctataactcacacattctttcagtagcaatgagtttaatcaaaatgattccttagacttgtatttatccactcacacggtttagtaatatattaaatgaaaaaaagctctaaaaggaagttgctcctatatatcttattcttcttttatatggttttacaaattcataaaattcaccaaaatgacagtaccatgcatataccaaccaccctacgatcaaacagcaaggctaaaacataactgtaagtgttttcactattttgtttcatgttttcaccctcttggttacgaaggcaactatgccaaaacttattagtaaactttgattaactgacttttgttgagaccaaagaacagttccaaatcttgcgtctacccgtctccaattatttaaagaatattttgtcagagttgcacgtttttacgaacaccatttcattaatataactatatgttcttttaaaataaaggccaataatttcaccaaaaaacttaaaaataaaagccaactactgtttttttgtcctacactcctacttgatttgtttttcgtcctttgttaattacccacgatatcttcaagcctttttaaaaaaaaagtgtctaaaacttctcaagatcctatataaatgtatgaagagttttgaacttagtacttgtcacaaatataagtgacaatatcctcttaagtctcttactctatctctctctttaactgtatcttaaacaaaaagaaagagtatgatcatcagaagaaaaaagaaacaacaacaatggagagacaaaagagcatggaagccagtttactcaggaagagtctcagcataagagaaaggaaacacccaaatgaagatggttaccctgaatccagtttactcagaaagtgttcaagcattttatttaacaccttctaggcgtgaaatgaaagatctaaatcaacaggggtcaacttaactagcattgagctcttctctaagtgatgagactatgcaactatatatcatgaatcaaacattaaacaccctaatctagcctaacgatcacctatgaatgagactactcaattattatgacaattaaaatacaaaatgtaagaaaactaaagattatcaataaattctaaaacaattgaataaatgttagtgatgttagcccaaaagagtttagatctaagaggctactgaaagtaagagcaagacggctactttaggtaatgttttgagtgaactttgctttgtattatttcacttaatctttaggttacaacatggttcccttttatagctaaacaatgctagggtttcaatgattgtaaactgacagctgtctctgtcttatcaagcttcggaggtcaccaaacaaccaaatctgttctttgtgttgattggatccgtacagacgctcctcttctctgtcttcactctgatttgttttcttgcacaggtggtggtcttgtctgttgagaagaggaagaacacttgttgggcttcgttgttgtgttggttgtgttgtcattgggcctgtttggtgagtggcccaataaccattttcctttgttaagctgagcgacgtcgttttctttctttgactctttagctgaacttgagctctgcttcgatctcatttcagatcttggagctgttgatggcggagcagtggagctcttgctaatagctactacaactaaccataagtgaaaactatatatgaaaagcttaggattttagttcttatatgatagtatttatatgaaaatataagtgtatccggatcgaccgattcagattgggcaaacccttaaaggagaagtagataaatgattgatcgtctggtcgattaccattataaatctcatgaaatacgtatgtctttcctctttttcgttgaaggactaacttttttcaagagagatttacccgttcgattgctactggtcttagtttcttcttactcgaactcgttattctcttcttggttctttgcttgttcccatctatagagtgtgtgcttcagatagtttcatagacctattaaaagataatatatatttgcaatgcatatgctctaggatcttaaattcaaatcaaaactaaaaatacaaaaaaagaaaagaaaaaacaaaaaaaagaagacataaacctagttgtttaaaccactaaaatacaaacgcataaacttactacacatgaaaatgaaacgactacatacgactgactactttgcatatatatatttgtgaattactcttcactttttctctatatataataacaacttgaagacaaagacaaaataataaaataaccttatctcttctctatatattagttcttgagatctctccaacaactctactttgtctttactcaagtatttcactaagaaagatagaatcacaaaaaggaaagagaaaatg

SEQ ID NO: 31894 - DNA, 3003 bp, Unknown; identical to SEQ ID NO: 17557
  misc_feature (1)..( 3003): 2750-1469P.txt file - cDNA_ID_3046955; gDNA_ID_1621174; Annot_ID_174089

SEQ ID NO: 31895 - DNA, 3000 bp, Unknown; identical to SEQ ID NO: 7923
  misc_feature (1)..( 3000): 2750-1469P.txt file - cDNA_ID_3046969; gDNA_ID_1621174; Annot_ID_174076

SEQ ID NO: 31896 - DNA, 3003 bp, Unknown; identical to SEQ ID NO: 17383
  misc_feature (1)..( 3003): 2750-1469P.txt file - cDNA_ID_3047013; gDNA_ID_1621175; Annot_ID_174131

SEQ ID NO: 31897 - DNA, 3000 bp, Unknown; identical to SEQ ID NO: 7947
  misc_feature (1)..( 3000): 2750-1469P.txt file - cDNA_ID_3047017; gDNA_ID_1621175; Annot_ID_174122

SEQ ID NO: 31898 - DNA, 3000 bp, Unknown; identical to SEQ ID NO: 7948
  misc_feature (1)..( 3000): 2750-1469P.txt file - cDNA_ID_3047025; gDNA_ID_1621175; Annot_ID_174120

SEQ ID NO: 31899 - DNA, 3003 bp, Unknown
  misc_feature (1)..( 3003): 2750-1469P.txt file - cDNA_ID_3047032; gDNA_ID_1621176; Annot_ID_57343
tgttttgtagtttgagcctttttgtctatgttaatttctctgtaattcgtccatggaagttgaaaacttaggttctgatgtttatggttagatttagttctgaatctctgaagttgatgcataataatgtattttgaagtactttgaaatgaattgtgagaagactctcttcccttgatctggctattgactcttctttaagttgtttcatcttttgttagaaattgttaacatgagcattaagtttagaatgattgtaattataagtttgtgtttatttttatgtgtagaggtacgcggattaagacccgcaaaaggaatattgctgctcctctcgaccctgctgctttttctgatgcactagttcagatttatctggataatgctggtgatctggtactttttttttcgtgttttaagtatttatttatctgtttttatttgcttgtaaaatgtcgtgcaccttaacttatgactttgtttttgttttgtcttaggaacttgttgccagaagtttagagtcatctgatcttaatttctcaagatacggtgatattttctttgaggtaaattctccatatatcaatactgtctcagctatcttctattgcctgtgtattttttgttttcttgtagcaaggggctttttgttttgcttgtctttccgagatttaataattgatggatctcttttattatataaggttgttttcattggaggacgtactcaaactggttcagtgaaatctgatgaaggggaacgccacccttactctataatcgactgtgaaccaaagcgtgaagctattttaccatcagttgtatacatacagaaaattttgcggaggaaagccttccttattaagaaccttgagaatgttacacggagattcttacagtcactggagctttttgaggagaatgagaggaagaagcttgcaatattcacagcacttgcattttcacagaagctctcaggattacctgcagagactgtcttccagccattgcttaaggatactcttgttgccaaagggatagttctcaattttgtaacagacttcttcaatgaatatttggttgagaacagtcttgatgacttgatttctattctgaggcgtggcaagatggatgacaaactcttggagttcctgccacccacaaagcggactacagaaagttttgccgagcatttcacgtgagttttaatttcttgaagtttgctgcattcaatagtataatgttggttctttttttacttgttgtagtttccttgctcttctgtttacctgcgtttctctaaattttagtcgcttaatactgatatgattgccatttctcattgataagattaaattagtgaaaatgcttctatataggttaacttttgtcactagtttgttgtgttcaacaattctcagttacttctgattctgtattcgattatcacttgtcttttatctctgctttcttattgtatatgtaaaattgatatatctgctatacttttccttctgattttaagtaaggcaggattgacagctctggtagagtacaatgaaaggaaaatatttgaggtgaagctgaaggaaatcaaagcggtccttacgagccaagtgacagaggaaataaacgtagatgaagtgactgaaatggtgaagcaacaggtgaaagatgcaaagctgccagagactgaggttgtgcatgtgatctgggatgggataatgaatgctgttcaatggtctgggaaaaaccagcagcagaattcgaatgctgtattacgccaagtgagttgattttctattttattttgaagcaagattatgttgttttgttcaaagctaagctaagctagccgctgttttgtggtaggtgaaaacatgggcaccccttctgaacacgctgtgtagcaccgggaacatggagatggaactgatgtataaagtacagatgcaatgctatgaggatgcaaagctgatgaaagtgtttcctgaggtagtgagatctctgtatgaactggatgtgcttgcggaagacaccattctgcactggtatcgcaaagggaccaaccctaagggcaggtactattttcgagtttttcacaaaaacaaggttaataatagtattctcttagtaacatatatgtaataatggtttgtgttggttttgcattgcaggcaaacgtttgtgaagggattggaaccgtttgtgaattggctcgaagaggccgaagaagaggagtgagtgagacgctctgcttcttgttttctctttttactctcttctaataaaagaaagacaatattttacttctcttaacgcaaaattcagatgctctacattgttggtgacttggtgtgatctcttttttgaatgaataagtacttctttagttgattatttgttggttttggttaacctctttgtgaggtaatacaggaatgtcatcttgaaaaatactaaccaaaaaataaaaaatagagaatataaaaccttatccaaaagtagggagattgtgttatttaaaagggaaccacagaaaaaaataggcgaggaaagaccattaagccgttggccacacaatcagatatcataatggaaatacactccgatgactacttcttccttcctcctccctgcttctcctccctcagccgcctttctccggcggcgcttcttccgccactcctggctttcctctaagatccaccaccgtcttccccaaggtacattactactcttctctatttcacctgtcaccacttctctgatctttggattattctggaatcttcgttttatgtgatcttgttacaaaaagtttccattacgattccatgttttaacccttaagttcaaaattgtggtacaattctatctcataggtgttttgagttgaatgataccttctgattttctggagccctattgattgtatatctcccactctactcttatcttactatgcaactatcctgtctttctttacttgcttcagttatg

SEQ ID NO: 31900 - DNA, 789 bp, Unknown; identical to SEQ ID NO: 7961
  misc_feature (1)..( 789): 2750-1469P.txt file - cDNA_ID_3047042; gDNA_ID_1621176; Annot_ID_174174

SEQ ID NO: 31901 - DNA, 3003 bp, Unknown
  misc_feature (1)..( 3003): 2750-1469P.txt file - cDNA_ID_3047046; gDNA_ID_1621176; Annot_ID_174173
gtttcgtctccgatttaatctttctacgtcttggtttatgaggtaagcttgtttcacaatctttcgttaggatttctgatgatgacgaatctaccaattttgtttctcgtggaaatttgattcagatctcatctcttccttcgattttgcattcttctgaatttgtttataatccttatagctattcattgttcttaattgaattagatttgtctcgaatctatgaattacggttgaaacgagacttgtttcgactgctagggtttcgtatgtatattcaggatgatttcgttatcactgctaatctgttttattgctcttttttcttgcagctcaaaggagaagcccactctcgggtatgtgaattttaaagcttttcgacatttatttgttttgtagtttgagcctttttgtctatgttaatttctctgtaattcgtccatggaagttgaaaacttaggttctgatgtttatggttagatttagttctgaatctctgaagttgatgcataataatgtattttgaagtactttgaaatgaattgtgagaagactctcttcccttgatctggctattgactcttctttaagttgtttcatcttttgttagaaattgttaacatgagcattaagtttagaatgattgtaattataagtttgtgtttatttttatgtgtagaggtacgcggattaagacccgcaaaaggaatattgctgctcctctcgaccctgctgctttttctgatgcactagttcagatttatctggataatgctggtgatctggtactttttttttcgtgttttaagtatttatttatctgtttttatttgcttgtaaaatgtcgtgcaccttaacttatgactttgtttttgttttgtcttaggaacttgttgccagaagtttagagtcatctgatcttaatttctcaagatacggtgatattttctttgaggtaaattctccatatatcaatactgtctcagctatcttctattgcctgtgtattttttgttttcttgtagcaaggggctttttgttttgcttgtctttccgagatttaataattgatggatctcttttattatataaggttgttttcattggaggacgtactcaaactggttcagtgaaatctgatgaaggggaacgccacccttactctataatcgactgtgaaccaaagcgtgaagctattttaccatcagttgtatacatacagaaaattttgcggaggaaagccttccttattaagaaccttgagaatgttacacggagattcttacagtcactggagctttttgaggagaatgagaggaagaagcttgcaatattcacagcacttgcattttcacagaagctctcaggattacctgcagagactgtcttccagccattgcttaaggatactcttgttgccaaagggatagttctcaattttgtaacagacttcttcaatgaatatttggttgagaacagtcttgatgacttgatttctattctgaggcgtggcaagatggatgacaaactcttggagttcctgccacccacaaagcggactacagaaagttttgccgagcatttcacgtgagttttaatttcttgaagtttgctgcattcaatagtataatgttggttctttttttacttgttgtagtttccttgctcttctgtttacctgcgtttctctaaattttagtcgcttaatactgatatgattgccatttctcattgataagattaaattagtgaaaatgcttctatataggttaacttttgtcactagtttgttgtgttcaacaattctcagttacttctgattctgtattcgattatcacttgtcttttatctctgctttcttattgtatatgtaaaattgatatatctgctatacttttccttctgattttaagtaaggcaggattgacagctctggtagagtacaatgaaaggaaaatatttgaggtgaagctgaaggaaatcaaagcggtccttacgagccaagtgacagaggaaataaacgtagatgaagtgactgaaatggtgaagcaacaggtgaaagatgcaaagctgccagagactgaggttgtgcatgtgatctgggatgggataatgaatgctgttcaatggtctgggaaaaaccagcagcagaattcgaatgctgtattacgccaagtgagttgattttctattttattttgaagcaagattatgttgttttgttcaaagctaagctaagctagccgctgttttgtggtaggtgaaaacatgggcaccccttctgaacacgctgtgtagcaccgggaacatggagatggaactgatgtataaagtacagatgcaatgctatgaggatgcaaagctgatgaaagtgtttcctgaggtagtgagatctctgtatgaactggatgtgcttgcggaagacaccattctgcactggtatcgcaaagggaccaaccctaagggcaggtactattttcgagtttttcacaaaaacaaggttaataatagtattctcttagtaacatatatgtaataatggtttgtgttggttttgcattgcaggcaaacgtttgtgaagggattggaaccgtttgtgaattggctcgaagaggccgaagaagaggagtgagtgagacgctctgcttcttgttttctctttttactctcttctaataaaagaaagacaatattttacttctcttaacgcaaaattcagatgctctacattgttggtgacttggtgtgatctcttttttgaatgaataagtacttctttagttgattatttgttggttttggttaacctctttgtgaggtaatacaggaatgtcatcttgaaaaatactaaccaaaaaataaaaaatagagaatataaaaccttatccaaaagtagggagattgtgttatttaaaagggaaccacagaaaaaaataggcgaggaaagaccattaagccgttggccacacaatcagatatcataatggaaatacactccgatg

SEQ ID NO: 31902 - DNA, 3003 bp, Unknown
  misc_feature (1)..( 3003): 2750-1469P.txt file - cDNA_ID_3047050; gDNA_ID_1621176; Annot_ID_174172
cttttcatcagcagctaaaggccagtctttggaccatccattctcatatgcaaactctttcacatcttccaatcgattcttaatcagttcaatggcagctgctgcatccactggttcccaacctccaatggatatcttacgagaccagactttacttatcctttgaggcatatgctttgtctcattaggtataaactttgcacaatgttcttgatcaagatgattcttacactcttcagcgctagtgaacttgttcgaacaagaccgacacatccagaatctccatttcccctcttcccttgcaaaagtgagaacttgctccaacgcatctcgtccttcactaccatataacccctcaacataactcgtaagttccgcagtgcttactttcataaagttccgtttgatctcaacattcaaaccagcccaatacaacatcaatcctttaatgaaatcaggctcactcttccttgtatccacatcttctttttgttcacagttttttacaacaagtcgtgtcttggattcagcaattctcgactctgcaatcttgatcacagacaccattgctttctgttctttcttggtgaattctggatcctgcacattcactgaaagatgatacaaagtttcttttgctttgcgcacagatttcttgtaatacaccactgactgaatctgttgtgccaaagtgaagagtgaaatagccgccatcgatgacaaagcaggagctatggaaacgcattgtacagaacccaacaagtaagcaactttcacatcagtgttctctgtttttttcgctagctccttaaagatttgaccttgtagtgcattaacacacaccctgtcgttcccttggacgaaacgcaaatcttcaattatctccaacgccttgatgtaatctttcgcaaagtaggaatcgtaggcacgtttgaagagattttcgctgttagcatcttctagagtaggacgctccatgttggggaagagagtagaagctagtaacgcttctcagtgatctgatctttgcgttttcttggtatcgagagaggttttgttcgtgacgggagaaaacagaggagaagcgggaaaaaatcaacgagtaaggtattgaagaagatgtcacgtacgagccacgtgacagggtctttgtggaattgtgtcgaacacctgtgggcatcctccgtgtggagtaaatgacatagctttctcgatttaattggaccttcccagagtaaatttgggagtgtagaaaaatagaaaagcattcaaatttgggtgtgtagtgacttataagtggaattgtgttcatgtttgggatcaaattggtcatcccaataggctttggttttgaaagagcaacagaaggtgaaagcttcaaaggtatgtcaaaagaaaagattattggaacggtattgtgggtcgggttcggttaaaatccgatcgggtacggttgctttaagtagagaagtttaagagctaagaaggtaaaactaaaatattggttaggtttcggtttggatctcatcgggttcggatcaatctgggtataaaaattcaaaactgctaaatacttttaaaaatcaggtatcctttaaattcaggtatactcgaattcccgtaatttactcaaacactcaaaaaatttatgcaaatagtcgaaaattcatcaaaatacccaaaacttttacccaaatatccgaattttatctgaataaccggaattttgtctaaatatccaaaaacaaattataagtatctttgattaatatattgttaaaatttcatttgtgatgtcgatgtttaattaaatttattcggttaactataaaatagttaaattaaaatatgtaactccaaaactaccaagctttcatcaaaaaagattatttgccatgatacttgatgaaaaattcagaaaaaatcaatccaaaatagttacataacgcaccaaaaatcaaaactaagggtccattagatgttagattcacatattcaaaagaagtagtcataaaatagtaataaaatcgatattgttgtaggctctgtcttgtcgtttcaagatcgttgctctgttttcaatattattgctctgtttttcttgttttgtttttgagatatatggagataaactggatagcaagaaatataatgcatatcaagtattgtgaatcgtcaacgtcctttaatgaagtaaagtctgcccgaaaaatattcgcagtgtgtagatttaagggtaaagaaactttatcccagttgtgatagacttgtaaagagtttttcccttactaacttttcacataactccattgtattcagttggttaattaatttgaatttttcggaaaagaaatcgttattttgttatagtaaaattatttttgacaaaaatcaaactgaatctaaatcgaataccaaattgatccaatacaaaaatcaaattaaaccaaaaccaaattataaaagaaaattatcaacaaaaaaaatatcgttttagtttttataatactactgataaagcaaagaccaaaaaaaaataaaaaaaaaataaaaatacatcaaatttccatcttttaagtatatcaatatttgtttaaatatgttatccattcgcaagctagtttccaatagtttatttttatttttggtcggtctttcacctatggaaccaaatgaacaatggtctgcacatccaatagcctctctacgctcgcagtcttcaagttcatcaatagtgaagtaaaaacaccactgctagaatagataggaaaatctttttgaaattttatgaccttgttgctgcgatgaaaactggaatccttgttttttctttttgccaaggatccaaaatgttgggctcgttactaattgtaagacctaattatcatgttaatgatatataccctttcgcaacaacttggtcggtctttcatggcatatttcaatattatcttagacaacaattaaaatagaaaaacaattatcagacaaattaaatgaatg

SEQ ID NO: 31903 - DNA, 3000 bp, Unknown; identical to SEQ ID NO: 7958
  misc_feature (1)..( 3000): 2750-1469P.txt file - cDNA_ID_3047054; gDNA_ID_1621176; Annot_ID_174171

SEQ ID NO: 31904 - DNA, 3000 bp, Unknown
  misc_feature (1)..( 3000): 2750-1469P.txt file - cDNA_ID_3047062; gDNA_ID_1621176; Annot_ID_174169
ttagaaatagatgagaagccgtggaaaagaagaatgaagatagcagaagatatcgccactgctttagcttaccttcacactgccttccctaggcccctcgtatatatgattttgtctcatcggaatatcttattggatgaagatggtgtcgcgaagctgactgatttctctcactgcgtctcaatcccagaaggagaaacatttgtccgggttgaggcagaagatggattctatagttactttgctgataattacgttaacagtgttgtagtctcagagaaaacagatgtctttgcctttggaatctttatgggtctaacgcttctattaggatacaaaagctatttcgagcattatcgaggagaagaaaaagaaagtgaagaagaagaccctgaagatactgatgaattagattattttaacaagaaaagacatgctcgatattggctgtcaaaattaaagaaagaccgaccaatggaagagattgcagatcgaaagatgataaaaaatatgggtcaaatcttagaacaagagctctttcaaatgaaagctttccggatgctctcactgagatgcatgggtcctagtgaagaagttccaacgatggtggaggtggccaaagaactaaagaagatccaaaaatctcttaataaagattcttatcgaggagaagaagaagaagaagaaagtgaagatgaatttaacgactcttcttctctttcttcaggtcaaacccaattcgactctgcccaagacatttcttccacagtggtcctctcaaaccaaacttaaacacaaaggcattgctaccaagtattgcctgccaggtatttcgtgaaatgtttcaatgggttatgttgagctggtttcgttttttcaggaaaaatcgaacaatgtgctgaaaataagttgaattcatgttcgtattaaaacattatcaagtttcatttttgttgttgtatttataaatagtgctacgttacttttgattcattatattgtcccttaagagtttgtgtatgtgtgtttgggttttgatcgatccgtctgtttttgttaatgtaataattttatcaagagatgttatgatatatgtgaatcttgtattgatgattgtctactcgtgtattataagggaaagtctcccaagtcaataacaattctaaagtttacattgtgagttgggaaacatggttcattgacgtaagtttgcaatttccagcaactacatctgactatcaatattgaactgtcaactccactactgttgggtttcttatatatggatacacaatagtttaaacatacttatataaatcatatctaaccaagtctcgagcttccagaagtttctaggtgacgcacaacacctcaacaagattagttccataacatgcaatttaaactttacgaaagttaaaaattctccgatccaaaacccatattttgcgaaatattactaaggcaaaaaaaaaaaaaatcatcagaatgtccaaaataaagaatgatgttcataaaacacatcaagctcaaatcatgactagcgcttagagggagacctccaactaaagttaaacattgttcacgagcatgaattcaattgttgaaaacctcctcaaattttcaatcccatgcatgagttagttagtatctaattatatatagaatattcattcacttttttttccctatcaatcagaatctatcgcctaattaaaaaaataaaaaattaaacgcatttaattataaaatcaaaccctaatcacttttttataaaatctaaaaaatcatttaaaatcattttacagttattgtaaaatctaaagatttgggttactctagtaaacattttccatgagatgttaaatgagttattcttgcaaagagtagagtgcagtctgagtaattttcacaatatttatatgtaatgttgttgacttgaagaaataaagttttgagtttatttttgtcctatatcatttggttctaaatgttattgggattgttaatgttttgcgaaagatgttagcttttttctttcgtatttttcttgttaactcatgtgtttaaacatggaataaaacaacataacataagacatcaaaacttcgaaaacaaaccttttttcttaagtaataaggttaaaataacctcatacacttgagaataagattgcaatggacattcgatatggctgtaacaacgattaaggaagtgccaagaattattgttttacatttgacgaaataactttttcagtcttcacacatatattataactactgttcatccgttgcataatttggagattgttatcctaatatttaaagtttcttttttattgattcatataagtatcaagtattcatgtatccttgtcctctctactttcaatggtcatgggatccatgtaacttgcattattgtgcactgagagattttctaagatgacccaacgttcattattttatgaaagggtaacatgatttagttatgagggtaggttttagtaatatctgtctttattttaacaaattataaatcatcttgtatttagaaagctattaagaaaaaacttgtttgcatcgattgtgtttttattgatttatcgatttatcgtgttagatataaataatgttgagtaggtagcagttatctgtcagatttaatatttactattgttttgttgcaataatgtaacaactatttattgacccattaaaactctactattaaatagaaagtcttttgcaatgtaaatcgtgcttcgttgatgttggcacgttatcaaaatcaaatgatgaatagtttagtgattaccatgtcagatctaaactttcttttactaatataataaaaaaacatataattaaccattaaatgagtactaaataaaataactagtattgtttttttcacttatctccgtcacatgagctaagagaaatcagagaccaaaagttcaacgagaaattctcactagatctcttagtaaccatg

SEQ ID NO: 31905 - DNA, 3003 bp, Unknown
  misc_feature (1)..( 3003): 2750-1469P.txt file - cDNA_ID_3047084; gDNA_ID_2926130; Annot_ID_196856
tcacattgaattcctgtaagaacaaaagacagtttagagactattattacaggttttatactaaatactttaaaaacgattgtaaatcatgtttaacacttttaaaagcttttaaaatcccttataaatcattcaatgtcacttacttatgctttaaaaacgattgtaaaccatgcagacacttttaaaatcccttgtaaatcattctatgacacttacttatgctttaaaaacaattgtaaatcatgtttaacccttctaaaagcttttaaaatcccttgtaaatcattctattcaacttacttatgcttaaaaaacgattgtaaatcatgtttaaccccttagaaaaggttttaaaatcccttgtaaatcattctattcaacttacttatgcttaaaaaacgattgtaaatcatgtttaacccttagaaaagattttaaaatcccttgtaaattattctatcccacttacttatgttttaaaatcgattgtaaaccatgcaaacacttctaaaatcccttgtaaatcgttttaagacacttacttatgcttttaaaatcccatgtaaacgtgtttaacacttctttaagcttttaaaatcccttgtaaattattctatgttagttacttatgcctaaaaacggttgtaaaccatgcataccctttttaaaatcccttgtaaatcattatctgccactaacttatgcttcttaaataattgttaatgaagtaaaccccttttaaaagcttttaaaatcccttgtaaattatctataacacttacttatgttttaaaaatgattgtaaactacgcaaacagttatgcaaatgccttgtaaatcattctacgacagttaattaagctttaaaaacgattgtaaaactttattacctgttgtgagatagaactctctcaaggagaaacagataggttgagaatcaactctaaaccaaagagttgatccttttgttttcactctctgctgcatgagatagtgaaagattttcccagaaaatctgattcccttcttagccttcatttttggtcccaattcaactagaagaccaagaaacgaacttctaatcttctgaaataaacactcgcctaaagcttcctctactttactaactaaattccaatccaagtattgttgaacggttcccagtgcaatagattcctcaccttctctgtagatctgttcaggcaatgtaaggatttcactctctgaatccatctgcaaaacatgttatgaaacatcgtcagatctactataaaatcgactataaaatcgattataaaaacggttaccgtcggatctatcgatatctctggggattgtttgcgtcgtagagaaatgatctgaatccgtcagcgaagaacagatttatcggagaggaaattcgtcagcgattttggggtttctcggagagaaaatttgtcggcgattttgagtgaaatcggagaggaaattcgttggcgattttgagtgaaatcggagaggaaattcgtcggcaattttgagtgaaatcggagaggaaattcgccggcgattttgagtgaaatcggataggaaaattcgttggccaaaacgaagaagtttgtgccaaaacgaattgtattgtgaaacgaatgtgaaacctaatcattcagtaagggtaagacagtcatttgccatattagaaagggtagttttaaaaatggccttcaggaaaggacatttttacaaaaggttattagaataagggcagttttgcaaatctcccaattaaatattaaagtattttgaatcaatggcatttttgtaattaatctaaaccggaaggatattttttggtttatattttatttctctttcctatttacgtaaataacatatttttatgtataaattcttaatattctgtttatccatgtatatatttttaactcaccctatagttttctaagtaatttaagtattttggttacatttggttatattttggtaaaatataactaatatatttttggataaactaatcaggcatctcggttagatttaggtatagatgagtaaaaaactcgaactcgacctgaacccaaaaatattttgagtatttttgattatttttcaattcttactaaaataactaaatcgatccaaactcaaaccaaaaccgaaccaaaattttagaatacatgaatggtttttaacttcatacctaaatagatccgatactcaaaaaaaaaaagaaccgaacagatatgagtacccgaatatctacacctgcccagtattattattattattttttttgaacaaacaccggtactattattttaccagctaatttttctccctttaagaacgttttggacctattggtctattggatacaaaactattgtattcattttaaatttttaatgggtcttctttgttaataaaggcccattaaatatactatccaggcccatttagtccaactacttattacactgttgattaatcgccgtttagatattttgcattggagagaatcttcaccgttcagaaaactgaagatcgaagatcaccaaaaccggccaaaaagtatagtacacgtccgaagattctagatccatcatgccatttgcattgcatggcctaactctcgtagaaaacccaaacaaattctcccccacacaaataatgggacaaaaaccaaattaaaccaaattgtttccctattgaagaaaataaaatcttccacaaattttatgaatttttcataaagtcggcaacttcacacgagtccaggtcgattcttaaaacaatgatctttaaccatccacgtgtcaaaatcccaccttagcttacctcatttgttctattccaaatacctattctatcccttggatcttgacttatatgttcataagaaagtgtaccagataagggtatatacgtcatttacagtccagctcaacggttataaaatcctaattcgtgaggtttctctgaagaacaaacacaaaaatg

SEQ ID NO: 31906 - DNA, 3003 bp, Unknown; identical to SEQ ID NO: 31905
  misc_feature (1)..( 3003): 2750-1469P.txt file - cDNA_ID_3047084; gDNA_ID_2926130; Annot_ID_138716

SEQ ID NO: 31907 - DNA, 3000 bp, Unknown
  misc_feature (1)..( 3000): 2750-1469P.txt file - cDNA_ID_3047084; gDNA_ID_1621177; Annot_ID_57358
cattgaattcctgtaagaacaaaagacagtttagagactattattacaggttttatactaaatactttaaaaacgattgtaaatcatgtttaacacttttaaaagcttttaaaatcccttataaatcattcaatgtcacttacttatgctttaaaaacgattgtaaaccatgcagacacttttaaaatcccttgtaaatcattctatgacacttacttatgctttaaaaacaattgtaaatcatgtttaacccttctaaaagcttttaaaatcccttgtaaatcattctattcaacttacttatgcttaaaaaacgattgtaaatcatgtttaaccccttagaaaaggttttaaaatcccttgtaaatcattctattcaacttacttatgcttaaaaaacgattgtaaatcatgtttaacccttagaaaagattttaaaatcccttgtaaattattctatcccacttacttatgttttaaaatcgattgtaaaccatgcaaacacttctaaaatcccttgtaaatcgttttaagacacttacttatgcttttaaaatcccatgtaaacgtgtttaacacttctttaagcttttaaaatcccttgtaaattattctatgttagttacttatgcctaaaaacggttgtaaaccatgcataccctttttaaaatcccttgtaaatcattatctgccactaacttatgcttcttaaataattgttaatgaagtaaaccccttttaaaagcttttaaaatcccttgtaaattatctataacacttacttatgttttaaaaatgattgtaaactacgcaaacagttatgcaaatgccttgtaaatcattctacgacagttaattaagctttaaaaacgattgtaaaactttattacctgttgtgagatagaactctctcaaggagaaacagataggttgagaatcaactctaaaccaaagagttgatccttttgttttcactctctgctgcatgagatagtgaaagattttcccagaaaatctgattcccttcttagccttcatttttggtcccaattcaactagaagaccaagaaacgaacttctaatcttctgaaataaacactcgcctaaagcttcctctactttactaactaaattccaatccaagtattgttgaacggttcccagtgcaatagattcctcaccttctctgtagatctgttcaggcaatgtaaggatttcactctctgaatccatctgcaaaacatgttatgaaacatcgtcagatctactataaaatcgactataaaatcgattataaaaacggttaccgtcggatctatcgatatctctggggattgtttgcgtcgtagagaaatgatctgaatccgtcagcgaagaacagatttatcggagaggaaattcgtcagcgattttggggtttctcggagagaaaatttgtcggcgattttgagtgaaatcggagaggaaattcgttggcgattttgagtgaaatcggagaggaaattcgtcggcaattttgagtgaaatcggagaggaaattcgccggcgattttgagtgaaatcggataggaaaattcgttggccaaaacgaagaagtttgtgccaaaacgaattgtattgtgaaacgaatgtgaaacctaatcattcagtaagggtaagacagtcatttgccatattagaaagggtagttttaaaaatggccttcaggaaaggacatttttacaaaaggttattagaataagggcagttttgcaaatctcccaattaaatattaaagtattttgaatcaatggcatttttgtaattaatctaaaccggaaggatattttttggtttatattttatttctctttcctatttacgtaaataacatatttttatgtataaattcttaatattctgtttatccatgtatatatttttaactcaccctatagttttctaagtaatttaagtattttggttacatttggttatattttggtaaaatataactaatatatttttggataaactaatcaggcatctcggttagatttaggtatagatgagtaaaaaactcgaactcgacctgaacccaaaaatattttgagtatttttgattatttttcaattcttactaaaataactaaatcgatccaaactcaaaccaaaaccgaaccaaaattttagaatacatgaatggtttttaacttcatacctaaatagatccgatactcaaaaaaaaaaagaaccgaacagatatgagtacccgaatatctacacctgcccagtattattattattattttttttgaacaaacaccggtactattattttaccagctaatttttctccctttaagaacgttttggacctattggtctattggatacaaaactattgtattcattttaaatttttaatgggtcttctttgttaataaaggcccattaaatatactatccaggcccatttagtccaactacttattacactgttgattaatcgccgtttagatattttgcattggagagaatcttcaccgttcagaaaactgaagatcgaagatcaccaaaaccggccaaaaagtatagtacacgtccgaagattctagatccatcatgccatttgcattgcatggcctaactctcgtagaaaacccaaacaaattctcccccacacaaataatgggacaaaaaccaaattaaaccaaattgtttccctattgaagaaaataaaatcttccacaaattttatgaatttttcataaagtcggcaacttcacacgagtccaggtcgattcttaaaacaatgatctttaaccatccacgtgtcaaaatcccaccttagcttacctcatttgttctattccaaatacctattctatcccttggatcttgacttatatgttcataagaaagtgtaccagataagggtatatacgtcatttacagtccagctcaacggttataaaatcctaattcgtgaggtttctctgaagaacaaacacaaaaatg

SEQ ID NO: 31908 - DNA, 3000 bp, Unknown; identical to SEQ ID NO: 31907
  misc_feature (1)..( 3000): 2750-1469P.txt file - cDNA_ID_3047084; gDNA_ID_1621177; Annot_ID_174197

SEQ ID NO: 31909 - DNA, 3000 bp, Unknown; identical to SEQ ID NO: 7966
  misc_feature (1)..( 3000): 2750-1469P.txt file - cDNA_ID_3047087; gDNA_ID_1621177; Annot_ID_174194

SEQ ID NO: 31910 - DNA, 3000 bp, Unknown; identical to SEQ ID NO: 7972
  misc_feature (1)..( 3000): 2750-1469P.txt file - cDNA_ID_3047132; gDNA_ID_1621178; Annot_ID_174217

SEQ ID NO: 31911 - DNA, 3000 bp, Unknown; identical to SEQ ID NO: 7986
  misc_feature (1)..( 3000): 2750-1469P.txt file - cDNA_ID_3047150; gDNA_ID_1621179; Annot_ID_174256

SEQ ID NO: 31912 - DNA, 3000 bp, Unknown; identical to SEQ ID NO: 7985
  misc_feature (1)..( 3000): 2750-1469P.txt file - cDNA_ID_3047158; gDNA_ID_1621179; Annot_ID_174252

SEQ ID NO: 31913 - DNA, 3003 bp, Unknown
  misc_feature (1)..( 3003): 2750-1469P.txt file - cDNA_ID_3047215; gDNA_ID_1621182; Annot_ID_174319
ccagagctccgggaatatctgtatcaatacgtatttcacaaatcgatgttatgggagaatcaagatcaaaagtatgcagaaaatcataagcgtttgaatcacacctcagaacttgttcaggggctttgtctacgcgttgctggaaattaacccaattctttttatcagcatctccctgtacaagcatggaaaatgagaatcatttgaggccttttgaagtttgcaaaaatggccatgacaagtgaactgtttacctcaaaatcgttcattagcgatttcatttggtcgtcaacttctctctttgagaccaaaggtttagctacttcatcatctcctgacatctcagtatcatactcactttcatcctcattgatcaatacaaattctttccataaactcttactcgcaactgcacaaaccgaaaaattcatatcactagttatacaaagtttcagggctaggaaaagtttgtgaattcagctaacctttctgcttttcagttggagcaaccccattattgacagggcctgagtcagatgtttcgctaaccgttcgaagctgttggcattcggttttatgacccaagcgccaatgcagggcctggaaattagaaacaacacagattgttcaaatttgctcaaaagagcagaatctagcggaacaaaagaaactacgatgcacatatgcacacacctggtgtttcggtgaacagtatcgagcatttttgcagccgctacatagtttatctcctttccatgttccacaccaagtgcaaagcggagctaaagtgaaacaaacaatatcaagaattgacaattaaaagagaattctcggcattcagtcaaacccatcaatcagttcataatacctccatgacccaatggcttgtctgttccatcgtgctttggagcctcactcgagtaaaaaggattagctcgaggcaattggcaacggaaaaccttcgtacttcaggaacaaaaaaaacagtactttagtgtaacaacccacttggagaggagacaaacaatacaaagatgcaatatatagtaagaggtttctttctacctccgcatagccttctctggggcacgtttccattgttcatgttgatcacgaaggagacaagacatagatggacacatgaagagaaacaatgtccgatgaaaagctgattccttgtctgttaaaggagcataaagctgccaaatttccacaacaaatttcataaataaaccgacaaaaaacatgcaagaaacaacaaaatagtttgtatgaaacttacttgaagtacaaattgcataggttcttcacatagatcacatagaattgacttccctgatggtaaattaactggatccaaccatgcctatattgacaaatatcaacccaaagaatcaatacctaagaacataaagaagaaacagtttttgattgcacaaattgaaagatgttttaacttagtaccggaacaccaccagctaaattagggaacagttgacgaagatttgaccatgcgaatttaggactctcaacgaaacctaacatcacaggttcataatcttcatcatcttcctcatcatcatcatcaaattcatccatatttataggttccaccgcagtttcatcatcgtcatcatcatcaagctgagttattcggaggcctttgaaatcatccatggagtctccgttgaagctactcatcgaatcttctgtgttgaatttgatgaaatgaagactgcataacagagcaaaggaattgaattctagggttttactctgtttcataaacctctcaaaagtatttggcaagaaacaacgcacaaatcataatctgttaatgggtctttcgcaaaatactaaactcactaatttttcaagatttagagctcaatactcagctaattacaaatcccagaattggtacgaacaaatgttaaaaatgagctcactagtcagtatcaacaagaatcaaaatccaaaagaaacttacaacaccaggcgatgatggagatgttcttcagatagcctttaaaggtcgaatcttcttctatcaatttaaacagcaaaattttgtaaacatctttcacgaagacgaagacgaagacgacgacgacgacgacgacgaaaggaaaacaaacgtcactctggcccaaaaacaaaccctagaatagacgatgtcgtttaacataggcctataatagactaagcccaataaagtaatataagcccataaaggtttctaaattggttacgaataaaagtataaccttatcccggacaaccttatccttaaaatctcaccggtactccaactcccgttcaccggagctctgactctctgtaagcgaagattctctgctctttagctaatttagtcgaatctctattatgggtctgatccagtttcttacgagaatctgatttctgattttataacttgatttctcgatttcaaatttgtgttcttgcaatcgatttttttgcaggtaaagaagaagggagaaatagataatgagcagtagaaacggcaatgagagattaagaacagtgtggacacctgaaatggatcagtatttcatcgagcttatggtggaacaagttagaaaaggcaacagatttgaagatcatttgtttagtaaacgagcttggaagttcatgtcttgttccttcactgccaagttcaagtttctttatggcaaagatgttttgaaaaacaggcataagacattgaggaacttgtttaaatctgtgaataatcttttgatagaagatggttttagttgggatgatactagacagatggttgttgctgataactgcgtttgggatgagtatcttaaggtgcgttttgcgttttgtttacttgtgattttgtgtcttcttctcagggattgatttgtttttgcttttgggttattgaagattcatcctgattcgagatcttttcggataaagtctataccttgttacaaagatctgtgcttggtttactcagatggaatg

SEQ ID NO: 31914 - DNA, 3000 bp, Unknown; identical to SEQ ID NO: 7998
  misc_feature (1)..( 3000): 2750-1469P.txt file - cDNA_ID_3047229; gDNA_ID_1621182; Annot_ID_174309

SEQ ID NO: 31915 - DNA, 3000 bp, Unknown
  misc_feature (1)..( 3000): 2750-1469P.txt file - cDNA_ID_3047250; gDNA_ID_1621183; Annot_ID_174341
taatataagacataaattgcttcagatgttgttgcagctgtataaataaactcaccagtggatcatgagtaatacctctcagcccccaagaaactttccagatcgggtcacgttgaggaaattttctaagtgaccgttcttgtttctcttcatcctccaaaacccaaaatcatttaccagagacgtcgtcagagcaaacccatgcaaattttccttcgtagttgaggaaaaatttgcaaagtaaattatcagccgctgattttcttattgtgttgaacttttcgtacctcacatcgaagctcataaggactttctcaacttcagaactatcatcgactccaaaaggtatactcgcttcataatacacttccccgttgatacatatactttgtattagtccctcggcggatagagggacatgtttaggggtattttgtgtcactctccatgattcttgaggtcccaaagtaaaaacaagaggatcttggtatctagagcatgagatgcacaagactttatacttaccctcgaccggatcatatcctaaagagctacattcaaatgcgacttttggtaaggtaacatgttgtctcatgattggattccaaactacaatatgccccaagaatctcccaaacatatcaagccatggaccgactgggaccattcgtgataatcaaatatgagagtgtctttcagataacgctccacatgtggataacatgatctgtccggattttcatgttggggcattgcgcagaaaatacgcttgtcacttgttttcacgcagaccaaaagacacaacctagttgaagactgactcgcgaacgacctgatgaaatctggatgagtggtgattgatgaccatagctaagagacccagtggaacctcgcagcagatttagcaggaagtctcaagagtatatcaggaattagatcaagaggaatcatctcgagaaacttacaaaaactctcatcttctttagattgtatacttacttccctatcttccgcctcttcctctactctatccattggcgtcgatccactagtttttttttttaaccctaatttttcaaccctaagtttttcaaaccattatagtagttgtcatctctggacaaaaggaacaagtcaatgcatcgatcaccgaaaaggaagcatcgtacaaagagaagaaaactgaagattaagaacatctctttctctttaacttgcatacatcatgttcaagaactacatcttagcaaatccaacgaccgaagacgaattgatcatggacactctagctagtgaccattgttttaaaaaccatactcaaaatgtattaaaaaaacaaataaaagaattttacatttggttgtatttgacaaaacatatcaacactttagattcttgcggtaagtcagaattcttaccagaagaatctaaaactttggttcactgattcatgagaactttgatccgaacaatatttacctagaaaactgatctcaccctcatcaatactgatcttgatgaaagtgaatcttacaaaaacaaaaaaataatgatagatttgcacttaattactgataagtagactaaaagaagaacgatgaaattatagcaaatcagcaacatgaccatcacggaactagttaatactaaaaagcatcaaagttggatttctaagtgatctaacaaacgcttttttaaagattaaattcgagatgaaaatatggatgaaaaagaattaaattgctaacataaattgaccaaaatcgtaagcattgatcatcacccatatcttcatctcaaatgaatccatataatcaacactctaacgtaaccagaaaacttgttatacttatttttgggtaaaagattataaaatttagatttccaagcaatctacgagcaaatttttaacggattaaatttgagatggccatatgggtaaccaatatataaattggtaacttaaattgaccaaaatcttaaatattagttacccaaacagccatctgaaatgaatccatgcatatgatcaactctctaatgtaacaagacaagtttatccactctaacgatagatagctccacaacgtcatcaacataattaacgaaagatagacgtcgatatctatctactgtgaaaccaaacatgagtattatgaatcaaaaagatccattaatgttaattcatactcatgtttgacttcacaacagagagatttcgacatctacctttatccatcggcgactcacttttgtttttctaaaccctaattttctgtctgggtctctctgtctttgacgtatttatagtacaaaaaaaattgttgcccaagaaaaaaaaaaaaaagaaaaacaaaccttctgaatccgacagaggctttaatctgttaccgttaaagtgttgtatgattccgttagaatctgcaactccgttaatattttttccgttttctttcagggaagagaaaaaaaaaacacagacctctcttttctctcttcatgttttcatcgatagtggaagagatcaagtgaaagaaaaacactcagatctggaaattcagcttcttagatctatgaattttcaaattcgttgatccatttttccgcttcaatcgtctccgatctgatttcatcagcttcgtaccgctccggtcatgaatccattctcttccggcacgcgtctcaggttaggaatcactttactccgatctccaactagtaatctgctttttctctattgcgactttgcgatacttccattttcgtgcgttttctagtgtctaaatccataatgtagcttgattcttctagtaatcggcaaattcaatcggaaattgacgattatcagaaaaatgttttggctgattgtgtgagattaggcatgttgtatgatagaatcctcttagcatttttgatgaagcttcgattctttataaattgagagtatgtaaatgtaaatgaattcatcattttaatgacaatttgtgttgcagcgacatg

SEQ ID NO: 31916 - DNA, 3000 bp, Unknown
  misc_feature (1)..( 3000): 2750-1469P.txt file - cDNA_ID_3047262; gDNA_ID_1621183; Annot_ID_57411
catgaagatatttccttaggatatccgaatttgcggttctatttataataggaattgattacgtcatgtgagtatttgcatattcttgattttacggaccaataactcgaaaatgggtccatagttactgtatatcgtttggtaataactgtgatcattaaaatcgtaatttgaataaaatgtgtatagtaacataaaatatcgcacgatggtctctgtatctcatgtattacattttaacatttacttagcgtggctgaaatttgggattgcagtgatggttgatttaccggttgttcgaaatgtaaaactaccatatgaatcttataagccactgcaatttacatgacgtatcacattcacatatattagagaaacttagattcactaggttaattagtgtttctaattacaaagtagaaaaaagtttgagatcatataacataaaatattgtagtcttttagtaaaagtggttgtaatacatgtgcgataagattgttttttaataaatccttaaatgagccctataattactactcatgttataacgagctaatagaacattacttgactattacttcactacttgtcgagttgaagctatatatttgcacctcttggttttgttgttggttttcatatttctttttgaattgttaaacctcgtatatggttttctgaaatctttatgtcccgtgtctttaaattttaaatctaaaatttactttaagaaaagtacaataacaaccctataaaaatttgagtcaattgagacggaagaactatgtactttatagatttctcagtattcttccactgataataatcagatatataatcattcctagaaatctcactttagttcgtcttataatcaaaccctaagtcctagcatatctcttccatacgtagtcatcattaaagtggtgtttttaagatatttttttccccctggaaaagataacgttagttttataagataaaagaagatgatgatgtaagaaaacaaatactttaggggaaagagagataaatgacaatcattgtgtggttgaacgtataatatagttactaaacaacaaataactaatgagctataggggtcgaagtttgacaacaacaacaacaaaaaaaagaagctataggggtcgaaaaaactttcttgcattgtggataatctctcaataccaaaagtagattttgctggtaacgaatatagtagtcacaattgtccatttcagatgggagtgaatttcccatatgggttctttcgtgaaggaatgggtacattatatttgctattcaagaacactaatgggacgacccattcttagccctgaaccaatctgcgacatgaaccggagttcaaaagaaccaaatcggtactaaccgaatgaatcatgcaaaagtaaataaaaacaaaaataaaatgtcaagagaaagcatttaagtccgtgaaagtgagaaaaaagagataagaagttgcagtgtcccttgtccacccaatccacaatttctgtttttatttatcttttttttttttgggctatttatctacctatacttttgtttatttctttgcccaaaaaaaaatactagctttttttttgtctccaatttctaaagtattattttatttttgtttttttattcttcatgagtggtaccaaaattgattttttggatctattagttaggttatcttcagctatctctgattttttttcttatattcgtctaaatctatataccatatcgttttgtccatggtccaagttcaacgtgcattaaatgttatattcggtcgaatttgaaaatatgcagaataatacataagcttcggtggttgaagtcttgaagatgaactcatatcagtatgactaatatagtactatttggtacccattgttataatttcagtgttaaacgttatctatacaaatgagcaaaagggaaatatacacacaaaaaatcagtactaactatctttaacatcattttttcaagtatatgcatgatgtttatatcgaattatgggtagttggacaaaaataaacctctgtaagaaaatatcgaaaaaatattagttacctatcgttacgaaattgaaacgttacaacttacaagtgaaaaacgactcgaaaaatattactttgaaaatctgccgtttcaaactaatatttttctccattcttacaaacgttacaaacatattaaattataaattaaacaaaagaagacaacaccttacgtttctttttcagaaagtgcaatttatgtaactgatattttttatttgattacacaaaaagaaacttattaacttcggaacgataagttattctttgacagtagtagtataatcaagtcctaaataaaagtcaaacgctacaacattcgatgattaactgctaaaaactatggtttattggcttatcacatgatctaaaacgagtaagaaaattaaatgcaacttaaattatatgaatcagtaagaacaaaaacaatgtcaaaatcatcggtccctgatctccggtgccggcacccacccgttcaaatcaactatttaatttccgaccatcctattactctattccattaaatttttaaactccaaaaataacaaaaattaaataaagtaaacgtcagagatgccccaggcaaccacagtcaaatttgcaacaatatggttacaaatctttaaataatattattattcttatcattaatcaactcccaaatgacagtccaattaaataatcacaaaacatcataaaagtgaccaaaattaaataataacaattgttttttgggtttcacatgttttataagcaaagccagtgtggtggacctaactcttcacgctgtcccgaaaaagactcttctcttctctcttcctctttccttcacacaactctctcattctactctctgttttttttctttaatcataacatttttttgaagaacagagattctttttgtttgtgtaagagatg

SEQ ID NO: 31917 - DNA, 3000 bp, Unknown; identical to SEQ ID NO: 31916
  misc_feature (1)..( 3000): 2750-1469P.txt file - cDNA_ID_3047262; gDNA_ID_1621183; Annot_ID_174331

SEQ ID NO: 31918 - DNA, 3000 bp, Unknown; identical to SEQ ID NO: 8035
  misc_feature (1)..( 3000): 2750-1469P.txt file - cDNA_ID_3047286; gDNA_ID_1621184; Annot_ID_57425

SEQ ID NO: 31919 - DNA, 3000 bp, Unknown; identical to SEQ ID NO: 8031
  misc_feature (1)..( 3000): 2750-1469P.txt file - cDNA_ID_3047286; gDNA_ID_1621184; Annot_ID_174371

SEQ ID NO: 31920 - DNA, 3000 bp, Unknown; identical to SEQ ID NO: 2784
  misc_feature (1)..( 3000): 2750-1469P.txt file - cDNA_ID_3047286; gDNA_ID_1620594; Annot_ID_161489

SEQ ID NO: 31921 - DNA, 3003 bp, Unknown
  misc_feature (1)..( 3003): 2750-1469P.txt file - cDNA_ID_3047302; gDNA_ID_1621184; Annot_ID_174365
taccccacggttgggctgtgtacatctcaaaatcagaagcatgccgcaatcttggcaaaggtatcttctcttttccatatggtgtcaagagaattccttcagtcaacactactgcagcaagacacaacttttcttcatcttcaacagcaggttcaccttccttaggttttaaaaacaatcgatcttcgagatcaccaagagtataagatcctttactagcccaaaagtatggttcttttacaggatctttcccctttcgtcgaagttccctatgaacaggttcacattgaattcctgtatgaacaaaagacagtgtagagactattattacaggttttatagtaaatactttaaaaacgattgtaaatcatgtttaacacttttaaaagcttttaaaatcccttataaatcattcaatgccacttacttatgctttaaaaacgattgtaaaccatgcagacacttttaaaatcccttgtaaatcattatatgacacttacttatgctttaaaaacgattgtaaatcatgtttaacctttctaaaagcttttaaaatctcttgtaagtcattctattcaacttacttatgcttaaaaaacgattgtaaatcatgtttaacccttagaaaaggttttaaaatcccttgtaaatattctatgccacttacttatgttttaaaatcgattgtaaactatgcaaacacttctaaaatcccttgtaaatcgttttaagacacttacttatgcttttaaaatcccttgtaaacgtgtttaacacttctttaagcttttaaaatcccttgtaaattattctatgctagttacttatgcctaaaaacggttgtaaaccatgcataccctttttaaaatcccttgtaaatcattatctgccactaacttatgcttcttaaacgattgttaatgaagtaaaccccttttaaaagcttttaaaatcccttgtaaattatctatgacacttacttatgttttaaaaacgattgtaaactacgcaaacagttatgcaaatgccttgtaaatcattctacgacagttaattaagctttaaaaacgattgtaaaactttattacctgttgtgagatagaactctctcaaggagaaacggataggttgagaatcaactctaaaccaaagagttgatccttttgttttcactctctgctgcatgagatagtgaaagatttttccagaaaatctgattcccttcttagccttcatttttggtcccaattcaactagaagaccaagaaacgaacttctaatcttctgaaataaacactcgcctaaagcttcctctactttactaactaaattccaatccgagtattgttgaacggttcccagtgcaatagattcttcaccttctatgtatatctgttcaggcaatgtaaggatttcactctctgaatccatctgcaaaacatgttatgaaacatcgtcagatctactataaaatcgactataaaatcgactataaaatcgattataaaaacggttaccgtcggatctatcgatatctctggggattgtttgcgtcgtagagaaatgatctgaatccttcagcgaatccttcggagaggaaattcgtcggcgattttggggtttctcagagagaaaattcgtcggcaattttgagtgaaatcggagaggaaattcgttggcgattttgagtgaaatcggagaggaaattcgtcggcgattttgagtcaaaacggagaggaaattcgccggcgattttgagtgaaatcggagaggaaaatcggagaggaaaacgaagaagtttgtgaaacgaatgtgaaacctaatcattcagtaagggtaagacagtcatttgccatattagaaggggtagttttaaaaatagccttcaggaaaaggcatttttacaaaaggttattagaataagggaaattttgcaaatctcccttcttatattgaagggagatttgcaaaaccaccttttttttactacccttttgcaacaatatcctttcatgttgtccatttttaaaaatactcattcccttgaacaaaatgaccaaattaccctcatctaatagaaaaaaggagttgaaaactgaacttttcccgccaattttttggcgccaaaagttttatttcccgccaaaaaaaaagtttccgccaaacttttttcccgccaaaaaaaaaaatattctcgccaaaaaaaaatttcccgccaatttttttttttcgtaacaaatttttctcaaccaaaaaaatgattttaaaaatccttgtaaatatttttttgcggcaaatagatttacaagagattttaaaagagttttaaaagatttacaagagattttaaaatcctttgaaaatctttgaaaacacttttaaaccctttaaaaatctttataaatcctttgtaaatcttttaaagccctttaaaatcccatggaaatattgtaaaactcttttaaaatcccttgtaaatattttaaaatcttttcaaaacaattttaaaccttttaaaaatctttaaaatacctttgtaaatcttttaaatccctataaaatctcttgtaaatcttttaaaacccttttaaaatcccttgtaaatctttttaaaaccttttaaaatcccttgtaaatcacccttttaaaatcccttgtaaatattataaaagccctttaaaatcccttgtaaatctatttcccgcaaaaaaaaaaaattggcgagaaaaatatttttgaaaacaaaatttggtgggaatttttttttcgaaactttttggcgggaatattcattttggaatattttaggtgaaaaaatattaatatttcattttgttaacctaaaacaatttccaaataagggtaaaatggtcattaaaaaattaaagagggtagaaataaaaatggataaaacaaaatggtaaagttgaaaaggggcatcatgaaaagggcatttgaaagaatttttctatattgaattggatattgttacttgtatttatg

SEQ ID NO: 31922 - DNA, 3003 bp, Unknown; identical to SEQ ID NO: 21613
  misc_feature (1)..( 3003): 2750-1469P.txt file - cDNA_ID_3047322; gDNA_ID_1621185; Annot_ID_174399

SEQ ID NO: 31923 - DNA, 3003 bp, Unknown; identical to SEQ ID NO: 21620
  misc_feature (1)..( 3003): 2750-1469P.txt file - cDNA_ID_3047331; gDNA_ID_2926133; Annot_ID_197033

SEQ ID NO: 31924 - DNA, 3003 bp, Unknown; identical to SEQ ID NO: 21620
  misc_feature (1)..( 3003): 2750-1469P.txt file - cDNA_ID_3047331; gDNA_ID_1621185; Annot_ID_174383

SEQ ID NO: 31925 - DNA, 3003 bp, Unknown
  misc_feature (1)..( 3003): 2750-1469P.txt file - cDNA_ID_3047335; gDNA_ID_2926133; Annot_ID_197032
ctaaaatacatctcgtgcaccgcgcgagcctacttcaagtaaattatctaatatattagtaagaggtaagtggatattacttttaatgtgtgaaaaattcttaaacaacacttcaaatgaaataaagatagtgtatgttactccaccattgaaatcaaaattcaagaaaggataacaaaaatggtaggaccatattccagcaatccacaagtgacaagtgcttctgctggttatgttttacccaattttgtggatttcatcaattgattggatgataatggaagaatatgcatagtcttttctcagtactactttaaacccacctatctaggttaggcccgtctagataggcgggtttaaaaaatatttataaatttttatcgatgatatttgaattttaaatagtaaatgataattatttttaaatatttaatttagtaaatttgttttaaattaaattttaatcttacaataatcttacattgcagaaaattgtaatattgaaattcgatttaaaacaaatttactaaattaaatatttaaaagtagggattatcatttactatttagaattcaaatttttggttaatgggatctcaccgctatagattcaaatatttttataaatttgttttgattagaaccttggctataataaaacaataataaaatattaaatatagatgataatatagaagaaaaacatatgaaatcgtaatatttttaaaaaaaacagatgacttaaataacgtaagtagatcaaaggaaattgatgcatttgatgctcctgatataaattttttggaccgttctttcaggtttgtttaatgaattgatccatatatttgtgaacataaatgttggcatggatcaagcggcgatcttgcgaaatttgacatcgaaaatttcgtataaacgtatcaagaaatttactcttgttaataagatattagttttagttaaatataactaattgtggtaataatctaatagttgaataaattatcatcaaattgagagattaaggtttgaccgtttgagttctcttttatatgataaaaaaatatctaacattctatatatctcaaagattgattgggttgggattatatccggttatattaaaaatattatcaacagtgattggtctgtaaaccaggattaacttcagtttttttatatacaaacaaaggccaagtcaacgaacgtactaaattaataattatgttttcttttggtattgacgactttgcataaacaaatagaggtaggaagaaaattcggcagacgatatgttatggtgactttcatgtcgatttcgagtttgtgaaaatataatgtttaaaattgggtccacccacactattcaaaggtggttttcatgttttgctatgatccttgacatttataaaaattctaacgtatctcgatataaatagctgccatattttgatttttctattagtcaaactcacatttgatccttatctaaaatttccaacataactcgagattagtccaactgactcaagccaaaggtttgaattctttgtacttagttcagattcattcagcactaatttcactatctttgatgagtattggtctagtttacttgcttcatttgagtttccaaaatctttgactacttctcatactagtttcattcatcttttcgtactaatctgtaactttcaaatgatgtccaatttggaagaaggaaaaaaaagcttgagtccttaaaatttctaaattaagattccgaatggagacgtgcggttcaactgcggataaagtgcggtgcggttcaaatagtaacaaattatatacatatatatatgcaaagaatttcgttattatttaaaacacactgcactgcggttcggtcaccattcgaaacctaagatccaaaattatttcaaaaatatcgcatactaaaaaaatgtggaaaataatcagcataaagtcgcagggattagcgattaaaaaccaaccttcatctctttttaatcttttcttcatctctttcattttctgtcgataccactttttttggtgattccgtaaacagtgcaaataacatcgataaccttggaaactcttttataatatagcgacaatcaatggtgtatagatcttcaatctaaatacactacacacatcacaattgatatttttttagcaagaaactctcaaatcttccctctgtattaaactttactagtttgacaacgagaccaaagaatacatattacaaatccaaatccaaaatgtcataaagttgactaaaaaatagtaattgtataataattaaatcaaacctttcatgaaagcttttaacaactgtcattatttctcaaagctttatcaacccccacttataataattaatttttaaaagattttcttaaataacttgtacaaatatagtatcaaattttaaacctatgttaagtactacaataacacgctttcctctgtattattaaatcattaatacgtatatgtgacgagaccaaaagtacaaaaagtccaaagtacaaaactctcaatccccaaaaagtctcaaactttgacaagaaaaaaacagtaaacagagaataaaatgaaaaaatcaaacctttgcatcaagcttgcaactttccttttcaacatctgtcttcattgcctcttaagccccaattatgacaacaaacctcacgcgtactgtcttcttcgtcttgttcttcttcatctaccatgaaagctcttctctttcttcttacccttttcctcatcctcccaaacccaatctcagccattgatttcatcttcaacggcttcaatgactcatcatctaatgtctccctcttcgggatcgcaacaatcgaatcaaaaatcctaactttaacaaaccaaacatcgtttgcaactggtcgtgctctatacaacagaaccatccgtacaaaagatccaatcacatcctctgttttacctttctctacttctttcatcttcaccatg

SEQ ID NO: 31926 - DNA, 3003 bp, Unknown
  misc_feature (1)..( 3003): 2750-1469P.txt file - cDNA_ID_3047335; gDNA_ID_1621185; Annot_ID_174382
ttccgtatattatatatcatctatttaaaactactttatctaataagtagcaatctgcataatacaaatgatcataaaacaaatataattaattttgtactgaaataataaatatcaaataaacttgtaagacatagggcatagccattagttacttaagtacctcattaaaatttttgttctaaaatgtccgatttattatatttttaagtcaaaaacatgaataactatatatataacgcatgtaatataaatttaaaactaaaatacatctcgtgcaccgcgcgagcctacttcaagtaaattatctaatatattagtaagaggtaagtggatattacttttaatgtgtgaaaaattcttaaacaacacttcaaatgaaataaagatagtgtatgttactccaccattgaaatcaaaattcaagaaaggataacaaaaatggtaggaccatattccagcaatccacaagtgacaagtgcttctgctggttatgttttacccaattttgtggatttcatcaattgattggatgataatggaagaatatgcatagtcttttctcagtactactttaaacccacctatctaggttaggcccgtctagataggcgggtttaaaaaatatttataaatttttatcgatgatatttgaattttaaatagtaaatgataattatttttaaatatttaatttagtaaatttgttttaaattaaattttaatcttacaataatcttacattgcagaaaattgtaatattgaaattcgatttaaaacaaatttactaaattaaatatttaaaagtagggattatcatttactatttagaattcaaatttttggttaatgggatctcaccgctatagattcaaatatttttataaatttgttttgattagaaccttggctataataaaacaataataaaatattaaatatagatgataatatagaagaaaaacatatgaaatcgtaatatttttaaaaaaaacagatgacttaaataacgtaagtagatcaaaggaaattgatgcatttgatgctcctgatataaattttttggaccgttctttcaggtttgtttaatgaattgatccatatatttgtgaacataaatgttggcatggatcaagcggcgatcttgcgaaatttgacatcgaaaatttcgtataaacgtatcaagaaatttactcttgttaataagatattagttttagttaaatataactaattgtggtaataatctaatagttgaataaattatcatcaaattgagagattaaggtttgaccgtttgagttctcttttatatgataaaaaaatatctaacattctatatatctcaaagattgattgggttgggattatatccggttatattaaaaatattatcaacagtgattggtctgtaaaccaggattaacttcagtttttttatatacaaacaaaggccaagtcaacgaacgtactaaattaataattatgttttcttttggtattgacgactttgcataaacaaatagaggtaggaagaaaattcggcagacgatatgttatggtgactttcatgtcgatttcgagtttgtgaaaatataatgtttaaaattgggtccacccacactattcaaaggtggttttcatgttttgctatgatccttgacatttataaaaattctaacgtatctcgatataaatagctgccatattttgatttttctattagtcaaactcacatttgatccttatctaaaatttccaacataactcgagattagtccaactgactcaagccaaaggtttgaattctttgtacttagttcagattcattcagcactaatttcactatctttgatgagtattggtctagtttacttgcttcatttgagtttccaaaatctttgactacttctcatactagtttcattcatcttttcgtactaatctgtaactttcaaatgatgtccaatttggaagaaggaaaaaaaagcttgagtccttaaaatttctaaattaagattccgaatggagacgtgcggttcaactgcggataaagtgcggtgcggttcaaatagtaacaaattatatacatatatatatgcaaagaatttcgttattatttaaaacacactgcactgcggttcggtcaccattcgaaacctaagatccaaaattatttcaaaaatatcgcatactaaaaaaatgtggaaaataatcagcataaagtcgcagggattagcgattaaaaaccaaccttcatctctttttaatcttttcttcatctctttcattttctgtcgataccactttttttggtgattccgtaaacagtgcaaataacatcgataaccttggaaactcttttataatatagcgacaatcaatggtgtatagatcttcaatctaaatacactacacacatcacaattgatatttttttagcaagaaactctcaaatcttccctctgtattaaactttactagtttgacaacgagaccaaagaatacatattacaaatccaaatccaaaatgtcataaagttgactaaaaaatagtaattgtataataattaaatcaaacctttcatgaaagcttttaacaactgtcattatttctcaaagctttatcaacccccacttataataattaatttttaaaagattttcttaaataacttgtacaaatatagtatcaaattttaaacctatgttaagtactacaataacacgctttcctctgtattattaaatcattaatacgtatatgtgacgagaccaaaagtacaaaaagtccaaagtacaaaactctcaatccccaaaaagtctcaaactttgacaagaaaaaaacagtaaacagagaataaaatgaaaaaatcaaacctttgcatcaagcttgcaactttccttttcaacatctgtcttcattgcctcttaagccccaattatgacaacaaacctcacgcgtactgtcttcttcgtcttgttcttcttcatctaccatg

SEQ ID NO: 31927 - DNA, 3003 bp, Unknown; identical to SEQ ID NO: 23853
  misc_feature (1)..( 3003): 2750-1469P.txt file - cDNA_ID_3047382; gDNA_ID_2926145; Annot_ID_197698

SEQ ID NO: 31928 - DNA, 3003 bp, Unknown; identical to SEQ ID NO: 23853
  misc_feature (1)..( 3003): 2750-1469P.txt file - cDNA_ID_3047382; gDNA_ID_2926145; Annot_ID_139081

SEQ ID NO: 31929 - DNA, 3003 bp, Unknown
  misc_feature (1)..( 3003): 2750-1469P.txt file - cDNA_ID_3047382; gDNA_ID_1621187; Annot_ID_174503
ggtaaatcacactcaatttatattgtagttaatcaagctcaacaacactgatgagcagcatctacgcactcgatttaacatcaattaaaatatgagatcatcgattctaaagtattagagtatttgaaatagagaaatgatctctaatagcacataatcaagtttcacaaaaagcaccataaactctttagataaattctcacaaatagcacaattttaagttttttggacaaaaatagcattaaaattttttttgacataaatcgcattcaaataattattttatatttaattattaaaatttaaaattcaaaaaattcaaaaatacacaaattctttaccaaaaattcccgccaaaaaattcctgacaatattttcccgccaaaaaaatttccgtcaaaatttttccgccaaaaaaatagaaattcatgacggattttacaaaatttaggaaggattctaagcaattcaagaaagattttacgaaatatagaatatattttttttgtatcccttcctgaatttcataaaatccttcctgagttttgtaaaatatttcctaaattttgtggaattcttcaaataatcattttctgaaatttaggaaggattctacgaaattcaggaagggtttcacgaaatttttatttgtgaaagctttcctgaattacgtgaaatcattcccgaataccgtagttaccttcttgaaattttttttgcggggaaacttttacgaagattgttttggcgggaaaatttgataggaaagtttttggcgagaaacttttttacgaaatgtttttttgtgggaaaccatttgacggaaaatatttacttttatttatttattttagttaactaatcgtttatatttaatatttaattaaagttttgagtgctatttgttgattttttcaaaagagatgttatttttggaagaaaaaacttttagtgctatttttgtaatcctcctaaattttaatcaaaccttaaatataaattaataattaagaaaatacaaatacgaatacacaaatttatcgccaaacaaagattattaagtttttcatatgtatttatactataaattgttttgtaaagcctttaatttgtggactatactataaatttttcagtagggcctttaatttgtgggcttttttttacatacaattatataaactaaaacctaaatgctagagttaaaaaaaagggcgatttgtgagtcaacttaatttttgtacaagtaaaaatcatagtttttgaggttaattgttagttttgcttatgaatttattgttattcttcctttctatcgtggcaaaatttgtaagaaaaaaaagatgcaaatcttgtgataatgtgattagttaaactccaattttagaatggatcgatcactagctttgttaaaatatgagacacaaactttcatcaaatttaacgtatttgaccttgatttgtgttaaatatttgtcgcaatataaagttgtaaacgttatataaggaaatgttcaatctctcttctttttttttgaattctttttaactgaatttgtagatgttatataaaaatatgacatatgacaatgttttataaacatgagtatatttgtcacaatgtttaacataataattttgaaaagagagaacaaactgcaacaatgttgttatataatacaattttccattaatattgaaaatatgagatttctatgggatattgcacaaaagctaaattacaattcataagattaataaaaatctttaagtacaatgtatcacaccaattctgctagttttagaaaaatataatatcttttttttgcctttttcataatgagtcaaatttatgtttatggaggatagaatctcaatgttaaaaaagagtaacaattcataaaattaattaaaatatttatgtgtaatgtatcacactatttttgccagctccaaaatgttacttttagaaaataaatgagaataggatatttgttttttgtctttttcataatgagttaactttatgtttacggaggatagaatctcaatattaaaaaggggtaacaatttatacgattaattaaaattttatgtacaatgtatcacaccatatctgctagctctaaaatgtaataaataagaatataatatatattttttgtctttttcataatgggtcaactttatgtttatgaaggatagaatctcaatgttaaaaaggggtaacattcattagattaattaaaatctttatgtatatacaatgtatcacactattttcgccagctctaaaatgacagttttcgaaaataaatgagtcaactttatgtttatggaagataaaatcttaatttaaaaaaaggtaagaaaatcttctatataaattggtcaaacttcctttcagtcttcaattcaaatcattgttttttattactaaaaggaaatataggatttaggatagtcccccaaaatgctaagtttcaactaatataaaaagaataaatctaaattacagctcatctctttaaatgaaattgtaatggacagtgtatcacaagatttttgccagtcctgaacgttctaaatctttaggcgtttatttgttctatttataaatatcaaatcgtagctttataatccattcatagtcctttgctcttgttttactactctcactaatttttttataaaaacaattcttagctactagctagctccatttataatcccttcactcaactttcttgtttcactattctcactaaacgtaagttttcttgcatcatttttctaaattttattgtcgatatcaaactagattcgaaggatttcaattgaaagtcttatgatatttaattgttacgtcgatataatctatgtgatgtagaaacactcatttttaggggtctaattacatctattcaagcaaatcttttatttaaagtgtgcatgctaatgatttggataattttgtttcaaattagggttttctcggaaatg

SEQ ID NO: 31930 - DNA, 3003 bp, Unknown; identical to SEQ ID NO: 23852
  misc_feature (1)..( 3003): 2750-1469P.txt file - cDNA_ID_3047390; gDNA_ID_1621187; Annot_ID_174498

SEQ ID NO: 31931 - DNA, 3000 bp, Unknown; identical to SEQ ID NO: 8052
  misc_feature (1)..( 3000): 2750-1469P.txt file - cDNA_ID_3047399; gDNA_ID_1621187; Annot_ID_174477

SEQ ID NO: 31932 - DNA, 3003 bp, Unknown; identical to SEQ ID NO: 17605
  misc_feature (1)..( 3003): 2750-1469P.txt file - cDNA_ID_3047407; gDNA_ID_2926145; Annot_ID_197683

SEQ ID NO: 31933 - DNA, 3003 bp, Unknown; identical to SEQ ID NO: 17605
  misc_feature (1)..( 3003): 2750-1469P.txt file - cDNA_ID_3047407; gDNA_ID_1621187; Annot_ID_174474

SEQ ID NO: 31934 - DNA, 3000 bp, Unknown
  misc_feature (1)..( 3000): 2750-1469P.txt file - cDNA_ID_3047429; gDNA_ID_1621188; Annot_ID_174514
tcagaagaagcagcagatcaatctactcgcccctcctactcgatcctctactcaacccatttactagaccaagggcgaccaactctaccagacttgttgatctatcaaagcgtcttcagatcttcctcattccccactcaaccaaacatctgagcatacggataggagaggaagaagcatctcctcgaccaattgatcactcggagcatggacacaaagaggcagactttgcagcaccctctttactcgatccccaagattgagcactcgcccaaagcgcctcaagtctctcgtcttctagtgaatctagggttttcaacattttactataaatagatcactttgggatttgtccaaaggatctagcttttatccttttttttttttgtgttcttgaagcttcaaaacttaattactcttaatctattttgtttttgcctttagttctttgagtaaatttgtttagtttgtttagatctacattttggtatgatttcagtaatttatgggtttgtgttcttagttatgttggttgagtagtgattagggttcttgaggatggattagattagggtaatctctaggttagttagatggttaagattatgttagatcccttctggattcgttggcccctatgcggttttcgctggctaatgtggaaattcgaccataaacgtctagcgtccaaaagacgttcaaatggttgcctgatctacgaattccagagaattgtagactatagaccaagagattggctagtctgtttattggctttggtagattgttgcttaaaccctgctcttctatgtttcatcaacgagagttgagattaggaagtggtagagttatgggggtctctgtcacgagagtggattgacccggtttttgaatcttttgtctagggtttctgcctttcacctgttagccacctgatgaaccctagagttgcccttatcaatgaatccatccttaggacttctattcttcttagatttatttgtattcacccctgattacacttttatttacctgttatttgtatcccatgttgattgcaatttagttcttaaattgtcacttgttggttctactcgacccaatgatcgagtagggctcttaagttctcatttttacctgtttgaatcctgacctaggattgttgctagaaacccactatcattataatctggcttgacttagttgcttctgtacacatcttgattgctagcaataacagtggactggattgacaccccctatagctgcatcgacatgttagtgtttaaggggaattgaactgaactcaccacacttcagcaaaaaagtaggcctaaaaacctacttatcaatttggcgctgttgccaattcattgttgcattgttacattcaagatattagaaaaagttaagatcaagttcttttacatttatcaagttactaactcatcatttcgtttgcttgtttttgtggtataggtactaaactttgtgcatgcaaactcggtccaaaggttctgcacacctactaccattctgagatagaattgacagaatagctcgtgagttacaagaaatcaaagcaaaggcaacctgtgatcagcaaagaccagctgttatggatcaagagaactgaccagttgatgttcaagacccactaatgttgatcaaccaacaaacattggtgctggtgatgccccaaggaatcatcaccaaagacaagggatagtgcctccaccagttcagaataacaattttgagatcaagagtggtctcatctcaatgatacaagcaaacaagtttcatggtctacctatggaagatcccctagaccatcttgatagctttgataggctctctggccttaccaagatcaatggtgtcactgaagatatgtttaagctcagactatttcccttctctttgggagacatggcatacaactgggagaagactctgcccccagacttcatcacctcctgggatgattgtaagaaagcgtttcttgccaagttcttctttaatgctcgcacatctaaattgaggaacgagatctcaggcttcacacagaaaaacaatgaaactttctgtgaagcttgagagaggattaaaagctacaccactcagtgtccccatcatagtttcaagaaagcttcattattgagcatagtctaaagaggagctttaccaaagatcagaatactactcgacactgcctcaaatggaaacttcctgaacaaggatgtagcagaaggatgttagttggtcaaaaatctagcacaatctgatggatgctacaatgaagactatgatcgctcaatgagaggaactggaggaactgaggataaatagagcaaagatatcaaggctctggatgaaaagctagacaagttgttgttggctcagcagaagcagatacactacatcactgatgaagagcacttccaaatgcaagaagggggaatgatcagactgaagagctagctgtgttacattcagaacaaaggagggttcaacaagggctacaacaactacaagcccaacccaaacctctcctacagaagcactaatgtagctaacccccaagatcaagtgtatccaccacaacataatcagtctaagccttttgttcaacacaaccaaggttatgtccctaaacaacagtttaatggaggctactgaatagtgtgtattttgcatgttttgagcatccatttgtcatcactttagcatcatatcatcactgttttatacaatttctcatcatttgtcatcactttacatgtttaggatagttttgcatgcatgttgcatatttgtgttgttttaaggtgattcgaagctattgacgagctaattggaagaagcggacctgatcatgcaaaaccactcgacccccaggtcgagtagacgcttcacaacctcagcagaccactcgaccccctggtcgagtagaggacatcaccacttcacctcaccactcgaccacgaggtagaatg

SEQ ID NO: 31935 - DNA, 3000 bp, Unknown; identical to SEQ ID NO: 8078
  misc_feature (1)..( 3000): 2750-1469P.txt file - cDNA_ID_3047461; gDNA_ID_1621189; Annot_ID_57476

SEQ ID NO: 31936 - DNA, 3000 bp, Unknown; identical to SEQ ID NO: 8071
  misc_feature (1)..( 3000): 2750-1469P.txt file - cDNA_ID_3047461; gDNA_ID_1621189; Annot_ID_174541

SEQ ID NO: 31937 - DNA, 3003 bp, Unknown; identical to SEQ ID NO: 17612
  misc_feature (1)..( 3003): 2750-1469P.txt file - cDNA_ID_3047469; gDNA_ID_1621189; Annot_ID_174535

SEQ ID NO: 31938 - DNA, 3003 bp, Unknown; identical to SEQ ID NO: 17613
  misc_feature (1)..( 3003): 2750-1469P.txt file - cDNA_ID_3047473; gDNA_ID_1621189; Annot_ID_174534

SEQ ID NO: 31939 - DNA, 3003 bp, Unknown; identical to SEQ ID NO: 17614
  misc_feature (1)..( 3003): 2750-1469P.txt file - cDNA_ID_3047477; gDNA_ID_1621189; Annot_ID_174530

SEQ ID NO: 31940 - DNA, 3000 bp, Unknown; identical to SEQ ID NO: 17617
  misc_feature (1)..( 3000): 2750-1469P.txt file - cDNA_ID_3047489; gDNA_ID_1621189; Annot_ID_174524

SEQ ID NO: 31941 - DNA, 3000 bp, Unknown
  misc_feature (1)..( 3000): 2750-1469P.txt file - cDNA_ID_3047493; gDNA_ID_1621189; Annot_ID_57459
gtgacatatgtggataacctgttgaggttggagaatagctcaatcggagaagttgttggcagcgtgattcttatgatggtaatggagaggatgctagatttagatgtaagtagatgttaattttttataaaaatgtagccactaagtaaagtggcaagtgaatgatatgcttgagcatctttgtagttggtaagtggatgtgatgactctaatggaggcatgtttgatatggaacttgaagatgcagttgaaagcactatgaatgaaggagacgaggtagggttagtgtaattttttgctatctttgcaaaatcccgaaacttactctgtttagtaatgatcgaaagttacttgatgacaagataccattttctcttgttgtgaaatgttagacatgacctctggtttcctggagaagaatgtgtcatcattcataaatttgatctctttttgcagtttccagtgggggctctaaaacaaaatacttcaggtggaaatgtagtctctgaactgttggacaaattgatggtcctattttttcatcatctagaatcctgtcaaaactctgatcgtttggatgaggtatggcaccaaatggtacttgttcaacatatttttcctttcctttgtggtagattcattgatcttttggtgtttctgtttttcattttggcataggtatttgaaatcctctttaagtcgttcgagaactatattctgaacacatacaaaacaaaattttcacaggtaggcatcaaagctatcaccttacatactacaaagttttcattgtaggcttctagcattagttcattatcggcatgtgatgtcttggcttagactcactctactttcatctgcagtttctgatgttctatgcatgctcactagatcctgaaaattgtggtgtgagatttgccagtaagctgttggacatatatctctccagcaacacatgtcgacttactaggcgagtttaatcttgtccttcttggtaaagatttctctgcatgatatgaagctaatattgttctaatcaccacttgtgtattcttttgttttctctttatacttaacaggatgagtgcagtggcttatctagctagctatttgtctcgtggaaagtttttgcctgcttcttttgtggctagcatgttgaaaaggtacgtattgctaaaaaatggaaaatgtaattgtttgatctgatttaagtctcgctttgttgtaacatagtttctcttttgctgaaatcctagattggtggacgagtgtgcggaatattgcggaacatgcaatgatgatgtgaagccagaagcacatcaagtgttctattctggatgtcaggtatagtccaagtttaagaccatcttatggcttttgattccttaagaactcttctgtgaaatcattgacgtctctagttatcaatcattgttaatgttcacacccttaccagaagcttattggcgtttgggatcatatgctattatgtcatgtatcgcttaaagttgttacttttctatgactgtaggcaatcttgtatgtgctatgcttccgaatgagatccatagtggagattcctcgctttcaatcgcagtttagatcattggagtcaattttatctcacaaactaaacccactactggtgggtgacttacactaatcattttcttctcatagctcaactgttattttaagtagtcttcactccaagtatcaaatgcattatgcttgcaccattcattttgtgtgaacaggtgtgtcttccatctgtagtttccgagttccttaaacaagccaaagctggtggtctgttcattgtctcagaatccttcattttcgatgacctacacgagtctgagctctctcgtgcttttggtggctttgaaaggcttgacacattcttcccgtttgacccgtgcttgttgaaaatgtctagcaggtttgctatctttactcttgattattttttctcttccaaagtaaggacaaatcaatgtgagaatcttacacaaggttcttgactcactggatgaatttacccgacctgggcatatttgatacaaattctactgcatacatcttaattacagtcttgaaatgacattgaaaattattttaatatgataaaacaagtgatgaatcaaagtatttgcattggataggcttgaactctctttctcacacgtgttttcttgtcaattcttgaagctacatctccccgaacttcaacttctggtcaatggtgaaaacgacttatggagaagatggtgacgaagagctttgtgatgaggtcatagtgaatggagatgcagacagtgcggaggaacctgacgatgacgttgaacttgatagtgagatgaacacgatgtctacaactccgaaacactctttcatgcgagaaacagagaggctcttgaagatgccttcaagaatcagaccatccactagtcctcctgaatccttcttaatctaatagtcatagagagagggaatgcaattttgcaatgtaggtttcttattacaatctcttagctagtgcgtaaactctaaaaaaaagaagttgacatgagttttgtgcgagtctgtggtattatctgatcgcatgtggttttgtagcaaaattttgaagaacatctatgaagtaaaatttagtcagttggtttatgattacctaatttgagtttcggtttaatttggttaagttgaaatgctgaatgattgatttctcggtttagtgttcaatattgggtttactttgtccacaaaattggttaaaaatagctctttgtattttggtaaatgtcccgcaaatggttaaaagtaaaccgggaattgaccctccgatttaaaccggtccgtaaaccagctgagcaatctctctttaacctcggcgtcggcgtcttgtagcttcttctgctaggctttgttaatcagcaaaaaccctagaatatcttagagcttcgcttcactttcaagctcgagactttgagaaagatg

SEQ ID NO: 31942 - DNA, 3000 bp, Unknown; identical to SEQ ID NO: 31941
  misc_feature (1)..( 3000): 2750-1469P.txt file - cDNA_ID_3047493; gDNA_ID_1621189; Annot_ID_174523

SEQ ID NO: 31943 - DNA, 3000 bp, Unknown; identical to SEQ ID NO: 8083
  misc_feature (1)..( 3000): 2750-1469P.txt file - cDNA_ID_3047521; gDNA_ID_1621191; Annot_ID_174587

SEQ ID NO: 31944 - DNA, 3003 bp, Unknown
  misc_feature (1)..( 3003): 2750-1469P.txt file - cDNA_ID_3047524; gDNA_ID_1621191; Annot_ID_57494
gaagaaccagttgcgcagttagctacagccggagaaccaatgatcacgttcggtggcttggctttgacagggtttcagccagaaccgacatttcaggtgaacgttcctgatgattttgagccgtcttctacaccaacatttaaggccacggagactttgcctatgaaatgtgacccgtttacaacatttgagagttttgggttcggagagacattttcagaaaatggaggggtaaatcagcaatctgtattgcaagaacagcagatatggttgcagaaccagaaaaagatcatagccaagcacttgagttgatacaaaatttatttggctagacagaggttgagatgtttctttgagtttttcttttgttacattgtcaacttaactcttaactcatttttccataacttagagaaatgtgaaattcagaaattctttgattaaaaagatatttccgcggattctatcttcgtacttgcattcctgtgtatacacgatgtattttgtgtgtcttgtatcataatcacattgagaatttgattttcaagtatatctcaacgaataacactcaaatatctaagttcaccttctgaatacatttacgtacacggtacactttgggatttacttttgaatatgttattttctttgaagtttttgggaattgaaatttagctagcattttgatcatcgtgatgatgttatgtagcatttagtttatgtatttttgaaaatatttatgtattcatttttagtctatattaatataacaagttttcacataatcacacaacagatgcatgcatctaatgtgtgtgtattagatgaatgtatccgatatgcgtattagatgcgtatatctggcaaacaattttttgcattttattttccgatatgcatgtatttatgtgttatgatatgcatccgtgataatgcgaatgataaaatgaatgtatatcggtggaagataacgaagagggaagccaaatggaataaattaaggaggtccactagtaggtcaagttggctttgtggtgtcgataacatgagattgaccaaagctgtagcttgaccccaaggccacgagggagaaagatctaccaaaccaaaatcatcataacacatctctttctagtatatagcccaccacaaatattaattcttttaatagttatacaccacaaattttatcccccattggccattgactagagtcgttttcgtctttgacagtggtaaaagcttctgtatatgtgaatttaggattccacctttcttaggtttctcattacaagttgatttaacttcttgacttctcaagttgttgttttgtaatttagtaaaaatttgcttacaagtcatacatgattgaatataacaccggctgctaagcctatttttctatcataagtttcgctttcgagtcaaaatgttagtcaacatgaaataaaacacgtttctttatttgttttgcttattgatcaactttaaaatagtcccataaaatagcaaatattaagaaatttcaaatcaatacattagttgccaaaacccgtctgtgatattatactttttgaggctccataataatgacgtgagatttgtttgtgactgaggaagtggaaaataaagttaagcatgtcttactattatcaaatatcagtttttctataacaaagtatgaatgttgatcaaagacaaaaacaaaaaaaaggtgatccacctttctccaaatagaaaggaagtaaggcaatgaatgttttttttttttttttccattgcatttgcttttaaatccttataagaatttgaaagaaaaatatcttatcaactcttagaggtgatctttgggccaaagagggaaccacgtaatcgaatctgaacttctccgcttaaatgggaaattttattagatctgataaacggccaaaagtgatagctcatgattcttaatatagacgtgcatacagagatgttgttaccggccgaagagcagcttcgtaatcaacggacacaaataaaccactattggtccatcaaaattaatacaaaacgaatgaaaactgctgtgtcataagactaaataattttgtatattattatgatttagatggatgcggtctacaaatttttttaacaaaaaccaaccattagtttgtttaagttacttgaaaacaagaaaaggttcagtgaaaggtgatatataagctattattattatacacagagtaaaaggaagaaatgtgaaaaggaagattaatccacactaaaagtaaaaggaagaaaacgggtcaaacaatgaatcgtctgactgagtaataatatacgtcgctgtcatatattttgtataaccataaattttttatattttttccgacccaaattatttttagttttctatagctagttactaaattaaaggtgatgaatagtaatcatgactttatgtcacacgataaggttattatcacctacctttgagtatatttaggattttccgaagacttggacgacccaactcagtttggataaaaccttgtggtctattctaaatttaattctaatttacttctgattatgtggatttatacacggttaaacatcagaggctgaataataattagtttgatagatctgatagttcctctgttttctttttcttttttgagttgattatactgtttgcttttgttgattattagtccaaaacattaaaagaacaaaaacaaaaaaaagtgttcacgctttttggtcgaccgtaacatactttattgaattttgttaaaaaatcattacacaaatgatattatggatgtgtgtggtccaaaaaaccaaatattgactgtagaatgataactcgtagaagtaactcaaagctcctctctgcgcttcttttctctctataaaaccaagtctttgatcatcagatttatatcaaacttcaaaagcgtcaaacataaagttaggccaagaaacccatttaaaaaaaaagagagagagatg

SEQ ID NO: 31945 - DNA, 3003 bp, Unknown; identical to SEQ ID NO: 31944
  misc_feature (1)..( 3003): 2750-1469P.txt file - cDNA_ID_3047524; gDNA_ID_1621191; Annot_ID_174585

SEQ ID NO: 31946 - DNA, 3000 bp, Unknown
  misc_feature (1)..( 3000): 2750-1469P.txt file - cDNA_ID_3047539; gDNA_ID_1621191; Annot_ID_174571
gatatgccctgtctccaggatgcaactatcgatgtagatgaggcttatcatccggatgacaaatttctaacatctttttcttcagtcttgtctcttcgaatgcatttgtctgatgcaatggtatctagctctctaatttcatctcattgtaattccattgctgcatctaactacttacttaagttgtgtttgttttcctttcaggttatgcgttgtaccaccatcaacttctctcgactaataaagttaagcatatatccctatggaccagacatgttggaaacactcctacgtttacttggaaatgctccaaaactaaaagagtttttggtagattatgtacgtatcatcctcctcctcctcttcttgctttaatggactatctataatctatactattcaaatttttgcttatcatatatagccctcccttattgcttctcagaaatttgtctataatcccgaggatctcccatggtcatggaaacaaccgagtcatgttcccgaatgcttgtcatcacagctcgagatattcgagtggagagactatggggatagaataatagaggaagaattcttgacatacgttttggccaactctaagcgtttaaaaaccgcaacaatctccctgaggttaaatcttgaagatccagagttgatcatcgaggaaataaaagaccttcctagggtttcaacaacatctcaccttttgttcaaatgaaaagtctacagaagctcagtgaatgtgcaagcttaattagccttatctgctataagataccccaaaataattgatgttcaaggtttctttttctttcttttaaagtaaaaacactatttacggtttcttgatagtgttcctttttccaaatactggataagttgcagagggcttagtttcctagtttacagtcttaacaataacatcatagcctatgattcatagggtgtttaattgtttattcacatatttctgctgggtcgctcttaatgagtcttttcttacaacatcataaaacaaattttgggtttaaagtcaaacattgactcgctgctggccctctgatgtttggaatcttacttagttcttgaaattgtatggggaaaaaacaaccaatgttattgaaaaatggtcaagcctcgttggacagctgatgtgaggaatatcgaaacatgtaaatggaataagtggtctatagtagtcaacgttatacttgtcaacattcgtctgaagttaaccgtaatccgtgggcagaaaacaaacaaagtaagtgtttggtcatctcaagtctcaacatatcccattaccattatccaaattatcatatatacatattctagttccaaaaagtttagattgaactaggaaaaaagaagaagaaggaaagcgtggaaagaaaaagcaagtctctcatcctctataaaatattccatttatttcattcttgtttccaccacagtggtgcatttgatatctttgcatgaggaatgtcttaagtggtttgtctgctttcctctgtttttgttcttttgcagatcaagaggcttcatcttttgcttactgtcaaggagtcagctatggatgttccatccaacttggaatctcgaaggcgtcttacagtactttcttttcaaattcactattaatgggacatgcctgctgcacccaagattcgcaacatgctttccttctcgtaggttccaggcacaattcaagttaatttatggtcgtcttctcataggcttactatatcttaacatcttccattttgcgttgtcacagggtccttacaccatacttccgttgattgataggtatgatagttaagctcaataaatgaccacacttgtgtttctttttgttgatgattagggtttttgggtttctttgatcttaagcataaaggacaagctaacataacccatgtcggggatggctttgcatttagaaatcttagatggggcttttgtgtccttttacttgtgtgttaccgtgatttaaaatcatcgacaagtcaacacatatatacttaagtaaagagatcttctacccgcaatttgtgacaatcaacgtaaatatgttctcttcgagcccaatgttttggcacaataactgtatccctgtaagattttcaaaagaagccagaacagaataatacaagcacagcagttagatagaaaaccatggagcgccgttacatgagaagtaaggggttaccctcagaaaaagaaaaagaaaggaccacttccgttccattgtataaaaatccagacatcaccttcttcttcccctgtaggttaatctcactgtccagttgcaaaacagagcatgaacagtaagctttttgtttaagattttaatagtgagtgtgagtcatcacatgctgatctcgggttttactaatctctcgtcactttttatatccactaattgggccaattttcattttcagggcccattattataatatttataggcccacattctcttaaccctccatccagttcacattgcgccatgccttagcgcaaacgttaaaatggcgttgtttccaacttaaatccaaatccattaatgtatttatttattttggattttttttccgtatacaaactatattcaaattttgattttttttcgtcatccgctaatcttttcgttttccaaaagttaatgaagcaacaaaaatataattttaattgaaatgattgcatatagtttgtttcaattaagttctaaatacattatcgtagtgtaatgaaaaatatttttgattacaccaatatgctcataagtcataattaaaatctgaatttcattgtgatgttgtagactttttatttttgttcagagatgttgtggcataaatgactatatgggataatatcgttggctcgttgtggtatctctctaattttatctcattgtaattccattgctgcatctaactacttacttaagttgtgttttattttatttttataagataccccaaaatg

SEQ ID NO: 31947 - DNA, 3003 bp, Unknown
  misc_feature (1)..( 3003): 2750-1469P.txt file - cDNA_ID_3047543; gDNA_ID_1621201; Annot_ID_174930
tgacttagtcgaagaaaacgttcattaaatggttcccgccaatggcccaacggccccaaacgcgtagaacgtaacatgcatggggatccatattaatggcttcttcatcccacttgcttatttctttcgactttggaggtttcatttacctattatataagggaatgttcagttccagtgactgagatatcacaagcaaacaagagaagacattttattgttatttctctctctctctccttgtagatggaacttaagggcgttacttgtttgcttctttctttggttttgcttaattcgtgtgtggaatgtgttttgggggatggatctgtggtgggtcctgcgaggtttagagacgatgattgtaggtggggccggaggtgtgctggacgtggccggtttggacgcggtggtggtggagggttcggcggtgggagaggaagtggtggcggtataggcggtggtggtggacaaggtggagggtttggagccggaggaggagttggtggcggagctggaggaggacttggtggtggaggcggagctggtggtggtggtggaggaggtattggtggtggttccggtcatggtggtgggtttggagccggcggaggagttggtgggggtgctggtggaggaattggtgggggaggcggagctggtggaggcggaggaggaggtgttggcggtggttctggtcacggtggtgggtttggagccggaggaggtgtaggcggcggtgctggaggaattggtggtggagggggagctggtgggggcggagggggaggtgttggcggtggttccggtcatggcagtgggtttggagccggaggagggattggtggtggagctggcggaggagttggcggtggaggtggaggtggaggtgggggcggcggaggcggtggtgccaatggtggatccggtcacggtagtggttttggtgctggaggtggagtaggaggtggagtaggaggaggtgctggtggaggcggtggaggtgggggcggcggaggcggtggtgctaatggtggatccggtcatggtagtggttttggtgctggaggtggagtaggaggtggagtaggaggaggtgctggtggaggcggtggaggaggcggtggcggaggaggtggtgtgggtggtggatccggacatggtggcggatttggtgctggaggaggactcggcggtggtgccggaggaggactcggtggcggtggtggtgctggaggtggaggaggaggaggtttggggcacggtggtggtgttggtggagggcatggaggaggcgtcggcattgggattggaattggaataggtgttggggtaggtggaggctctggtcaaggttccggcagcggaagcggtagtggtggcggcggcggtcgccattaatcaaagctcttattaccaatctcacgtttagtgtcttgacaatactacttcttgtcattctatttctcttgtattgtttcaagactaaacaaaaaaatatgtatgatacatttttcacttcaagatgtgatttcttctatttttgtgtaagaatgttttcaaaaaaaaaaaatctaataagaaaatattgaatacggattgatcttaattttggacttaatccgttttctttctttttctctgaagacatctagtcagttttctaagaggaacacataaccaacattgtttcaacaatatatctttctttttgcaaaatacaaatttcaattgaattaacttgtgtaacatatgtacgacccatatttcagttttgaggtcctatcgtcagatatttctctacgaaagcaacataataatagttttagcttttattgctgtattggctacgttgacttatttaaaatttgagtttgcataaacaataactttctacaatgattttgcataaacaataactttctacaatggattttgcataaacaataactttctacaatgattttgctatagctatcgtcattttgtgtcaaccgcttgtgtctactttcaatattgattcttgaaacttgcctaatccttaagaaccttaacaaacacatgaaataacatctcatggtcacggtcacttccgacctttaaatagaacaacaaccaaatctcgtcatggactcatggaacattcgaaattttgccaatgatgaaggagactgacgtcgataaagccgtcatctaaatgtctaaagactctaaactcaacatgcatgttatagtgcttttctatctacgcaccaatgtctatttcatttttttttctttttttcagtttttagtttaatgatcgaaactatatggtattttaagttttttttttctttgaaatataccatatactccctccgtcccactaagatgaaatttttagaaatttcacattctttaagaaatattgtataaagacaattttaacctcttaatatactttaaaaacaataataaatatttatctaattatttagtaagggtaaaacgggaaaacagttttaaaatttgcattggaaatataaaacttctatctttgtgggacaaatatttttcctagaaaatttatctttatcggacagaaggataaagtcaaatagatcataaagctatagtttccatcattaattaagccattattataatacagtatctactaaaagttttggtagttatgtagagattgtgattttgcgtctcacattacacatgtatcggtttcacataatgtctataatatacgatacctaagttaattttccatttagcattgcttctccaatttaatttgatacaagatcttttggttagattgctgcagtcacaatttgctaatcgaaccgataggttagttgacacgtctgtataatgtcgtgtttcccgccgttctggacaatcaacaaaaaatggaaaaatagaaccgaccactttatagaacatagtaaccctaaacttaaaattttccaattatcctcaattttgcgaattaggacagagatg

SEQ ID NO: 31948 - DNA, 3003 bp, Unknown
  misc_feature (1)..( 3003): 2750-1469P.txt file - cDNA_ID_3047558; gDNA_ID_1621192; Annot_ID_174614
gttgactaatgcaccggtattggtcttaccggaggaaggtgagccctatacggtttatacggacgcatccgtagtgggactagaatgcgtactgatgcaaaaggggagtgttatcgcatacgcatcaaggcaattacggaaacatgagaagaattaccctacgcatgatttggaaatggccgcggtagtatttgccttgaagatttggcgatcatacttgtatggtgctaaagttcaaatctatactgaccacaaaagcctaaagtacatattcacccagccggagttgaatctaaggcaaagaaggtggatggaacttgtggcggattacgacttggatatagcgtaccatgcgggcaaggccaaccaagtcgccgacgccctgagtaggaggcgctcggaagttgaggcggaacggagccaagtggacttggttaacatgatggggacattgcatgtgaatgccttgtctaaagaagttgaacccttagggttgggagccgccgatcaggccaacctgcttagtaggatccggctggctcaggaacgggacgaggagataaaaggatgggcactaaacaataagaccgagtaccaaacctcgaacaatggtacaatcgtggtgaacggtcgagtatgtgtgccgaacaatagggcattaaaggaggagatcctaagagaggcgcatcaatcgaagttctcaatccatcctgggtcgaacaagatataccgcgaccttaaaaggtactaccattgggtaggaatgaagaaagacgtggccagatgggtggccaagtgcccgacttgtcaactggtcaaagcggagcatcaagtaccaagtgggttgttacaaaacctacctataccggaatggaagtgggaccacataacgatggacttcgtcactggtagaccgattgactaagtctgcgcacttcatggcgatctcggataaggatggagcagaaatcattgccgagaagtatatagacgagatcgtgcggttacatgggattccagttagtatagtgtcagactgagacacaaggttcacgtcaaagttttggaaggctttccaaaaggccttaggaactcgagtgaacctaagtactgcctaccacccacagacggacggacagtccgaacgaacgattcaaaccctcgaggacatgttgagggcatgcgccttggattggggaggaaactgggagaaatatctaaggttagtagagtttgcatacaataatagttttcaagctagtattggtatgtctccctatgaggcgttgtatggccgagcttgtagaacaccgttgtgttggacgcccgtgggcgaacgtcggttgtttggacctatcatcgtggatgaaaccacggagagaatgaagttcttaaaaatcaagttaaaggaagcccaagatcgacagaaaagctacgccaacaaacgtcgaaaggaattggaattccaagtagaagatttggtgtacttaaaggcgatgacctacaaaggggcagggcgattcacctcaaggaaaaagttaagcccaaggtatgttggcccgtacaaggtgatcgaacgagtaggggcggtggcatacaaacttgaccttcctccaaaactaaatgcgtttcacaacgtcttccatgtgtcacaattacggaagtgtttaagtaatcaagaagaaagcgtggaagatgtacctcccgggttaaaggagaacatgacggtggaagcatggccggtacagataatggaccgaatgacgaaagggactcggggaaaatcaagggatttgttaaaagtcttgtggaattgtggaggtcgtgaacaatacacttgggaaaccgagaataagatgaaggccaatttttcggagtggttcaaggagatgggtaaaggtcaacttgatgcggattcaaggacgaatccaattcaagggggggagacttgtaacgcccgcgatcctcaataggatcgttggctaggacttggtccgagagaagaaggtggagtctcggacaagcgagaaggagctggccataagctcggacaaaggggaaattgtaacgaccgcgtcccgcgttcataaagaggccaggttgttttaggagaaaactagaccatggtcaagaaacggactagaatacttagtcagaagaataagaaagttcaaagctgaaccagctaggtgagctggacaagctaggatgaactagctagctaagctaggtgagctaaaccagctggaagactagctagctcggctaggtgagctgaccgacagctcaactgagctcggtgagctgatcgtgtactgacccagctgggtggtccggtcagctgacactcgagctggtggactgtggtagctcacgggtgaagaggtgtctcggccaaaaggtgtaaggtcgagcgggtaccaacgaacggttgcatcgcctaatagatgcaaggaacggatgtgaccttttggaaggatgcaaggaacggatgtgacctttcggaagggtgcaaggaacggatgtgatgcttcgggaagcatccattcgccccctatataaaggaggacgcccaaggcctttggaataatctcacatcatctcacaatctcacaatctcacatcatctcacaacatccaaaacaccataaaacgttcttaaaggagtcccaacacatcctagagttgttggtcggaaaggggatgcggctcggcgagtataactcgaccgaactgatgcacatgctacctcccgatccaacggttcgatggagtgtagaggatggagagggtagaccgttcgtcttagagacgaatcggatctagtagaccgatcgttggatcggatcggccagaccgatcgtaagacggatcggccagaccgatcgtaagacggatcggatcggccagacggatcggacagaccgatcgtcggacgggtcggatgggacaggccgatcgtctgacggaacgggtcggacagaccgatcgtcggatgggatg

SEQ ID NO: 31949 - DNA, 3000 bp, Unknown; identical to SEQ ID NO: 8087
  misc_feature (1)..( 3000): 2750-1469P.txt file - cDNA_ID_3047570; gDNA_ID_1621192; Annot_ID_174603

SEQ ID NO: 31950 - DNA, 3003 bp, Unknown
  misc_feature (1)..( 3003): 2750-1469P.txt file - cDNA_ID_3047606; gDNA_ID_1621193; Annot_ID_174639
atttgcaccctttagttgttgtgtaacttgtgttactatcttctattttgacaccaacagtcaacacgttgaaccccataaggcatgcttgccttgcaggctgcagcatccaatagcattgcaacttgttgacctgaatagaacacaagcgtggagtatccgattcgtcagcgctgccttgttatagcaattgattcttgcaaagtaataatctgaagctataaggttttttgcgccacaacttgacttgcatcccaccacacttggctcgacattcgttaaggatgccgtattgttgcaaccagccgctataagtgtttgtgctatttttcttatgtatctcttctctgtttatagtctcagatttctggtatgcaggttgtggccagagattctgttttatgaagctggtccattgatggcctaaagagtgaatagataagttaagcagtgaaggtccctagtttctgcaacttcaaagagctagaggaatgtgttgagacattttgagatatacacaaacaaaaattaataactaagaagttcattaaataaacacataaaacagagtagtcatacaatagtcagatatgcatgatggacaaagagatattcctaaatatagatagagcgtttggtggaaacaacttcacattcagttctacgcttaacacaaatagtcctagagtagtagacatggcatgatagctaaatagatatagatagagtgtttggtggaaacaacttcacattctcttctacgcttaaaacattttcctagagttcacaacttcacattcgatctccacattcaaagtatcttcatccaagtaagcctcctgaagatcagctaaagacaaggattgaggaatacccctcgctttggtcgctgccatgatccattgttgaactacaagaacaaggaatcaatgtcgtcaaaagagttgggacatttgcttattgaaaatgtcatcagtatcatccatcaaggcaagacataagcattgtgaaaatagtaatatcaatagtttttgacttacgccagactgttttgtgtttggatccacgcgggtctaaagcccttagttgtgctcgcacggaaatcatctcaccaggcgataagacttcaccgtcagctaaatgcaagtacttgcagaactcgttatctgcctcagagtctccctttggatacacagttagagtcctgtaaaacattatcatccacttgttagcaagttaccactaatacactcatacaacaatatctatcagaaggaaaaaactcaccaattctttcctcccattgcaaaggttttagatatgcaatcattctgtttcagaacagagaaatcacgaatgctccaagagaatttgtgaaaagggagattctcatcaacagggacgggtgatgaagcaatcttcacatgagcaccaaactcacatggttctccttccacgataaatccctttgcagggtcagtgaatgtttcaagcgacatagcttttggcaatccccaaaccgttttagaagaactgaaacgcttaacttcaacatctacatgtttacacgtatacacacacattacgattcattcattcatatatacatacgagagaaaaagagagataataaggatttgagcatacgaaccttggattgagaggtacttgttgtctttcttgttaaagacaaagaaagagagataatcaaacacatcaatgggtggtgttgtggatgagagacattccacatacatagacacaaagccctttccattgtcctcttcgtttccttttgggtaaacaaccaatctcctgatttttacaaaaaaggcaacatttcttagttatatatgcttgtagtgaagaaagatgtgaaagtctgacaagagaacaagacgaaggaggagtctttctccaagtcttcaacattgcagaatctgatgcatatgaacccattttctctacaaaatgttgcaaccctagagagcaaaacaaaacatacccataatcagaaatgatctgacgaaaatcgagttacaatacacaagagaacattttttttagaattctcagatattaaaaatgacacagaaagctttatgctttttcctcttaaaagactaaacaagttgaaatctagagaaagaactgaccaacctgagacaacgagagagacttgagagatttcttcggcacttactattagatctagggtttagataccatttatatagagaaagttttagagttgcacaaaacataaattaatgtgttagaatgggcctaaagctacaaagctggcctggttttgttttaaattgttggtttcatggacattttcgacatcttcgaacatgttattttttgagactatgcaaacttgaagctctttactcgagttgaaatcgtatgacttatagtgaaattgtacatttggtttcgatttttcttttacactctttcttctttgagccggtaaatttggaatttttcttcatagtggaatcatatgctgttttttttttttatagtaaacgttacaagaatgaatggtaactttatccaaaaaaaaagaatcatattattttgaaatgattttaagtaaattctaggttcaataacataagatttgagactaaatttaaaatttcttagtaaaatatatgatttttttataaatacctataaaattagtaattaacaatacggattacgtactgaatcaaaccctttgtattttgtttttcctagaaataagtgtagatttttggaattttgcattaattaatcacttcttgggtctgaaaggctaaaacaaaaggaaccgaaagagaatgttctctctgtctttatcttccacttccacttccaggtcgcgttgcttcactctccattgcaaagagaggtctctgcgatttctgcaactcacccctgaaaccttcttaatttacttcaactgccgctatacctaaaaacttcatctttctcctctgagctatg

SEQ ID NO: 31951 - DNA, 3000 bp, Unknown; identical to SEQ ID NO: 8095
  misc_feature (1)..( 3000): 2750-1469P.txt file - cDNA_ID_3047610; gDNA_ID_1621193; Annot_ID_174636

SEQ ID NO: 31952 - DNA, 3003 bp, Unknown
  misc_feature (1)..( 3003): 2750-1469P.txt file - cDNA_ID_3047618; gDNA_ID_1621193; Annot_ID_174629
ctttgcttgccttctccttgttgctatgctattaactgcaatatccctaatagaccctttggttactgttctttcactcccaaaacttgcaattgctttggttgccatatctgagatcttctacttcattgtaatttgtaagtttcttattcttctctgttcttagtttctgctcagttcatgttttgatgtttggttatgaatgttttgattccaggggagagaaacaagtgaatctaaatcttgattcatcttcaagtgtgaaagggaggaaaaaaagaagaatatctgttcttggtttgagtcttctacttattttttgtctataatttatttttcagtcttcattaaatttcattacctactatctcagcaacatcatcatcctcattaattaattgtctttttgcatttgccattttttcataattttctagggttttttttgttttgagaatcttgttcacacttcaagcaagatttgtttcttcttctctgttcaatcaattctctctatctgtctttctctctctctttttttttttttttcattctcttgtttacttcatcattttgtttcttatgtgttttaagaaagttaaaagttagaatttagcatattttggaaaagagtcattgtttggttaagctggcaattggaagagtatttaatatgatgatgatgatggtattgatggtgatggtggtgatagtgaagctgttaaagttaagtctttgtaatgagtgacatgttaagaaaatggatcaagtttagtgccttattctgatctgataagatctttaagtgttttagtttaaaatagaggaaaaagagtaaaaaagcaattattcatcttcaagtgcagagactagacaatatctttgaatatgtttatttatctgacactgttattattgtaagagatgttttatgtcaaatgtttgttccaactctctctattgcgttagcgtaagtaacctgcaagatctgtaaattaattactaattgttatttattattcacacatgggacatcataaagttgtcttggtgataaatttagtcaatatgtgtgtgtgggttaagagtgttgactataccagtttccccgtgattgattggcttttattaaatcggacaatttgcatttatattcacaggtcatgtttattaaactctacattgctgtctaatgtctatagtacaccaagtctattggtgattgaaatgtcggagaacggtatagtttttctgttcttacaataaaaaggtagattaagaacactgattaactcaatgtaacccatacacttacacgtcgggtcaatcttgagcggtgatcttttgggtttacctctaaccccggactggttaaacacttttctcacctcaccacatcaaagccataatcagggcccaaatttgagtgcctacagcaaaaagattttggcccaataacaaaaaactgttttttaaaacaattacaaaattttcgtctaaattagattcaaaactgtatagtaaaatgtttgggactaaccactaaactacagtcacatttttgaaaatgatgactctaaaacaagttataattatttgctgcgtaatacccttgcttcatgggattacgtggagaagaagagtaagtatcaatcaatttattgctagagatttgcaaaagggggaatccgtgtgcagaggtgtctagatgaagccatgagtctacagcggagtttgaatttgcggtggatgagttacggtggagatgacattttccaaacattacaagccttaacacgtgtacctactgagattttgatagaacttgaaattgtttcccaaataaacctcttattcggaagttaggttttggactcaaaatggatgggatgcatcatgaggtatgagatatgtttcccaatgtagtctccggcgatgagattctttatcaccatttttatttaacgttaatacttaaatctttgtaagacagaaaaagaataagatgttagtcaagattagaataacgagacctaatttgtgaaattttccgtagctttttgtggataatagtttgtttagtaaaactgatccgaattaatgtgaactcgtaagactcctccatctcaatggagcggctaattagaacaactactaaattgtgacaaatctaaggttgtctcacataattcaagagtttaaaatatggtatagtcttagatatagatatcttataccaatattcataatttgctaaagctaactagacattcctagataatttaccgccaagaaaactaattaattggatatgtttttcttttctctataatttttgtatatttaattaatgtaaatatacaaaattatatcaaatatattatttccttatatgtttcattttaatcattttttattaaaatgaataattggacacctagatagctaggccaaaacaatttttgacattccattgacttatttacccaaaatggaaagtgtgggtgattctggctgtttagatgcttagacataatcttactttctatccaactaattattacctgtaactgtaagtttcaattttaggcattttatattaattatattaaaataaaaataataacaaatagaaaaatgtatagagaagaaaatatcttaaattacctttgaaatatatattttcctttaaatggactttctatataaaaaataaatcacattacatatatgatacaattttccccctaaatgtctggttttatgccccccaaaaggtaaaatatctatatgggctgtctataaagataaatgattatcactttaccatcaatcacatgccaacacgtaagggtgaaagtaataccatatcctgaaaataaaaattgaaaatagtccagcaaagcaataagaaacacattttatctagtatataaacaatcgtcctcatgctaacaaagcaaaacacatataacaaaaacaatagatatgaagagaaagatg

SEQ ID NO: 31953 - DNA, 496 bp, Unknown; identical to SEQ ID NO: 8107
  misc_feature (1)..( 496): 2750-1469P.txt file - cDNA_ID_3047627; gDNA_ID_1621193; Annot_ID_174621

SEQ ID NO: 31954 - DNA, 3003 bp, Unknown
  misc_feature (1)..( 3003): 2750-1469P.txt file - cDNA_ID_3047667; gDNA_ID_1621194; Annot_ID_174674
caaaatcaggaaataacgtgtacatgtgtatatcaaccgaacaggtggaccgtagatatcgactcaacaaaaaactacttttatgagattattacaagaactgaagaacatatgattaaatctaaagactgaacaaaattctctgcttattttgcaatttccaactgtaattcatttacattattttctaaacaccatttactggctagtatcttaacaacaacaggacaaaacacaaacgtttgttttcaacaatatcaaaattataaacgaactatatacttattttcgttttttctcttttgttagctaagccaaaactacgccgtttgacgatggagggatcaacgcctgatgctcgaagggctctattactgtaaacctccagcacttctgttccacgaaaggtacgaggggtctccgagttgcctgaaaccattaatacagaagatcatttcactgtacacgttccaaaatctgaaaagtgtaataatgtcttaacaaaatgaagcatgcatgaccctgagagtgacgtaccttggcttaactagatacaatacggcaaatgtaacagccaagaacaagcaaatactgcctacagtcagataagcaatcccgaggaaatcattccttccgccgagccagctagttgttgacagcactagcttcttctgcccattgaagctgtaagtgttgtagttgttctgcaacaagaccgttatggtatcacccgcgtgtaggtctgtctcaatcttcccatacagcttcctaaacgttggcaaagccgcggttcgcatccagactatgaggtcttcttgctcactcaactatccaacagacaactcttacacttgttaaaatcctatcagaagaaggaatctaaattgatcgatattcaaggattttttaccggtttagaaatattaagagttccaccgcctattggtgctcctttctgaaaatttttagggaagacatttttcccaaacttgttttctctgtcactcttccatgagatacctttcttattcacaagaagttgttggctatttcttgaaaagctataagtatcgttgaacaaactccaagcaacaagaccacatggcacaattggttctccacccacattatcctcaggtgcacaggtcttcacatcatgctcttcttttggacttcttagttgtgcatcgtttcgacttttcacatacctaatcatatacaatcaaccagaggagtaactgtattaatgcagggaaagtaacaggcaaaagcgataactattactaagcagataaggcaaagtaccgtctatggttttggtagaaattctcaagttggtagtatacatagacaggatgcttcatagcttttgtcacctgaaaaaaatgaaaggctttagaaagagccatacctagaagaacagctaatatacacaatcatagaaggaactaaattgccatagaagaagacatgtaccgttattgttctcttacagatcttatctccttcaccctgtatgtaagcgaccatgttgtttctagaagatgttggaatacagtctgtgtcatatcgatcaacaatctcgactaccttcaagtatgaatgaaacatatcctcaataaaaccacaaaaccgaagctggaaaataaaccattagaaaaggcagaaaaacaatagcatgatgcacatactccctgagaagcaaataagcagatcactccaaggggaatgaagacaaccccagcgacaagaaatgtcaagatcacctgcaaatggccatgaacaataagaaaacagcaaaaagagtaagagtcatccttttccactattgtaacattgaacttacccatcttggagtaagaattggcttgcacgctggaagctcttgctgagtaaacctagaatctggtaaagaaaattggttccttgtgaagttaagaacagagaatccaaagcaaccatacagtttgtttaatgggagaacaatgtttaaagttttcgaacaaaagatttcaaccaatgtcacatcaaaacccaacaactaaacgtgagtttcaactacacggtgtaggacaacttgaaaaaccaagctgatgaacctatacacctcttgtatatacgaatctacatcaaacccagagtatacaagaatgctattagaaatcaaagaaacatgcaaaaacacatggtgatcgaggtatagcaacaccatcaacagagaaatttttgtcaattcaatacgaattccaggaaagaaagaaaaaaagaagacgaaatttctaaggacgatccatgactatacaaaaagttcgaccaaatcagaagattagaaggatagatagagatagaaagatcacattttggtcgcttggaggtttttttgacaccggaaatctcagacgatccgcctcctccgacggtggaagatgccgcggtggaactcatcaccgaagaaattgattagaaatgaaatctcctctacaactatattccgaatcgaatggacggcatgagtcgttttgggaagaacagatcctacgcgaatgaggggaagaatgttaggttaggcttatgaaacatatctacttggggaagatgtatagatcttttagatgaagaagcaaaactctcgacaaggaaaaaagaaagacgactttgacaaatgctgttatcatgggagggaaaaataaaataataataagccaatttttatgttattttttaaagggcaatttgggtaaagaataaaaaacggaagttttcgaacaaacccggcaaatgcggttaaactgccacgtggattacacgtcattaataattaacccactcgaatacagtcaaataacccacctgtcatttttgacggatccaattttgaagatattttacttgtaaaaaatctcttgacaacatataatttcgttgcctagtagcttcttcacagcttctgatctcactagtgttcgtcatctttgttcgattgaagtttgggaagtggtgatg

SEQ ID NO: 31955 - DNA, 3003 bp, Unknown
  misc_feature (1)..( 3003): 2750-1469P.txt file - cDNA_ID_3047671; gDNA_ID_1621194; Annot_ID_57536
agcatatatgcccattgccatacatatatgtatattcttctactatcaacataagttagacagatcaaaattggttaaatatggtaaaaatttgcacattgtctccagtaaagtgatcttctgtgacaacgaaagtatgcaactaaagtgcgaatctttatgagaaacagaaccttatatccttccacaggttaccttgcaaggattctttgaggtttttgttttggtttgtacacatgcacatgacacacacacacatacgcgatatatataaagaacgagagagcgaagagacaaatatttaacctatcttggtcctgtttctttgtcttcttactcttgagagtgtatagctaattggttttatttctcttttggtattcatcttaaaaccatggaatcatatcgagtcttcacaactatttgtcttcttctttgtctctttctctcagccaacttcttcactcattatggtaaaatcatctctgtctctttctttctttctctctatccaactctatctctaaaagcatttgatattgattatgattttcttatatagtagtagatgcaagaaaaagcgtgggatttgagagagagccaaagaaggtgatgatgatcaaagcattaaagcacacatcattgttacagaaaatgatgacacagctcaatcttgctcagcctttagactactcttcatcctccaacactcaaccttatggcgttagcacaactctcactctacctccttatgtttcacttcccccactttcagttcccggaaatgcccctcctttttgcattaatcccccaaatactcctccttcctcctcttatcctggtcttagcccacctcccggcccaatcacattacctaacccacccgactcctcctctaacccgaactccaaccccaacccacccgaatcatcctctaacccgaacccacctgattcatcctctaatccaaactcaaacccaaacccacccgttaccgtccctaatccacccgaatcatcctctaacccaaacccacctgattcatcctctaatccaaactcaaacccaaacccacccgaatcatcctctaacccaaacccacccgttaccgtccctaacccacccgaatcatcctctaacccaaacccaccagagtcatcctctaatccaaacccacccattaccattccatacccgcctgaatcctccagcccaaacccgccagaaatagttcctagccctccagaatctggttatacaccagggcccgttttaggcccaccttactctgaaccgggcccatcaacacctaccggatcaattccaagtccatcatcggggtttcttcccccaatcgtttatccgccacccatggcaccaccgtcaccgagcgtaactccgacgtcggcttactggtgcgtagctaagccctcggtccctgacccaattattcaagaagccatgaactttgcatgtgggtcaggagctgattgtcattcaattcagcctaacgggccttgctttaagcctaatacattgtgggcccatgcttcgttcgcctacaatagctattggcaacggaccaaaagtacgggtggctcgtgcacgttcggcggcactggcatgcttgtcaccgttgatccaagtaagagaaatatttgtttatcaactattatttattggtaatattcatttttttaaacaatgttattgaatggcaaacaggctttaacgggtgccattttgatttcttctgatgcatgaagacgaagacagctctcactttacattttgttggatacgaataatatcaaagaaatctagatataatatgtttaggtgggtcgctcacttgtaagttgaaaccaattaaagcttatttcttgggaatggcataattataaatcttatgctaaatacgtatattgcttttgctaatggaattaggtcttctagacttgtggtacgttgcatctacttaactactatcactaataattcctttatttatacacacatcccttttctcccacaatgatttagtagctttgaaataaagtaatatacgcattctcagtttctcaccacgacatctttttttatttatagaaaaacttctacgccggtctattatctcaaacacgtgaaatgtcaccctgctaggttttgctgttgattagcgttgttcactaattttgtactaggtattcaaaagaatcgcaactgcagatttaagtgagtatatatgaaagagtctcaacaatgtaagtgaaacagtttacgtaggaacaatgtaacttgatgtaccttattctgttatacgaaaaacattcgtacaatagaaattaatcgttacaaatgtgggttaattctaccgtgtgcagatattgcgtgagtactttaatcacttgaatattttggttcatgcattttgttcatggtgaactagcaaaaaattagttgctataaaacaatatggcctttttagtaaccaagtaattactggtctagtggcgttttgaagacatatgaactgtggtttcgaactctgtgggtgaaaaaaaaaaaaaaaattttgtattgatcagaaaaattcggcaaaatccagagacctaatgttaaatggatacaaaagaaaaaaatgaatataatgttcgttcagcatttttgttttgtattgtattctgtacctatggaaaattagtttttaaaccagaatggaacaaaaaaatcgaatatatgaaaaagtggtaaactcaaaatcggcaaaaaaataaaaacagaaaaaaggtgagaaaataggaaaaaggtaaaaaagtaaaaaaaaaaaaaaaaggaagaacccttccgatttgatttgattgggactatataaagggaactctataacatcatctctctcacaagtcgcaacgctccaacgacttcaattcaatttactttcgattttgtcctcttccaaaaacccttccgcttaaaccctaattcacttcgccggccatg

SEQ ID NO: 31956 - DNA, 3003 bp, Unknown; identical to SEQ ID NO: 31955
  misc_feature (1)..( 3003): 2750-1469P.txt file - cDNA_ID_3047671; gDNA_ID_1621194; Annot_ID_174671

SEQ ID NO: 31957 - DNA, 3000 bp, Unknown; identical to SEQ ID NO: 8121
  misc_feature (1)..( 3000): 2750-1469P.txt file - cDNA_ID_3047679; gDNA_ID_1621194; Annot_ID_174668

SEQ ID NO: 31958 - DNA, 3003 bp, Unknown; identical to SEQ ID NO: 16914
  misc_feature (1)..( 3003): 2750-1469P.txt file - cDNA_ID_3047683; gDNA_ID_1621194; Annot_ID_174666

SEQ ID NO: 31959 - DNA, 3003 bp, Unknown
  misc_feature (1)..( 3003): 2750-1469P.txt file - cDNA_ID_3047687; gDNA_ID_1621194; Annot_ID_57528
agcatggcagattctcttataaaccataaaattagtatccccggcagaagtgcaatgaaaactttcatgaagtagtggatctgcctcttctgaagaagatccacctcaactccggcgttgcaaatagtctcaaacaagtaaggatctaagggaatgtcaacctagaaataaaaaggatatgacatggtgaatgtacatcattcatttccaaatacttgcaactataatttttttacttacaatatattctagagggaaaccttctttcatggtcacatacaatctctttaggtcttccgtgaaaacaacagctgcaacctgttatgaacacatacacagattatcgtgccaacataagctaaaaaaaagatctatcatcctatcacgtccagcttcaaattaattgctttggaaaaggaatatattcatcatattttaactcataatgaatataccatcacttgttatcatttaaaaaattcaactggatataatgacacttgccactcacaatcccaaagccggacaagagtataggttagagctgtacctcagaagaatcaagcttctgaaggaagtaggtatagggaagcttagggcgatatcgccaccatctctttgatatccagagagctctagttccctcagtttcagatgtccttccaataacatcttcgcgaagacttttctctacctctttcatatcaaattcaaccacatacttcgccgctgaggagtttaactgttctgataatttttctcgttctaacatttccttccaggttgcaagcctttcccgccaattacctacactgtctccaatttcacctatcatagaagaatgcaatagaggattagatggtcaaaagcacaggttaccaatgatagtagatgagggatctagaagtgctgctctgaaagaaacttgattagtgagataagattaggtcgtcaaaaacaaaggtttcgcacaataaatcacttcttgttatatcttcagcatgccactactaaacaagtatcacctaacgaatgtatactgaccagagacacccagatcttggcttagtttcttctttgcctctgtctgaatcctagcatttctaccaattattttcttgagagatccctctgtggtctctagatcgtcatcccacgcattttctccaacataagaactatcgtggacaagtgttccatcaggcgcttcaatgaacctttttaatttcaagcctttaggtgttgctttcctccacatatttctcttgaacctgaaacactagaataagtcaggacattctacaaaatcaaataaacagaagttcttttagtcttcccactcttgacgctttagatgcctcattagctgagtatttacttgttaaaggatgataccatagtttgaatatgaaccatattttaccatgtcccagtagagaaaattacaatcggaaactgaggattaggaagcacctacttttctatatttccaggagatggctcggggatcaaagcctccataaaagactctgttaactctcttctctctcgttctacccgaggagcttggatggcaacataaactctttgacaagaaagtaacagcgcaaaagcatatatgaacaaggcagcaactcgtttaccgtcccaattcctgatgtcctgatacaatacatcttccctcattaagaaacaacctaatacactagtatatgtcgctagaataagcgtagttgtagtctcctccaaaatttatgcttccgttaaatcaacaacaaaataaataaataccatacgtttgtccctcaatgttttagaacacaagcagaagtctaacaatacttgagaatcagaaatttgataattacgttaaaaagctgaaccagcttaccttccaatgctcccacttgttccaatcaataaacgaaggcactgtctcattcttaaagcgagtcagctcgtgatggcccttgtgcacactatccttaactcgagccacatactcattcactctcccacttgcttcttccgagtcaaacccaatttctgtcttcacagattctccaatcttctccccaatccgctcggcaccaaggcgaatagactgagccaatctcacccacgaaaagcctccatcgctattagatgaagacccactactactttcagacgcatagactcgaaagagctgttttttccgggtagctcccagtccatacttggcgggaaaccgaacaagaccaaaactttttgatcttttcaacaactgagtcgatgaagagataagcggattcggtttatacgaaattgcaatctccatgaatgaaatcacaagaaaaaaattaaaaagagaacaaaaccagacgcatttgaagatttttcccgattaaagagctctctctgagaaaattactgaaggaaaatggtgagtaccaaccattcagctcactcgactctccggcaagacttacgcttctctccggtaaggaggtttatctacactgatccgtcgttgagagtgtcctaatacttcgaaggagaaagatgacgcttaaactcaaagaggctcgaagcctattagttatataattgggctagcccattaaggtccatcagcccactatccgaaaaataatatatttaaaccgtggaatccaaggagagacacagtggcaaaaagggtaattatagggacatttcttggggtgttgtccaagctgcttttatataaggaagggatattgttctctcgcttctcgaaagatccattcaccaactctttataccagcctctgtaacgttcgatcatcttgtatttcatttcaaccactcatgtaagtatattctttcttcagattccgattgttttcttcgattaagttttgagctagattctctagatctgtttcaccgatttggttgatttctccgtcaatctgaactcgcggtgtgcatcttgttgtttgcagtgtttttagtttgttttacgaagaatcaactatg

SEQ ID NO: 31960 - DNA, 3003 bp, Unknown; identical to SEQ ID NO: 31959
  misc_feature (1)..( 3003): 2750-1469P.txt file - cDNA_ID_3047687; gDNA_ID_1621194; Annot_ID_174663

SEQ ID NO: 31961 - DNA, 3000 bp, Unknown
  misc_feature (1)..( 3000): 2750-1469P.txt file - cDNA_ID_3047703; gDNA_ID_1621195; Annot_ID_174711
gttcatatatactaatgtaagcatgctggatctcgttttaatattttaataccatatatatgaattatacatgattgacaaatcaatgatttatactcaaaatgttatatggttggattcagtcaggaggacatgggtgttataatcccttatgtccggtcggatccggaataatactagtcagtcatgaagttactcctggtttacttaccaagcacaacgatttcgaactctccataattaaggtcagtttttttccaaaaactattaaagacataactctgtgtgttttaggtatttttaagtatagtatggatatgtagtgttagtgtttttttggtgagatctagtgttagggtacttgtattccattcaatatatatatcttactttttactttttcatattagatattgcaaaaacatttgcataaaaataattaaacattgataaaaatagttattaaaattaattgtaagctttttgtctataatctttgccttttctatatggattttttttttttttttgaaatccatgaggttctgggccgaaacccataatcttctcagacccaaagccaaatcatttaacattagtttcgtcccaaacgtcactcgaatcggcgacctctaagtttcgcctagggtctttaccaattgagctaacgatacttggttttctatatggattttgttgagtacaggacaaaatatacgggcattggtggcttttgatgggtaacagtagcagctcaacttggaaagaaattgggttctggccaacacataggttcaaagaaagttttggtacaggtgtcgaatggggtggtgaagtctatagccctgcgtctacaagtcctcctatgggtaatagtcattttccgaagggagccccaaaatagactcatatgtccgtttgatcacgacttgggacgaaaattatggtttggacatggttgtgaaaaacacagagagattttcaaacagttgttataaagtgaaagatgcacagagtcgttttggccagatgtaggtcatcttatcgtttatggaggccccaggtgtacataaactttgttagtgcgtagcattattccaaaattgtagtatctgaaaatgttcaaaataaatcaagagaattacgttcttactatgaataaaaatatataagaaaaacgtaaagaaatttaaagaacatctttatattctttttttgttatcttgtttgacttggttagaaaggagaagacaaaagaactatttatatgttccaaattttaaaaacatcttacttattacatcatatatcattagaaaattccactacattaccttaaagatatataatattttctatagagatatagttctagacaaactttacttggtgtgttaacactcttaagtttttctagaacttagacttagttaattttgagtttggtccaataattaaactcttgatcatgatcccgtgattaaacttaacccaaagtcaagtttgatctcactaccggattatttgaggtgaatcaaaatataacaatataccatgtaattggtaggcaaaataaccaaaatttgaaaaatcaatccgaaccgaaataaatggttttatttggttatggttttttcttaaaactcatttggttatcatttttcttaagtttttggtttaggtttggtttggttaaaaaccaaatgatttttttttgtttttgattaaaattaagaataaccatatatactaatatattgtccaatttatattatgattagagtatcattggattttttctttactagacttatatacagtgatctcttagtaatatctgattattcttatattatttttattctacgtttcattttatttatgcatcaaacttatactttttttttgtaaaatacatggaataaccttaaaacccgtacccaaaccaaaaccaaaccaaaccaagatacatatagttttttatatgatttcaatttttacaaaactgaaaacccgtcataaattgtaaaaccgaaccataaccaaacttaattacatacggtttctttatggtttcaagttttttgtaaaaccaaaaaaaacaaactgaaactaaactgaaaaactgcacgcccaccctaatactatatttaaaaataaatctcaattaaaatcaaaaattaaagaaattaaagaaacaaaatacttatgattttaaggaaaatctaagaataattatttttatttattattttcatttgtcattctgaataatcacacaattagttttatacaaacattgattatgtcacatcattttatttatagtacatttttcttattttaatttatttataaatataatttatacaataggattataaatgcaagagaaaaaaatactatcttcaatttacacatagaaatgtattacaaatacttaaaataaatttcttattttcagattttttttagaggaaaagttacaaatattatgccaagcttgtgttaagaagttagcattaaagatatgaataaatgtcatcaatatatcgatgtaaatttaagaagaaattatgtttgacttgtatggtccacaaataattatgtcatctttgacttgtgcatggtcaaaaataacaataaatctcttaaaagcattcatggaaattagtaattacttagtttaagaagaaattttgtttgacttctgtatggttcaaagatatatatactatatttaggtttgaaggaatttaaggaaacgtatatgtattaattattttttctaacccttagctaggtgtatattctactctagtgaatcattcagaaatattacatttcttgtgagaaggtgattatcccaaatgacttcttcaaatctttctcctattactatatctcaataataactgtatatatagaagaaaaactaattatcaaatttctctagttcacaggttaatgaaaatgaaattggggtgtgcacttccaatg

SEQ ID NO: 31962 - DNA, 3003 bp, Unknown
  misc_feature (1)..( 3003): 2750-1469P.txt file - cDNA_ID_3047723; gDNA_ID_2926132; Annot_ID_196997
gatagcccaacaaaaaaatcaaaatatactgaagacgaatacgacgaaggaaaataacagattaatgaatctgttcgcgtgtaaagcttaccaacattcggaagcaacatgtttttttacactttttcgtgctacttaagtattggttgtatggtttgctgaggtttaatgtatatgttcattgatacatttgtattattgatttcaaattaataaagaatgaagatgttaaataaaaaaatattgcgtaatacatttgcatatatttttttctcgaaaagtggaagcacgactctgttgcgcaagccatactcttttggcattctcttttcttaatgataagaagataagaattcgtgtcgtcttttcttttctttttcaaaagaattcgtgtaatggtctagtcacaaatccataaacaagattaggtttctgattaaaaaaatcttgtaatttttagaaataaatatctgatctcttcccaataacaatttttgtcccattagtatgtttaactcagcgatcacttaatataactcagtcgtcacttaagctaactcaaccattacagaacatatctcagtcgtcacttaatataactcagccattatagaacataactcggtcgtcacataacatatttgccaaaaaaaaagagaacataactcagcctttacagaaaaaatcaaaacattaactcagccgtaacataaatattgataaaaaacagaacataacagagccgaaaccgtacctcaccaccattcgctttaatatcttcagcaatgacctattctatagttgcacgggtacggctaccaccccatctaagcaacggaatctcatccgtgttaacaacgttcccaaaacgctcggcgatggtgatgattgactcatacgcccaagcctgcaacacgaaaaccagaccactgacggtgtacgtcttgccaataggcctcagcaactttatagaaacgacaagggcttcatatgctgcccgaccccatggataagtcttcatggcttcgtcgtcgaaaactcttttggcactctcaaatggtatcctagagttagtatgcaagccaaaaagtccaatggatagaagagtcaataacccaaaccatctacgcttttcaggaggccaagctctgcacgttactaagccctgcctaagttcatctagattatgaccttcaccggttggcacacgcaattcactgaagaacgctttgtagtcagcttcaggctcaaacttttctgtaggcagttgatctatatttaaacccgtgatatgatgaaattcgttcaatccaaaccggatgggtttaccagccacgatacaccaaagctccttcttcagtattctcagctgtctgcatagtagataatgtacggtcttaccagaccatagaaaatgactatcaacaagcttagcaattaatccaagctctgtctctttcagttctgcccatatttcttttcctattgattctctaattgcagggaactctcccagctttatattatgattaatgcctttaccctccagattagaatccccctcttggtaaagtcttggagggtactcccttgcttggtcttcagacatctgtataaccataaatcagccgtaagcattccataactcagtgataacataaaacaaactcatccacagataccataactcaggcaaaacataaatctaactcagccatagataacataactacgtcataacataaacctatctcagccacacataacataactcagccataagataaatctaactcagccatattttaacagaaactcagtcaaaccataacataacaacagctcagttaaaacataaaccagactcagctatatcaaaacagaaactcagccataacataaacaaactcagccgtcatataacagaaactcagacatcgatgtaaggttaaaccataactcagtcacaacataaaacaaactcagacacagatgaattgataaatcataaatcagtcggcaaacaaacaataactcagccgtcaaatcaaatagatcttagaaatcggccaccatatgtcaatcaacgacgacgttaaaacccagctttaaaaactatcgttacgcatcggaaaacgatttcagtgacgggaatcacttgcgattgaacttagatgtcagagtcttacttaatggaaacatactcaccggaacttagatgtcgaatgtgacttcgcgcttacggaaatgcgactgcggcgtctgaatttcggccggaacagacgagaaaagagcaaaacggcgaaagaaatcgatttcgttccgtcgagagagaaagaggaagaaagcgacagttttttttttttgggagatgatgaacagtaaagccaagaaataagaaacccaaacgttatgcggtttggagatgattaatgacgtggattatggtaatgacatggaatgatgacatgtataatcactgtttttttatttaatttttagttaaaaacgaattaaataataataattaattaaaactagttaggggtgttaattgtaattacacaattactaaaaacatctgagtaataaaaaaaagatgtgttctattttaggaataaacatacaaatgtgttttatcttaggaattatttcttaaaaaatcttgtaatttttagaaataaatatctgatctcttcccaataacaatttttgtcccattagtaccaaaaccatatttcaatttgggatttatttctataatatcaaacccgaattttgtaaaccgaaccgggacaggataatgggacaaatgagcacttgtattatcacgtgcattaatcattcaccagttttatagtagatcacagtggttcatatgtatctagacgcaaactttgaatcattcatcaacgcaatctaagtacaaatatagatctcactgcaatgtttcaagcaccaacctgatcatcatcaaaaccatttcatccgtagtggtcaatg

SEQ ID NO: 31963 - DNA, 3003 bp, Unknown; identical to SEQ ID NO: 31962
  misc_feature (1)..( 3003): 2750-1469P.txt file - cDNA_ID_3047723; gDNA_ID_1621196; Annot_ID_57574

SEQ ID NO: 31964 - DNA, 3003 bp, Unknown; identical to SEQ ID NO: 31962
  misc_feature (1)..( 3003): 2750-1469P.txt file - cDNA_ID_3047723; gDNA_ID_2926132; Annot_ID_138797

SEQ ID NO: 31965 - DNA, 3003 bp, Unknown; identical to SEQ ID NO: 31962
  misc_feature (1)..( 3003): 2750-1469P.txt file - cDNA_ID_3047723; gDNA_ID_1621196; Annot_ID_174744

SEQ ID NO: 31966 - DNA, 3003 bp, Unknown
  misc_feature (1)..( 3003): 2750-1469P.txt file - cDNA_ID_3047760; gDNA_ID_2926139; Annot_ID_197365
ttaagaaagaaataaagtgacaatgtgatctgagaatagagatcttatgggttgactttgcttcaaccgtaaggtcgcccatgctgtctctaaatgcacgtgcagctgtttgttaatataaattcacatgaagacaaaacagaagctgtctttgtccttggtacatataatagcatgtaccctttaattcctttatgactacgaatctaacaacttaatgaatgagtcttataagagtaacatttaacatactgaaattattaccctatgcactttactagttggatgatttggttggcctaatatgtaatgatcatggtcaggagaacttacagtgtgaaaaggagcacaacagccctgtctcagtgtttgagattcaacatgaggaatatgacgaaacatcagactcttctttcagtcaatgccttgacaatgtggaaagtgagtatagatttccttcattgcaatcgaagcaagttctcttcttagattttttcagacttcgaagttctgaaacatacgttatgtaaatgattttgcaggaaccaaacaaaagctcatgcaaacgattcagcggtttgagtctttggccaacattagtcctttcaatttggatgaatggggctcaatggatgaagcatcttgcatggaaggaggacaagagacagataccaagtatgatgatgatgagaattgtgatactgttgatagagagagtgaagatgaatacaatgatgaggttgaagagaaggcagcacagctatggaaccgagtcaaagaaagacacgccatttggatccacgaagaacatctgataatggactatttcagagatgaattgatgcaaaggacaaactcattccacgaaactcaacactttgagaaccaattggtatgcgaggcaaaaggatggttgcagggaaagagagaatcagagcttgaacgcggaacaagtgagcagaggagacaagcatgtgctagagaaatcgaaagacgagactggaatgagaaacagatagaggaggagcacgaagtggtggttacacagattgaggaagaactcttcagcctgttaatggacgaaactttaacaacgctctctaccaaaactgattccagtccacctgaacatcacaaaacagtaacatcaatgcttaagctttagaaattagaaagcaaaaacatttttgaataaggctttgacttaaaagctcaggtttttttagctctacttttgtaagaatgaagcaaacgaataatacaatgtatattgacctctaaaaccatatatatatatatgcctaattcatatttctgcaaaaaaagatcaatttttagaagctaaatccatgaacgagttaaaaagtgacctcattcgaaacgagcaaacaacataacagaaaataaaaaggttaaacttaagaaaatgtcattcgcaggaataattaagcagcaagcgtggattcgcgatcgcagccattgaaattaaaatccctaaatcaaagcctatctatgggtctgcgaaacaatgaagatggaattgaaaaataaaccgatagaagaaactggagaagaagaagaagaagtaaattgaaaaaaaaatggaaagaagagggaaataagttggagacgttaccggtggtctctttccaggttggtgaagaagcttccgatatgtttctcatgtttttcgctagtcactgaatttatagatgactaatggactcattatattatctcacgaagcccattgtgttttttagagtcaaggagcccaattgtttttctttttcttttgataagggaggagtccatttgttttagtctaaggtgaggaaatttgggtattcgggtcgggtttggatcgagtctttcgggttcggtttagaagtttaagactggttcgattatacgtattatttaagctataggttctcttcgggtataggttgaagaacccaataaataaccaaaattattttgggtttcaatattatttaccaaaaccttgtccagatatacccaaacatatataaaactatccataaaattataacaagttttcctttattacaataataaaaaacaagaaataaaccttgtttttaacttgttccataatccaatcattaaacaattcacaaactcaagttatcagtatatatgtcctcatatgtatatatatgttcgggtaataaaaaatactcacggatatcaatttcggttcatgtaatacctgatacctgaaattatttgagaacagaacccgggtattttacaagaagatatgataagacctcgtttgcaaatctcagtccatgaactcgatttctttttttcttaaggaacaagtttaactatccaatactgaatatacatcaattcggtactaaatgtatagtagatacgaatttcctccggaatgactcagagaacagtgagagattagtagataagatacttaacttttggggagagacctcaggacccatatgacttgaagactcacaccagctctgaagttagacgggttttgggtctccgggtcaagtttaaagaaaaaatgttaaagtagatttccctttctactttggtttgagatgagtttagaatttagttcgatgttacgaacgtgaatatatacccaaaacttgtgatgtatataaatgcttatcaatctcgaatctctctgttactgtagcgtgtaatccacgtttgaagtttttgttcgattcgataaatgttggagccaaaacagagacatcaacaaaaacatgggatcccaatgaataaatagataaactcttgtctgtctataaatagacttacatcttcaaaaaagatttgtataagtctcctccacttaagaagatatcatttgtagcttcttacaatgtcgcgaccaatccccattgaaggttaaataataaacataattttgtgtcttatctctttagtctttatacaagttcttataataattttctcttcctcacagaaatg

SEQ ID NO: 31967 - DNA, 3000 bp, Unknown
  misc_feature (1)..( 3000): 2750-1469P.txt file - cDNA_ID_3047760; gDNA_ID_1621198; Annot_ID_174795
agaaagaaataaagtgacaatgtgatctgagaatagagatcttatgggttgactttgcttcaaccgtaaggtcgcccatgctgtctctaaatgcacgtgcagctgtttgttaatataaattcacatgaagacaaaacagaagctgtctttgtccttggtacatataatagcatgtaccctttaattcctttatgactacgaatctaacaacttaatgaatgagtcttataagagtaacatttaacatactgaaattattaccctatgcactttactagttggatgatttggttggcctaatatgtaatgatcatggtcaggagaacttacagtgtgaaaaggagcacaacagccctgtctcagtgtttgagattcaacatgaggaatatgacgaaacatcagactcttctttcagtcaatgccttgacaatgtggaaagtgagtatagatttccttcattgcaatcgaagcaagttctcttcttagattttttcagacttcgaagttctgaaacatacgttatgtaaatgattttgcaggaaccaaacaaaagctcatgcaaacgattcagcggtttgagtctttggccaacattagtcctttcaatttggatgaatggggctcaatggatgaagcatcttgcatggaaggaggacaagagacagataccaagtatgatgatgatgagaattgtgatactgttgatagagagagtgaagatgaatacaatgatgaggttgaagagaaggcagcacagctatggaaccgagtcaaagaaagacacgccatttggatccacgaagaacatctgataatggactatttcagagatgaattgatgcaaaggacaaactcattccacgaaactcaacactttgagaaccaattggtatgcgaggcaaaaggatggttgcagggaaagagagaatcagagcttgaacgcggaacaagtgagcagaggagacaagcatgtgctagagaaatcgaaagacgagactggaatgagaaacagatagaggaggagcacgaagtggtggttacacagattgaggaagaactcttcagcctgttaatggacgaaactttaacaacgctctctaccaaaactgattccagtccacctgaacatcacaaaacagtaacatcaatgcttaagctttagaaattagaaagcaaaaacatttttgaataaggctttgacttaaaagctcaggtttttttagctctacttttgtaagaatgaagcaaacgaataatacaatgtatattgacctctaaaaccatatatatatatatgcctaattcatatttctgcaaaaaaagatcaatttttagaagctaaatccatgaacgagttaaaaagtgacctcattcgaaacgagcaaacaacataacagaaaataaaaaggttaaacttaagaaaatgtcattcgcaggaataattaagcagcaagcgtggattcgcgatcgcagccattgaaattaaaatccctaaatcaaagcctatctatgggtctgcgaaacaatgaagatggaattgaaaaataaaccgatagaagaaactggagaagaagaagaagaagtaaattgaaaaaaaaatggaaagaagagggaaataagttggagacgttaccggtggtctctttccaggttggtgaagaagcttccgatatgtttctcatgtttttcgctagtcactgaatttatagatgactaatggactcattatattatctcacgaagcccattgtgttttttagagtcaaggagcccaattgtttttctttttcttttgataagggaggagtccatttgttttagtctaaggtgaggaaatttgggtattcgggtcgggtttggatcgagtctttcgggttcggtttagaagtttaagactggttcgattatacgtattatttaagctataggttctcttcgggtataggttgaagaacccaataaataaccaaaattattttgggtttcaatattatttaccaaaaccttgtccagatatacccaaacatatataaaactatccataaaattataacaagttttcctttattacaataataaaaaacaagaaataaaccttgtttttaacttgttccataatccaatcattaaacaattcacaaactcaagttatcagtatatatgtcctcatatgtatatatatgttcgggtaataaaaaatactcacggatatcaatttcggttcatgtaatacctgatacctgaaattatttgagaacagaacccgggtattttacaagaagatatgataagacctcgtttgcaaatctcagtccatgaactcgatttctttttttcttaaggaacaagtttaactatccaatactgaatatacatcaattcggtactaaatgtatagtagatacgaatttcctccggaatgactcagagaacagtgagagattagtagataagatacttaacttttggggagagacctcaggacccatatgacttgaagactcacaccagctctgaagttagacgggttttgggtctccgggtcaagtttaaagaaaaaatgttaaagtagatttccctttctactttggtttgagatgagtttagaatttagttcgatgttacgaacgtgaatatatacccaaaacttgtgatgtatataaatgcttatcaatctcgaatctctctgttactgtagcgtgtaatccacgtttgaagtttttgttcgattcgataaatgttggagccaaaacagagacatcaacaaaaacatgggatcccaatgaataaatagataaactcttgtctgtctataaatagacttacatcttcaaaaaagatttgtataagtctcctccacttaagaagatatcatttgtagcttcttacaatgtcgcgaccaatccccattgaaggttaaataataaacataattttgtgtcttatctctttagtctttatacaagttcttataataattttctcttcctcacagaaatg

SEQ ID NO: 31968 - DNA, 3000 bp, Unknown; identical to SEQ ID NO: 8184
  misc_feature (1)..( 3000): 2750-1469P.txt file - cDNA_ID_3047789; gDNA_ID_1621199; Annot_ID_174840

SEQ ID NO: 31969 - DNA, 3000 bp, Unknown; identical to SEQ ID NO: 8179
  misc_feature (1)..( 3000): 2750-1469P.txt file - cDNA_ID_3047806; gDNA_ID_1621199; Annot_ID_174834

SEQ ID NO: 31970 - DNA, 3000 bp, Unknown
  misc_feature (1)..( 3000): 2750-1469P.txt file - cDNA_ID_3047831; gDNA_ID_1621199; Annot_ID_174812
gaatcgaactcatcaagcctcttccggaatcgaactctctccaatgtaaatctcgatcttgttcgatctctatttttggtggaattgagattgttaattaggtcaaaaattcgtgattgtattaggatgaagcaatgggactggtgttgagtgcagcttcggttaaaggatggacaaccggttccggtatggaaggaccgtctctaccggctaaaaccgatacagacacggtttccacatttccatggtcattattcactaaatcgcctcgtaggcgaatgcgtgttgctttcacttgtaacgtatgtgggcaaagaactacaagagctattaatcctcatgcttacactgatggcactgtcttcgtgcagtgttgtggatgtaatgtgtttcataagctggtcgataatctcaacttgtttcatgaggttaagtattatgtgagcagctcgagcttcgattacaccgatgctaagtgggatgttagcggcttgaatcttttcgatgatgaggatgatgataatgctggtgatagcaatgatgtctttcctttgtaaagaacctttctacaatatctttgttatatatctgtatatagctaccttgtcatatcatcttggtgtgaataacatttggaagtaataaattggtcatatagctcatgttctgaatttcttggggaaggtagatttggttctgagatagctctttttagtgtattatataaatgcttcttcatatgctggatttacagaaaatagatgagagcatgtatttctagatatcagaaggatcgatagaatcttcgatgatttggatacaagatccgacagattctcctttggacatagcctgcgcgagcttcgatcgagctatctcatggcgacgtagtagcagtatggtgttaaggactgaccacctcacctgcgagtccgctttcttctgtgtgaaccccaaactcttcaccaaaccatctaactgttccatcaacaccacaaaaccataaagcatatttacataatcagaagagtttttaaggggtaaaagaaaagagaccttgctgatatcgtcaaggcctccttcagcataaccatacaggagatattctgttgctacaccagccagagcaatgcatgagaatctgttcagcatctggttttggaatagcaaacacagtttcttgttaggctgaagattttaaaaaggtttagaacttttttatgggaagtataagaaaacataccgtagcggagacttttccagaattaacctgcattgtcaagttgggaaaaaagtgttagaagcttggatttgaatgagtttctgcttcttcagaggatgtgaaagaagaaagagaggttatgtacttcttcaaggaattcatagtctacaaaagctgagccagcttgaatgttgagagatccttctttctgtaaagcttcaaggctagagagcgtgtatccgcgtggtagaatcccgactaagtaggccaccaagaaatgacccgcttcgtgctgagatctcagttcacagtaagtccaatgaaaaatgatatagtgtttctaaattttttcataaagagtgatatattgaagcagagtgaagttgcaggttttacctgaacaactctgttatggtatcgttggctaaacgtatgaccagttgtatcaagaaccaaactcccaattccgccattaaaagagacctacaacattaaggacatatgaagagactatttatgtgtgtgtttcatcttaagtcagagctttgagttaccaaatccaaagtccacaggaacataaacccaagagtaagaaagaaaagctgttgagaactcaagtcaaaggctttccaagcaactattccccctgagacagctgcgatctgaaggtttctttcgatggagccaagcgttgtatctgttggcgagagaagtgaagctgcgttaataccattcagtttcagttcctccaacgtgtagagtctctgaggcacctataacaaaacacagccaaagaaggaggataaagacaagaaatgagaccactgattacaaattacagttttagtaacctaaatgctacatttcaaggacaccaagatctaaactaaacctatcatagtatcaaatcatgatgatcacgacacaaaggccaaaacatgcattagatcaatcaagtccatcaaagaaccagagaaggagattcacattgacattatgatacattagaaaggaccaagatctaagctaaacttatcaaagcataaaactgtgatcattaagacacaaaagcttagagatagatcaatcagttccaacaaagatacagagaaaggagtatcacattgacattacgagattcaattcacaattgtaacaactaataatgatataaacaacagaagacagacctgccttgcagcgccaaaacatcgaaggccatcaggttttccttggagatctttgacaagagacaatgcagctctttcgtctccactagacaacttagaatcaacttgctccaaagcttgtcttcttatggacaaacctgtttcagatgaacaaactatgcatctgtaacggtaataactatggaagagaaaagacttttgttggtttgaacatggaattagtcccacactatgtaacaacataaccattcagcaataaaggattttgtgaaactaaatctgacccagtaatggatttgcaatagtaatactgacttagattaagaattcagcaaatgggaacaaaaattggagattttagcattagggaatatcaaccacttgttctggataagaatatatttaaatttgaaatcagagtactttacctgagtttgttaaacgttaatgattttagccattgctttggaaagattccactgtgaatctaggttaaaaaaaaggacgaagatgaagaaaggtaagggttcttctcccacaaagaaatgcagatagttttagttgaaataggtgactcattgtaaaatg

SEQ ID NO: 31971 - DNA, 3000 bp, Unknown; identical to SEQ ID NO: 8210
  misc_feature (1)..( 3000): 2750-1469P.txt file - cDNA_ID_3047856; gDNA_ID_1621200; Annot_ID_57650

SEQ ID NO: 31972 - DNA, 3000 bp, Unknown; identical to SEQ ID NO: 8192
  misc_feature (1)..( 3000): 2750-1469P.txt file - cDNA_ID_3047856; gDNA_ID_1621200; Annot_ID_174883

SEQ ID NO: 31973 - DNA, 3003 bp, Unknown; identical to SEQ ID NO: 17064
  misc_feature (1)..( 3003): 2750-1469P.txt file - cDNA_ID_3047871; gDNA_ID_1621200; Annot_ID_174871

SEQ ID NO: 31974 - DNA, 3003 bp, Unknown; identical to SEQ ID NO: 17686
  misc_feature (1)..( 3003): 2750-1469P.txt file - cDNA_ID_3047875; gDNA_ID_1621200; Annot_ID_174869

SEQ ID NO: 31975 - DNA, 3003 bp, Unknown; identical to SEQ ID NO: 17009
  misc_feature (1)..( 3003): 2750-1469P.txt file - cDNA_ID_3047879; gDNA_ID_1621200; Annot_ID_174868

SEQ ID NO: 31976 - DNA, 3003 bp, Unknown
  misc_feature (1)..( 3003): 2750-1469P.txt file - cDNA_ID_3047883; gDNA_ID_1621200; Annot_ID_174867
gcaggagcttgaaaagatagtcgctgcaaatcccaaaacgctaattaaaccctaggaaccacccggagaatcaaatatataacagaggtaatttcgacccaagtatgtgtcgatggagaaaggaacttactactcaggattcatggttttcgatctgtgggaggaagagcagcgagcgatacagagccagagatctctctctctcttttctgattttctctcgcgatttacaagaggaggagattcagtgtttgggccttgaataataatatgagcgaaggcccaataatgcaaaagattaaaattcattcttctttcacaagtttagggttcctacgatccactcagcaacgaaaatggatcaagcccgacagagtccagaggagcggaggcccaataacgccaagattaaaattcattcttctttcacaagtttagggttgtaaattggcccttcctacgatccactcagcaattggagattgttttgtggttcccagatgttggatctatactagtcttcttgattcatttttccaattgttgcttgctttttgattgacatctatattttaagttgggagatatactctaactctttctggaggaggaggttaaaacaaggtaaggcttggactcgggtcccatcttccagtagaagctctctctccagttgatgccttgtcgatttcagcaccgtctgccaaacaaacacaaatttacttacactcagtctctgaagactgagttgatctcttaaagtcaaagctatatggaggagaaaggctacgttaaaatccatgtaaaaaaaaaaaaaaaaaaatccatgtaggaatcccgcattgtgagccacttatcatccatcaccttgaacgcaatgcaatatcgaatatcaaatgcggactcgttttctaacaataaattatacaccatccaattgtcaatatatatggcttcgcgtttatctctcttaacccaaagctgctgtaactaactaactaaccagctactaatgtttccccgaccatcttaaaaggtaactaactaactagctgatgctagttggtgcctgagcaggggtgagatcaaaggaataacgagagtggtgatcccttttctgtgcacaaacacaagccagtccccgccctaaccatgcacctgatcctgccacaagatgaaatatgcatgtgactctctgcaacacactacaacaaggtaaaggagactagtgcgtgcttaacctgaggatgaatggcaggtgcgtcctctgtctaggctgtgagtaatccgcctgacactgacaaatgaatcctccattgttcttcccgattcataaaaagctactcttgatatcttcaatgcaaaaccagatttacgggttttggaggagcagtttgaatggtccgagggcgtttttttagaatggaaacaatcctaattatcgactaatccagctagtttttgatactttgtattttagatagatcacattccttagtttaaattggcttgagggaaaagaaacatgcatcatatgtagatgtacattagggagagtgaatgatttgtgataagaaaacagcaagtatatggtttttagaagataggttgtggttcatgaaaggttcttcacatgggatgttgacacaaaaaaggaccaaaagttgaggtagaacatcttacatacccactttcacccaaatccaacaaaaaaaaaaaacagagaaccagagacataaaaacaaccaaacttcagtcacaaagtcctcatgttcccaacaaattcatcgcgtcttgacatgtcacaaactgattttcttctctagataggcttgattttgaagtgcagagagatgagcgaaaaaacaagacatttcaagtcctgcaaccatgaaagtttcaaaaggaatatgttagagcacaaataaatacagaaactaaaaaaaaaaaaactacagaaccatgtaagggatgagtgttaacagccaaaccctaaatgttaaagtttgagacagtgaatacgttaaaaggcagagtcctaaatatataatcgagtccaatagagttaagggattaggtaaaagaaaagatggtaaggcaaggggtggaagaaaaagagaggagacctgaacaagatagtagaagatgcgaagtccttcaggatcattactgctctggcaatcaacaagagatccaatcttagatgtagcgaatgagatatgctcattacccaagacgatctcgagctcttgctttccaacacggtcaggttccggccaattgttatcgtcttctttcagaatctacccgcagacaaataatcacatgtcaggttgtacaaaatcatccattattcctagataatagcattaacaacgaagagggttctaaacctacaacactagtcaggaaagatgccctagatcgacaaaaatcgaagcaaaatcactaaaaccctaattggctattatagcgtcgattgaccaaaacgcggacaattaacaagagagaagcaaatcggaagagagagagaaaaaggacctcgctctcggagacgatacgcttgcattccttgagcacggcgggggtgagaaatacctccttgcggataatagtatcgttcttgtagttagagttattggcgtaacggagcttaccgtcctctctaaactcgaactccaggaactcgtgtccaaatttccctttgtgaccgacatagtatctcaggtagaactccgtcgcttcttccgcggccatgccttctctttttttctttctttctcgagatcgagattacctctccgtgtcctttgcccttctttaagtccgtccccgcaaaagaaaaaaggtaatgggcttacatattgggccagaacccatttgtaacccgaaaagttaaggcccagttttagtttttctgtttccatcgaaattgtgtgtgtatccgggctgcctgatttccgattccccgatacagagacgatgccgacggattcgaaaatg

SEQ ID NO: 31977 - DNA, 3003 bp, Unknown
  misc_feature (1)..( 3003): 2750-1469P.txt file - cDNA_ID_3047890; gDNA_ID_1621200; Annot_ID_174863
aaagaaacctcacctcggtcaagaaacgctctgaaatctgaactctgaaggttgtttttcttcttctttcggtggtgaaaaaattatctttatgaaaagacaaaaaagtttttgaaaaaaggaaatttttttcaaaaaaacagactgagagagagagagagagagtgtgttgttggccatgggatgcacggcctccaagctcgacagtgaggatgctgtccgtcgctgcaaggagcggcgccgtcttatgaaggacgccgtctacgctcgtcaccatctcgccgccgctcactctgactactgccgctcccttcgtctcactggctctgccctctcctccttcgccgccggcgagcccctctccgtctccgagaatactcccgctgtttttctccgcccttcctccagtcaggacgcgccacgtgtcccttcttcccattccccagaaccccctcctccgcccatccgcagcaagcctaagcctactaggcctaggaggcttccacacattctctccgactcctctccttcttcctctcctgccaccagtttctatcccactgctcaccagaactctacttactctcgctctccatctcaagcttcctctgtctggaactgggagaatttctaccctccctctccccccgactccgagtacttcgaacgcaaagctcgccagaaccacaagcaccgtcctccttccgactacgacgccgaaactgaaagatccgaccacgattactgccactcacggagagatgccgccgaggaagttcactgcagcgagtggggcgacgaccacgaccgtttcactgccacctcttcgtccgacggagatggggaggtcgaaactcacgtttccagatccggtattgaagaagagcctgtgaaacaaccacatcaagacccaaatggcaaagagcactctgaccatgttaccacttcttccgactgctacaagaccaaattggtggtaaggcacaagaatttgaaggagatccttgacgccgttcaagactacttcgacaaggctgcctccgctggggaccaggtctccgccatgcttgagatcggccgggctgagctcgaccgcagcttcagcaagctgaggagtaagtctcacactctactaactagatgtagatgatgatgcattgaaacccatctcattctcttactctctctatatttgttgtctgcagagacggtgtatcattcaagcagtgtgttcagcaacttgagcgcaagctggacctcaaaacccccattggcagtcaaatacaagctcgatgcatctaccctgaatgatgaacaaggcggcctcaagagcctctgctccactctagaccgactcctcgcttgggaaaagaagctttatgaggatgtcaaggtacattccctgtttttgttttcggttttcggcttaccaacggttacgaaataaacttgtgaattcgaatttaggcaagagaaggagttaagattgagcacgagaagaagctgtctgcgctgcagagtcaggagtataagggaggtgatgaatccaagctagacaagactaaaacttccataaccagactgcaatcactcatcattgtttcttcagaagctgttttaaccacgtctaatgccattctccgcctccgggacactgaccttgtccctcagcttgttgaactctgccacgggtcagtcttttttttgtagttgtgtttgtgtttcattgttccttgagggctgctggttcggtctaggcttgtttatatgcttctgcaaactcatgtgaacccgaattaggcatatgtaataccaaacccattgctgttctgccagtgggggattttataggtaagttcgaaataaaagtagggaggatttgtatgtgtctctaaccaccttgaaatgcagattaatgtacatgtggaagtcaatgcacgagtatcacgaaatccagaacaacatcgtgcaacaagtccgtggcctgatcaaccaaacagagagaggtgagtcaacatcagaggtacaccggcaggtgacgcgggacctagagtcagctgtgtccttgtggcattcgagcttctgtcgcatcattaaattccagagggagttcatatgctctctccacgcatggttcaagctgagcctggttcccctgagcaacggagacccaaagaaacagcggccagactcatttgccttgtgcgaggagtggaagcagagcctggaacgggtgcctgacacagtggcgtcagaagccataaagagctttgtaaacgtggtacatgtgatatcaataaagcaggcggaagaggtgaagatgaagaaacgcacggagagtgcaggaaaggagctggagaagaaagcatcctcactgaggagcatagagaggaagtactaccaggcatactcgacggttgggataggccctggaccggaggtgttggactcacgggacccgctatctgagaagaaatgtgagctggcggcatgtcagaggcaggtggaggatgaggtaatgaggcacgtgaaggctgtggaggtgacacgagctatgactctcaacaatctacaaaccggcctgcccaatgtattccaggccttgaccagcttctcatctctcttcactgaatctctccagactgtctgttctcgttcctactccatcaactgattatgtccaagtttctcatttatttttaagctctcattacgttggtatcatgtaaatttgaggattgattaaattgagtcttgtggttttgtgaggactcacaatctttctcatttaatacatgagcagacacggcacctaactaatggcccaaaggtggcccgccaaattgaatacaagggtaagaaatgggccaagaaagtgagagcccaaaagaggccgatcgttcgtttttgactcaatggccgttgacgttgacatcgtacgccgcacccaacgaccgccaaacagcaaacaacaacactttcccctttctctctctaaacatg

SEQ ID NO: 31978 - DNA, 3003 bp, Unknown; identical to SEQ ID NO: 17678
  misc_feature (1)..( 3003): 2750-1469P.txt file - cDNA_ID_3047894; gDNA_ID_1621200; Annot_ID_174861

SEQ ID NO: 31979 - DNA, 3000 bp, Unknown; identical to SEQ ID NO: 8205
  misc_feature (1)..( 3000): 2750-1469P.txt file - cDNA_ID_3047902; gDNA_ID_1621200; Annot_ID_174852

SEQ ID NO: 31980 - DNA, 3003 bp, Unknown; identical to SEQ ID NO: 17041
  misc_feature (1)..( 3003): 2750-1469P.txt file - cDNA_ID_3047926; gDNA_ID_1621201; Annot_ID_174925

SEQ ID NO: 31981 - DNA, 3000 bp, Unknown; identical to SEQ ID NO: 8216
  misc_feature (1)..( 3000): 2750-1469P.txt file - cDNA_ID_3047930; gDNA_ID_1621201; Annot_ID_57666

SEQ ID NO: 31982 - DNA, 3000 bp, Unknown; identical to SEQ ID NO: 8216
  misc_feature (1)..( 3000): 2750-1469P.txt file - cDNA_ID_3047930; gDNA_ID_1621201; Annot_ID_174912

SEQ ID NO: 31983 - DNA, 3003 bp, Unknown
  misc_feature (1)..( 3003): 2750-1469P.txt file - cDNA_ID_3047934; gDNA_ID_1621201; Annot_ID_174911
tctacctcctcatctcggcctcaagacttcaatctaaaaactctattcatgcatacttctcatcttctgatcaagatcaatctcagagcccgacaaaaatcgagcacatcgtctttgggataggctcaagcgcgatctcgtggcgtgcacgtagagaatacgttaagctttggtgggatgctcagaaaatgagaggctgcgtctttgttgagcgtcccttgccgtcttctcaaaaccacacagattcatatctccttcctccggtttgtgtttcccaagatacttcccggttcaggtaatttagttcaatttgtttattgttttttagtcagaaaaaagtttcaacttctgtttcatcataaattaaaaataagtatagtttgcgatttattagtttaacgtctattaaagatttaaagtataggatatataaatttaaaatattgaattgtgacatttttttgtaattttatatatgaaaacaatttaaagacagaaattaattagttgatattcctactttattccttaatcaatttaacttgcaaattagggtacagttaaatcgaatcggcctaatgagacaagcgtctacaggtacacttggagaggcggtgacagaaacgcgatccgaatcgcgcggtgcgttctagaaactgtcaggctattcaacacctcctcagaagaagtaagatggtacgtatttggagacgacgacacgattttcattcctgaaaacctcgctcgaactctctccaaatacgaccacacatcatggtattacataggatcaacctcggagatttatcaccagaactctatgttcggacacgacatggcgttcgggggtggtgggtacgctttaagcagctcattggctaatgttttagctagaaatttcgattcttgtatcgaacgatatccacatttgtacggaggagactctagggtttatgcttgtgtgcttgagcttggggttggattgtctaaagagcctggcttccatcaggttttaaagtctatatgtacgtaattaatagttattagtaaaaaaaaaaactgattagagatatttgtttttatttttgaagcagtttgatgtgagaggaaatgcattgggaatattgacatcacattcaacgagaccgttggtgtcactacaccacatggctcacattgacccaatctttccaaactcaaccactttctccgcggtccgccaccttttctccgccgtacaactcgaccctctccgtatttttcaactatccgtttgctacgaccgttggtactcttggaccatctccgtctcttggggatatactgttcaggttaatacttttttacccttttttgttcaggactccaataacgtaatgttattaattcaaaatttaaatgtttgtttcaattgttagattgatggcaggcatttgtttctacgggatgttttgcgggcacaagagacgttccgaccatggcaaaaatcaggcggattagcaagtgtttacacattcaacacaagagagattcatcgtgatccttgccaacgacctgtcactttctacatgcaacatgtttcttctagtagccatgatggaaccattaaaagtgtttataagcaagcttacgagaattgcacctacgatcctgttacatcgcctcgcaaaattcatgagattagagtgttttcaagaagactcgatcccaatatcagacaagtacttcattctatcttttctatttttttatttttttttaaataacaaaatataggatagattagtagaattttttggccatagtgaaaatcttttttttttttttgacagcaaagtccattagagaaaatcattttctagattagtatatatttgttaaaatatcaattactatggtttctttacgtatagatacttcctttcgattttcgtatagaccaacaaaattaggaatattggggttagtagtggtcaaagttgctatattgagtgaactttttaaagtagcaccctaaaaatatagtatttcgtaagaaaatttgcttcttacttattagatttaagtttgttttatcataacaaaataaatgttttgaatgcggtagttgaaggctcccagaaggcagtgttgtgatatattaccaacttcttcaactggtggcaacataatggaaattggactgcgagagtgcaaagaggatgagctcatctatattcatccctaatttcaccgtaactaattatattatacctttacaatattgccatccattaattttgaacctaaaaatagtttttttttctttcctttttgtaaatttaacattaagttgttaattggctggttgcctttcaacatttggagcatttgagattactttgtgacaaaaaactgaacatgacatgaatataatctagggtggaccttcactgaaattgatgaaaatgacattatacttaaaattaggctacctaccaaattcaccctagatttaatatatttctattggttacatctttactttaagatataaaaactaagaatgataatttacttctattacaagctaagaatcctagatatctcagtcgctcacttttgcagttgattccctttacgattagcgtgctacaatcgtatcaagtcacattcacacactcttgtttattttgttcaaaaaatgaagaagaacaaaatagtaaaccgaaaataatgctatttgaaatataaatgcgaccgtattgatgcgggccaaatacaaatccggttaaaccagttaaagcgaaattggaaagtaataggaagtgattaaggtaaattaattaagtagtattaattagcgtaacattagctgggggattagacgactttgccaccgttgttaataccttccttgccttctttctttcgttaccatttgcgtgatccctatcttctttatcttcgccctccggattcttcaatattactaaatctgccatcatctcctcgatttcgatg

SEQ ID NO: 31984 - DNA, 3003 bp, Unknown; identical to SEQ ID NO: 17701
  misc_feature (1)..( 3003): 2750-1469P.txt file - cDNA_ID_3047941; gDNA_ID_1621201; Annot_ID_174901

SEQ ID NO: 31985 - DNA, 3000 bp, Unknown; identical to SEQ ID NO: 8224
  misc_feature (1)..( 3000): 2750-1469P.txt file - cDNA_ID_3047945; gDNA_ID_1621201; Annot_ID_174899

SEQ ID NO: 31986 - DNA, 3000 bp, Unknown
  misc_feature (1)..( 3000): 2750-1469P.txt file - cDNA_ID_3047973; gDNA_ID_1621202; Annot_ID_174969
cctaatggggcaacgatttttaaagtatataaaataaataaaatcttggaagtttttgttataatgaaagttaagtttcgatgatacggctaagtaaggtattttttgaagagcaagaaagagtgatggcccaacacatctttaattcaatcgggacctctcaaacctaactccttttatcttattcttatgcatctacctatcttccctagatagtttccaatataaatcacacctaactattgtcatttatatccgataattgagatcccatttatgatttgagtaactcgatgggaacttcttcaagtttgaaaacgatattacatgaatacatccaatgtaaaagttgtcacgaaatgttccaaagtcataatgaatgtatggactgagtaattttacggtctcggattttgaaagaagagttcatcaatgtacatgtttttagatcacaactcttaattactttcgatattagttagttattttttttaccttccgattaagatgttagatccaaagatgtatccgttaggtcacgagcttctcatgtatggaccaaagtacatgtgatatgtatgcactagtaagccccaacaattaatgaaacacatgtctttaatgggacgctttacacatccagtgaagcctcttttgaattgttgtaagatctaggtgtgtgatatgatgttggaacaaaagcataattaaagtcactattatcaaaaactttgatacacgaataattatgtatatgaaccgaaagataaatcaatatatagttcaaaatgcatgaaaccttttctttacaacaaattaaattatagtggttcctttaaggaaagatgaagtttctaggtaaggcaccctttaagattcttacaatggttgtagtagtttcttcttttcttttgaaatgttgatatcacatgaataacaccaacaccaactttaagttgaatcaaataagaagagaagaaaaagaaagaaagtgagaaccaaagttattcaaagagaaaagaaaaggataccatacaacaaagtcaaggtgcaatgtcacttgctcttcaatcaaagacgaaaccacaattcaagatttcattttttttttaatggtaagacaaagacatcatatatttttaatagtacatatgatcaaatgtaacaggcacctattacttaatgtctcgttaatgtgttgaaataaacctccttaatgttggtcgtctcgtataatatataacaaattcgaatggagatcaatattgaaatttgaaagaaaccaaacacgtatttaagttgtgcatcatggccactcttttactttacaaagtctactttttttttaattggactttgtaacacaaattaagatggtggaaacttaaaagcttttagaggacaaaggcataatgttttcactttttattgtgtaggaaagaaaatataacaaagcaccaaaaatatgtaaagaagaaggaaaaaaatagagtaaaagagacataaattaaagtaggaattaattcttgtgtgttactttctatcttatatcatcttcaataagaacatgtctccatctttctttcttcacctcttggttctcttaattttatacatctcaggatggatacttcaacttttagtttattttgtttagattcaattcgaggataatggagccaatccaatttatccagtttataagaacaaaactttatctttatcttttattttccatagtattgttctttatttatttatgaaaattgagtataatttgaaaaacaattgaattttatcaggaaataataaaattatcaacattgtttatttactgaaataaatggtttctactaaatttgttagaaatagtttatctttttttggttattagaagaaaaaaaaaaggtccaagaaagggtcaaacagaagtagccaggatgtttcaccacgtggcaccacatggcgccaaactcgtacgaaatagtagtaaaaacagtgttacaaaaaaaggaaaaaagtaagattttacccattttaacggtccgtacaaaagacagtatgtgggtcccaaggaaaagtgttcgccacgctggaatgcttacatggcaatgcgtaggactcttccggaactttttacacgtgtcatattctcattgcatatatcgtcaaaacaaaattaacttctatctttttacggtgatgaatgtcctaaactacccctgtaatggcggtaaattcacagtctaactgttctaacaccatttaattggtacggtgaagttaaaagaaaaaaaccgaatccgagcgttactcctaatagtatgaccagattacaaaagaagcgattcaataacttttccgccaatttcgatacaagttaccacttcaaaattttgtaataataactgaaaatatttgtgtgtttcaaaatcaccacaataaccgatactacaatcaaacaaggattgcaattcaaagcattaggcaacaaaattaccaaaaaaaagtgaattcatatatttatgattgactttgagaaagtgtgtaaagcaaatgagaaaatttaccaaaaagataaatataggcaaaaaatcaaagatatatcaaaccataagaaacatggtaagttaattaaaaaatttccagtatgtaaataaaaatagatttacctttgaacaaattaaagatatgaaaattccaaaaaatgggtaattaatactatttgtttgtccctaaaaataaaatctctcttcacgttagtcgcatcgatgtgtataaataggaaacaaccatttggttgaggttcgtttcgatttggtcttccctcaccaaataaaaaagaaaagagaaaaaaaaagcaaagccatccttcacgcacatcaaagcaccaaaaacaaaaaccgaaacgcatgcatttctaattttctatcttctttttaacttcctcttctcccaccattttcatcatcttcttctctctaaacctctccttcaatg

SEQ ID NO: 31987 - DNA, 3003 bp, Unknown; identical to SEQ ID NO: 17703
  misc_feature (1)..( 3003): 2750-1469P.txt file - cDNA_ID_3047980; gDNA_ID_1621202; Annot_ID_174991

SEQ ID NO: 31988 - DNA, 3000 bp, Unknown; identical to SEQ ID NO: 8255
  misc_feature (1)..( 3000): 2750-1469P.txt file - cDNA_ID_3047988; gDNA_ID_1621202; Annot_ID_174988

SEQ ID NO: 31989 - DNA, 3003 bp, Unknown
  misc_feature (1)..( 3003): 2750-1469P.txt file - cDNA_ID_3047995; gDNA_ID_1621202; Annot_ID_174984
aatcgcagtgaagaaggaaggaacctaaatcggaatttgggtgctccatcaatggcttcgattttggctcgcaggtcactgaatactctccgtgctcgacatctcgtatgaatcttgttcgctcttgttatttcttcattttgtgtcctttagttagagttatttgaatgcctagaaatgggaatgtctcctggagttttgggagcttaagatgattctattcactctctgtgttttgttttgtgtcgacgagattctggattttatctagctgatcgatgaaatcatgtagggagatttgaatttgatcatggttcatcttaagggctttcgttttacttatggtttccttattctttttcgcatttaatttttgtgacgaaagccttttcgcaagtcaatttttttttgtttttttttgcgagctttaatcctttcattagcttgatatggtgtgtatgttctgaatacctctctgattacttctcgacattgataggttttgtcagggcaagctttacagggatctcatctgtctagactgcagtcccgtggtatatcttatggcagcaacaaaggtatattttctgctcttgtttggttttctttggtaaatcaggtttaattgtgaatctaccccttttccaacttgtattacgagattctgattcatatatgacttatggtttgcgtatgtaatattcagatgatgaagaagcagagcaactttctaaggaaatctccaaggactggaatactggtaatccatatgatctagacaattttactttttttctcctttcttcttttcttgtacgtctatcttccttggtgttttcctccccgagtattagtgattcctgatattctcaaatttgtagtctttgaacggagcataaacaccctgttcctcacagaaatggtccgcggtttgtcgctgaccctcaagtacttctttgatccaaaagttactgtgagtgatatcttttctagtcttccaaacttagattgaaagaaatctgtgttactgaagctctttcgtgtatgcagatcaattatccatttgagaagggtcctctgagccctcgcttccgtggtgaacatgctcttcgaagatatcctaccggggaagaacgctgcattgcctgcaaactctgtgaagctgtgagttttgagatcgatatgaatccttcatttaatttaacgttctctttgttctgatatggtactctgagtctatcaaattcatcttagtaattaggaaagctatttgagtatgagtaatatttactgtttagtctctagagttctgatgaaatggtcatattagctgacaatgatctatttagtgtgtataaaagttcaccacggattgtaattcttgtgagggatacttgtccttttcatcaggtatgtccagctcaagcaatcacaatagaggcagaagagagggaagatggaagccgcagaaccactaggtcatcatccctttagttctcatttatcaaccatctgctttctttattaccctttcatgatgatttgagctgtatcgtacaggtacgatatcgacatgacaaaatgcatctactgtggtttctgccaagaagcttgccccgttgatgcaatcgttgaaggacctaactttgaattcgcaaccgagacacacgaggtctgtttttcacattttctagaccctaataattttcgaggcatgcttattgaaatttttgttatattctctatgataggaacttctctatgacaaagagaagcttcttgagaatggagatcgatgggagacagagattgctgagaatctgaggtcggagagtctctaccgctgaaccattctacaacagtctctgcttcattcaacttgtttttcccggggaaacattttcgttgcttctgtttgaaaataaagacgagatcatatgcgtgtgaaaactcttttgtaatccagattttgtgctgtgtaattgaattgtttgtaaccaacctgactttgattttcggttcatgagttccggttattaggtgttttcggttcggagaaagagcatttaatttggtcaaagactgaaaacagataagtcttaagctacaagggtatatctgtacattaagaaatatttgatcggacggacaagatcatgtcttttttttttttacggcggacggacaggatcatatgcttatagtttatcctaatctgtccgatctaaacataatgcttgtcgattttttcatttatttgccttttggttgcgccaattatcgtattcagacagcaaaattaatattttaatgtgtattttttgttgagttactattttagaaaaacaacgaatccctagaaaggaaagaaaaaaaaaaacaaaatccccaaatcgagcgagtccaaagaaaaatcccaaattcgacgaacctacaagcccagaacatcccccgatttgggaaaacctgaattcattcgcttttgatttgccatcttctttctgggatttgtctactgcttgatcctaatttctgacctcgcttttggtttgagttcacacgtgccgcatcggctgttcaccggctttgtttcattgtgcagactccaatcatcgtacaatctgtagcaaccggttggtctccgtcaaatttctccactttgttgccaaattttactcctttttgtatcaattcaaagattgggggtgaatttttagggtttatcattttgttcatttttggtaactattttggggtttaattacttctttagttgatactatgattgatactatctcccaattaatatgagatcaaattgtgacaatttcagttctctgattacaccaagtttttttagcaggacattctctaaggtgctaaatcaggagatgaaatttggatactgtgacttctggaggagaggaaagttatgcagtgtttgttactgttaattaccagaagaactaggacaaggcgacggagactgaagaggtagctatg

SEQ ID NO: 31990 - DNA, 3003 bp, Unknown
  misc_feature (1)..( 3003): 2750-1469P.txt file - cDNA_ID_3048004; gDNA_ID_1621202; Annot_ID_174972
ttcactttcaccaccaaatcaagaattggttaatcagtttgaatcaaaagtatagattagacagcaggttattgtgttgttcttaaaagtaacttacacatatccatcactacaggagccctacttcaagtccctacctttgactagaccgatcagtcacattcgtacgatctaagcagagtaaatgcgagcatgagtctcatatggtcacttcacactttctttatcaggtcttgcgaggtggcggtagttgctactgctgctactgttgctgctgctccttttcattcctctcaaaggcctacgcgtagcaaaatcccacaaggtgattcttttcgctctttaatcagatttgaaagcaaaacattgataggaaattttctagtttggtggaatgatcatccacgttattgtatcttgcgtttgatcgcaaacttatgaactagtagatccaagataacaatgacaacacgattttaaaatgcgtttctatattaggcactgataaaagttgtgatatcagactggaaaacaccaattgcaaaaagatatctagtcaaaagacaaggcctaatgtgaaagtttcactgaatgcttttaagtttcaacaaagaagcatagcagatgaaggggttaaactcaatgttcctacactttactaaaccgggaccttctttttagatccccatgtgttcacacagtaaaatagcttgaccataaaacactatgagaagtatagtgattgtagaacagtcttactggtttgaactgtggctccttgatatcttcctaggagcctattagttgacactagctagaacgtcaacacataacacaacaagggcatctctttatttctttagctgaaaaggggtctgcaacaagccataacttatggggccttggggaactagagtaggaagatgaccttctacgctgccagttaaacatcttcccctgttcagaaccaaagaggagattacagttttaagttttaactataactgagtatgattacaatggacaaacactactcggtaaggagctacaatagcagaatttacatactagatcttggcaattcgataccaaaggccattaagtcatagttgactaaagtttattggagctggtagaccatacgtttctaaatcaaaataacacaaagcaggatcttggatcatacttatgaactaggagtctaatatgtaccgtagtagctgtgcaatcacaacagataatcaaatctaacactgacaaatatacaaaggtttaaccattacctgcggggtgatatcgaccttgaacgcgaacgagcatgctattgcctacaaattggttatcggccacgtctgcggtctgcggattggataccttcttcttggaagggacctgcatgtgtgcattcaagaaataatccatcaaatgaaaactaatacaatgtaggcagaacatctataaaattgaaacactaatgcattgagttgcatacactataaataaattgatctcatcctctaattactacaatgcagctctttaaacacaaatttatcgtcacctaagaggagaacgtcttagagcaggactgccacggatccttcgagggtaaccctccagctgacagataaaaggtgagacagtgaactgaaatggtattgaacctcagacgaggaaactgaaaccgttttggaggagaacggccgctagaagaggacactggcctgcgtatgggtgatccaccactcataggcagaggtgattatcatatttctcaatgtcagtaccaacattatcagattttaaagcatctccctttggatcacttgaaacatacaccatccatgtacagctgtggtttctcagcatcagctatttttgccttgaattcaacatatgcatctcctcttgaaagattagcctgttaatgtcaatcgaaattatgagtaaagtacttaggaaacaaatctgcaaaccagccaagagcaattgataagaaacttacagctcgatctatcgcaagttgaacatgaatgatttcaccaaaatcgcctgcacataaggaaaaaaggaacatcactgaaattggatttaagcgatataacaacattcgagcattgatttgacaatttaaatgtgtaattgtaatgagtccacttcgtataagataaccaaattaccaaatccaatctctaattaatcaaattggagaagaataagaagaagacgacgatgatcttgaactggagcgggagcgtgagcgggaaatagaccacgaaagactcgaatcttcgccatggccagattcagattctagcgcgcttgtaaggttaaccccagacccaaccctaacggctacctgtcgatttacacacaaacacacacgagtccgcacgtgacaagtcatgggttgggtaagttaactataatgaacgacaaataaataattaaacttactaaagcaaattatagtttgacaaaaatagtcttaattttcagattattagttggatatgcatagtttattcaacttttctcttaatatttttattacatgattttttttatttttggagatttatcagttttttttgttttaataatagtttttagataatttggaaaagcaatgatctctgcatcatcaatcataaaaattaaaaaaataaggcctcgtcgctatatcttctctctagggttcgctgttgctttttcatcttcttcttctccttctctgtttctctgctttcgtcacgaaagggcgatatgtattgtttctcagtaggaagctcgttactctgattcgattcgattctcaatcctttcatcaaaccgttttgggacttcggattttcatattaaggtagcgtatccgcttagggatccaattttctccgagaattgtctccttctacaatctgattctcctcgatttttccagttttcaaagcagtcaattagggtttgtagactaattcggatttggagacggtagcggttatg

SEQ ID NO: 31991 - DNA, 3000 bp, Unknown; identical to SEQ ID NO: 8247
  misc_feature (1)..( 3000): 2750-1469P.txt file - cDNA_ID_3048018; gDNA_ID_1621202; Annot_ID_174960

SEQ ID NO: 31992 - DNA, 3003 bp, Unknown
  misc_feature (1)..( 3003): 2750-1469P.txt file - cDNA_ID_3048022; gDNA_ID_1621202; Annot_ID_174956
attgatccttgtcacgcggtttcttaggatcttttgtcccttctattccaaatttttaattcctatgccgtttttttcttctatataagcggtaaatatcatctctattggttgcagatcgtcgaggcaccggaattgctccgataaatctctcattcttctctgtcatcgatttaggtttcgtctgatttctcttgttacatctgttttatctaaccacaattacctctgttctatttcgtctctgctaattgaaggatgtggttgatctgtcgtcgctcccttttactttctggcggtttcttctttccctttgcttcctttttggagttcttagattacctgatttcttttcttttctgaatttctggagaaatttctacgtgttagattgtgtagatgttgaaggcattgttggagggaggatggtttacgtatgagttggtgtttttggtttcttctcttctatacaacttttggtctaattattgttttatttaatattggctaatgttggtgaggtatgatttcgttctctgtgtcttgttgtgttttccagattctcttcatcaatcaattcagtctgtttctcttctgtgtacacattcagatgaaagatgaacatatattccttgcagacgagttttttcctatctcttgtcctttttataagtagttattctattgaagtcttcaagtttctcagtaatgctatgtcttagctcctctcatgtggtttattcaggttttgttcctctttgcctccgggatctgttgcaatctatttgttctaacatacgccctggttaactggtctattcctctttctctctatttatagtgtttgatcctactctcttatgcttgtgacggtgtttttttttatgttaagtgtcccattcttttaggttttttgaagatgcaaagaaggctagttctgtctcagtgtattctgaaagatatctttgatctgtcgtggttcctgttacctttctggcggtgtcttatctccctttgttttctttttaaggtttttaatttccctattacctgatgtttttgtcgttttaaatcgtagaggtcaaggcattgttggagggaaggatggtatgagtttaattttgtgtttctggttacttctcatctacacacttttttccccctaattgttttatctaatattggctattattgtcagtgaggtatgatttgtcctctgtgtcttatgtttcccagaattttcttcaccaatcacttcactacgtttctctgctgtgtacacacttgaaagatgatcatatattccttccaaacgagtttgttcttataccttgtccttttaagtagtttttgtactgagcattttcaaatatcttaggatatctatctctgagctcctctgatggagaaggcttggcctgaggtctggactgtaccatcagggagttctcaacatgacttgatttttgatttttcaggttaaaggtagattttcgtagcgatgttggcatttctgttttaagcctaaggccctgtcttttgttatagatattcaagcttataaaagggaaaaggttcaggtttactaaatggattctttcccctttatctctgttggtgttatctctcatgctacatctatattagtgatggcttgtttttatgtatgtcaagtgctccgctcccctatataggtatgttgaggatgcaaaggtggcaagttctactttgatctatttttctcgaaattttcatctacagtcctcttttcattggagatgtctctatttctggttctatgctctgcattttcctatggtttaaatgctaatcacttcggctcgagatctactctttctacatgaattcattatcttcatataggaatttggatgatgctaggacgattctgtttcgacctgttcgcctagatttattggcaacgagggatggatgtaatcagcttttcttcccttatctgttttccctttctggttatgtaatctgcatcttctctatggtaatctcttctgcttcagatgaaatcattatcttcacataggagtttgtcttcacataggagtttggatgttgcagtggaagttctgtttcggcctgcttgcctacatcgccctatatctgttacatcatgagtttatgaggtggcttatttctattgatatctatagtgttgattgccgaggaaggaaaaacaagtttcaaccgtggaccgtggttgtctcaacagggatgaacttggaggttccatctctggttggattcaggtgttttgagctaatcttcttctgggtttacttctctaccatactttctaccgatttgaagatttgtcttctgtacctttgatgatgattctcagttttgcagcaatgactcagtttttcgccttctagtcattaaactactttcccacaatgagatacttagtgtttttgtaggttctttcacacttgttagcaagggtatatgtatgttgccgttctcagaatttggtaggtatgaatcacagatgtcattgtttattattgataacataagtgattcttgctggtagtgtgacctcttgagggcaggctcatagaagatgaagagcctcttggttttgatgataatgctccctacttctgagttctgaggtttctttattcctgggttgtagctggtttaatggttctgtagacatttgataatgaagtctctcacttcattttgtttgggtgatgtaaaatgttgtcagtggattttaggtgaggcttaatctcatggattattcttttgaaatcccctcaggtgaatcagtgaaaattgagaaagtgatgttcaacttcttatctcttaatccttcatttgctctgtcacacattgaagcctattttcggttgcagtttgttaagttttcatgggaagcgttgtctttggagtgttctgaagttgactttaatcctgaaagaagaaggatatgcttttactgaagttatcatg

SEQ ID NO: 31993 - DNA, 3000 bp, Unknown; identical to SEQ ID NO: 8267
  misc_feature (1)..( 3000): 2750-1469P.txt file - cDNA_ID_3048031; gDNA_ID_1621202; Annot_ID_174949

SEQ ID NO: 31994 - DNA, 3003 bp, Unknown
  misc_feature (1)..( 3003): 2750-1469P.txt file - cDNA_ID_3048035; gDNA_ID_1621202; Annot_ID_174948
tctttctactgacatacctttggtccagacgggttgacaattctgggaccagcaacatgatagaggaaagccaagcagttatttctaaggttcctgctggtgtgtcaggaactgcactagcagcttcactcttacgtgatggatggagtgtgagttttagtcttagtatacacttccagtttacagtgtttcaactctgtttgtggtgtatatatcactctttttatcttgcagctggccaaaatttatgagaagtatcaggaggctgttgatgccatgaggcatgagcaattaggtagaaaggaagctgagatgatacttcaacgggtatgatctatttaacttgttattaccaggtctttgtttaaaatttagatttccaatcttttccacttttgttttgtctatattctctatgtttcactagtgatttttcaactgcagttcactaatgacttgagaataatatttttcttctcctgttaacttactcttggtatcctgctttgtaggtgttatccgaattagaagagaaagccggatttatccaagaagaaagaggtatgatctacttctgtgcttctggagccatatgttttacgctcccaaagatttctttcactagtaatatatttgtatcttgttggagacacgcttaaatctgtttttgttcccaggggagtatgagagggtggttgaagcttattgtctagttaatcaaaaactccaggattctgtatctgaacaatcaaatatggagaagttcattatggagctaaaggtacctgatattgttatagtggttgttcaagatgcgttcttgtgctgttcttatacatttatcttattgataggctgacttgaggagacgggaacgtgaaaacacactattgcagaaagatatatctgacctacagaaacaggtaatttgatgatctattcttcgctgttcagtgttcaccatgtttgttgtggtcttcagtttcttgattaccttaacttgcaatgttaattgttgagactttgtctcactaatgtatgcctggttgttgcccaatcgattgatactgtgtttgtttctactatttaggttacgatactactgaaggaatgtcgtgacgtccaacttcgatgtggagctgccagggatgatgatgaagatgattatcctctgctctctgatgtggagatggaaatggaatctgaagctgataaaatcatttctgagcatcttgtaagtttgtttctttatctcgacgtcatgttttgtgttagattttattttgtaaaataaattgtggatgactaatgcttgtcctcatgttgggatgaatttcagctaaagttcaaagatataaatggactagttgagcagaatgttaagctgagaaaccttgttcgtagtctttcagagcagattgaaagtagggaaacagagctgaaggtatgaaggattttgcatgcatagtttctttggtagggtgtgaagttttaaaagaatttgtgtaacgtcaggaaacgtttgaggtagacctgaagaataagactgatgaagcttctgccaaggtagctaccgtgctaaaaagagctgaagagcagggacaaatgattgaatccctgcacacatctgtaagtatttccaccctccaaatcttttctctatcgcagcacttggtaaattgatgttgggtttcttttcaacggtttatttattttgtacatttttcgtccttttcaggttgcaatgtataagcggttatatgaagaggaacagaaacttcattcatctgattctcgttcttcagatttgtctccaggttctacttctatgcattattacgagtttactgcactatgtgttcttagataccctctattattgacctcatggctaagtttaattgaattaaatgatgtttcagttttatcttagaaccagttcttttcaaaattttaccccaaatgtcatcaaggtttagtgctgttctcaaattcaaacgaaatctatatttggaacagctaccaaagtttggtcttattttcgtatatctcaattgtcagtaatgaaaattaatgctgtacgcacaaattttgaagtgtattctggcttttcaagcataatccactttcctggaaatctcatcttgtttccttaaagtaaagaggtttgcaggctgttacatgctttgctcataaaattgaatcatagtctcagtggcactctagcttttcgaatgggtgacagagatgtattcttgtagctgtagtgccaggaaggaagaacttcttacatctgcttgaggattcagaggtatgacagattgctaaatcattctattctcttctttgttgtccacttttctagggtatcaaatttgttgtttggaactcaccttattggctgaattgcttgttccaggaagctactaaaagagcccaagaaaaagcttttgaacgcatccggattctcgaagaagattttgcgaaggctaggtatatttatcatcctcttgtcttttgtctttcatttcttactgggcaagtgattatttttgtgcaaaaagttttgtttgataaactagggtacctctgggtatgtaacacattttctagttggatagtcaagttgagagctaggacccagactatactagcgaaggaaataaagtgtggaaagcgtagtatctagtgtgaaacgtgtttgcagatgcaggtggattgctgaaaatactaatctgagcttatgtgtttgcaatcccagtgtcgatgtcctatagaagttataatcgtacgtcttgatacatagagaaacaacatgaaaaactggattgtatcttatgcagcatatccatgaaacgtaaactgtagttattgatttttgtcattgtttcctgtaaatttattttactgaacattataaactgcgttgttttcatctttcccctttggatttttaggagtgaagtaattgcaataaggtctgaacgggataagttggcgatg

SEQ ID NO: 31995 - DNA, 3003 bp, Unknown; identical to SEQ ID NO: 17714
  misc_feature (1)..( 3003): 2750-1469P.txt file - cDNA_ID_3048039; gDNA_ID_1621202; Annot_ID_174947

SEQ ID NO: 31996 - DNA, 3003 bp, Unknown
  misc_feature (1)..( 3003): 2750-1469P.txt file - cDNA_ID_3048044; gDNA_ID_1621202; Annot_ID_174940
tccttacccacaaacgattcatagtaacgtcaggctcattatccacagaataatcacaccaatgtcatcactatctaaattagaaaatgtaatatcaaacaaaattggggaatcgaaattggttaaattaacagaatttgcactggtctgattatttatactctgattattaatataacacagaaaagcattactctttttcttacacgcgtttatgttttcaaaaagaaatatttatccgattacaacaattatatggagtcataacactgtaaacaatttgtacaccacatttttagaaaataaaaatttaacttgattacaacgtggaaaagtcaacactttccgagctttccttttataaaaggaggacggaagactcgccgtctcaaatgcttccacaaaacaaaacaaaacaaacaagaaatcccaacaaacaaacaaacaaaaaaagagagaaaaagaaaaaagagaggtgaaaactcgtgcaacatggcagaaccaactcagccgcttctgaccgattccaactcgtcatcaccgagatctctcgacgacacaatcgagagttacattggaagctttgggtgggctcagtttcttcaagcggctttagtctcattctccggtgttttcgacgctcaacaaactttcatctctgtgtttacagactccgaacccacgtggcactgcaccgactcgaactcgatctgccatgaatccatctccaacatctgtatcctccccaaaaccgcatggtcttgggattactctcctcacgtctctgttatatccgaatggggtctccaatgcgccggctctttcgtcaagggcttaccggagagttctttcttcgtcggatgtttaatcggaggtttggttctctcaacacttgctgattcttccttgggtcgtaaaaacatgttgtttctgtcctgtctcgttatggcgatatcaacgatgctaacggttttctcaccaaacatttgggtttacgctgttcttcgattcgttaatggatttggtcgagcgacgatagggacatgtgcgctcgttctttcgacggaattagttgggaagaaatggcgaggacgagtagggataatgagtttcttcggattcatgcttggctttttgtctcttcctttgatggcttacatgaacagaggaagttcttggaggattctctacgcatggacttcgattccaacgataatatactgcgttcttgttcggtttttcgtttgtgagtctccaaggtggcttttcgttagaggccgtagagaagaagctatttcgattctcaaaagggttgcttcgattccgtctactgatgtaagcagtggtggtgcaatatctatgagtttttcgagcttaccttttgaagaagatgaagagaagcctagtactaatgttaacatcttcacgaccatgaaggtgttggtagagaaaagatgggcgcttaagagattatccgcggtaatggccattgcgttcgggattggtttggtctattacgggatgcctttagcgttatcgaatcttgatttcaacatctatttaagtgcagcgtttaatgcgttgatggatttaccagcgaacctcatcacgcttttcctagtcgataaactcagtaggagaaacgcgcttatcggatttacggctttaggtggagtctctagcgttctcatatttgcgttacataatatgagaattggaaaccacggggcgttacagttggcgttagagctaatctcttactttagcgcgtgttcggcttttaacatggagatgatatacacgatcgagctgtttccgacatgtgtgagaaactcggctatcgcaatggctagacaggctttggtgcttggtggagttttcagccctattatggtagcagctggtcggaaaaacgcgttctggtcgttcggattgtttggtcttgctataggtttgttgggattgtttgcagttggattgccagagactagagggagtgatctatgtgacactatggacgaggaagagtgcaaagaccggcggagtaaagtcgccgttaataatgtcattgcatgaaatggtgaagaatttgaaaacacatgtgaaattaatgtagatttaatttagtatttatcacttgattacattaagacttaccacatatctttttttttggttagttgaaaagtgtttctaagaatgagccatcaaagcaccactctgatgaaacaatctcattttacagtttacacctataacacatggatttcttgaataacaaaataattcaaatttgtctcgtttggatattgatgccgatggttaaacgtttggctgtttgatttttgttagagataattgtgtttctgttctaattttcacacgttgtgtgaaaatgaatcgttccaatcccaagaaagtatattcattggggttgttggtagttggctgtttggtaattgaatgggaagaacaaaccagacagaaatttgtacacttcttggtagatatgtttaaaaggtttaatttacaaataggcccatctatcagcccttttgtaacccttttaggcccaactaagtggtctcaaagttcacaaacccaaaacttatgtggatttattattttaagcccacacaaactaacgaacggtgagctggcaagtcacgtgatgacacgtgatccatcaacccatcacttaccattaccccaaccggtacggaagtggttttgtatcttcctacttcgactcctcttgggtaattataattagttttagatgaaccaaacaatcccaaaataatattagaaaaagggaagaaaatctgaaaccaaaaaaaacgagaagggagtcgaagaagaacctttcgcgctctgacgaaattcattacttacactggatttatactttttttgtcttcctctctcaattatctccttcaacgccacaagatcctaaggcctctcacggatctctcttaagatcaatcgccgcggctcatg

SEQ ID NO: 31997 - DNA, 3003 bp, Unknown
  misc_feature (1)..( 3003): 2750-1469P.txt file - cDNA_ID_3048048; gDNA_ID_1621202; Annot_ID_174939
gttttgtcttggactcatctttgttgtataggttatgaacatacgcgaggaggttgtcggattctaagtttctaactttgagtaacaagtttaaagcctttgtagacattaactccgacgacatcactttcttcatcttcatttgtctctctccatactcgtcgaacactaccccattgtacctaccagttttgtaacgtttttacacatggtaatacacaaactcttatacacagtttgcaacatatacgaaacatatatgttaacaaataacagtatttttgtttagtcgagctaagagaactataagcttttctaggaattgctttataatttgaactaattttcaagtgaacatttcagctttgttatcaaattcaaaattacccaattaccccaaaaaaaaaaaaaaaaatcaacattacccgccactaatgtactcggcagagtaagaatctggcctgtccgcaaaaactgcgtctttctctcgaacgacttctcgggcaatcacatcggacgttatgacaatgacgtggacacgaccaaaccggaagcaagctatatccgtcttcatatcgttcattacacgaactatccatttagaggttggtcggttcttgagcattcctactaagttcccaatgatcggaaatccccgtgggcatggaggcagtttcttacgacgaccaagaaaacgggcgacaacgctttttatgagaaacacaatattcagagtgatcgaaaatgtgacaacaactgagaagataacattattcagataataatccattacctctgctcagttggaatatgtaagtaaaagtgtttctcttatattccaatgatatacaaagagagctatatatacaagatgagccttggagattctaggtataagctaactgtaaaatgttccttaaacagagtaatgagatattgagacataattgagaaatcactgtcatatctctaaacagaatacacatatgtaaaaaatgcattatatctgtacaatcttctatatacgttttttttttttttggtaagaatcttctatatatgttaaatagatcttttgtatgatatatgataattatgtaaaatctaaaaatttggagataagtatgtgatttttaaagaatgattactggttgattgatttggagataagtatgctatttttcataaatcaaggtatcaataacatctttacaatattttatttttacaatcggtctatataaaaatataaaattccgtatatcttctattgggcccaaacaaactttgttctcagcccataaattccatcatggcccaacaagtattaaggtcagactaggaagatgccagcagggaaggagtgggcacgtgtcccacatcattaatttgtactattccgatcatttattgggaatttatccttagcccacaccaacgaaaacaaagtaaaccaaacagtactacatcacatttacattgaagaatatacctgaccatataaagaaggaaaacattcaattttcactgtcacgtgaccttctaaatgacgtgttctcttcatctttcatgttgttgtgttcgttgttgcttttaaatactgtatgcatgtatgtagtgcaactagcgaagtactaacttcgaacaaaaaaataatattcttttgcaaaattatgaacatggaattacatttacttcatcctatttttgttaacttgttttatcgattttcttttagtatacatgtatagttttttttattcgaactctagattgattctaatagagatcaggaccaaagctaaccagtgcgctaatcaactcgggatatatcgtattgtttagttcagcagaatcgctattcttgtttacttttttttgcatctcgacattgtcgagtctctgcctcgatcaaagtgtgaatatttgatattgatatgatttgtcttaccagttgccacgttaccatcgtgattaatgattaatactacttttaatcatatcaaatggttttttctcacaacaaaagagacaagtgaagataataatattatttgtatggccacgattcatcgatcaaacgggattagtcagtagatttgattttgctttggacaaaaagtagaactgagaatcggcgaactcttgttttatttattttattatagaacaataggtaaatatgtaaatatcttcaatgcctacttacgtttatattatacgtaataatatattatagtcaacattcaaaagccttgttttagaaattttagccaaatacccgttattatacacttgaatttaaacgtagattattctggaggcggctcttaaactaattatctggaggctctggattaatttattttcttaaattcgtggatattttagatactattaccatcagtcttgtatatatatatatagagaaagcgatgatgataaaagtataaaactattgactccaaaaagagaaaaaatttttaaaaaatgaattagatgttttcatccttacccacaaacgattcatagtaacgtcaggctcattatccacagaataatcacaccaatgtcatcactatctaaattagaaaatgtaatatcaaacaaaattggggaatcgaaattggttaaattaacagaatttgcactggtctgattatttatactctgattattaatataacacagaaaagcattactctttttcttacacgcgtttatgttttcaaaaagaaatatttatccgattacaacaattatatggagtcataacactgtaaacaatttgtacaccacatttttagaaaataaaaatttaacttgattacaacgtggaaaagtcaacactttccgagctttccttttataaaaggaggacggaagactcgccgtctcaaatgcttccacaaaacaaaacaaaacaaacaagaaatcccaacaaacaaacaaacaaaaaaagagagaaaaagaaaaaagagaggtgaaaactcgtgcaacatg

SEQ ID NO: 31998 - DNA, 850 bp, Unknown; identical to SEQ ID NO: 2
  misc_feature (1)..( 850): 2750-1469P.txt file - cDNA_ID_3048054; gDNA_ID_104; Annot_ID_143898

SEQ ID NO: 31999 - DNA, 3000 bp, Unknown; identical to SEQ ID NO: 6232
  misc_feature (1)..( 3000): 2750-1469P.txt file - cDNA_ID_3048061; gDNA_ID_1621084; Annot_ID_170464

SEQ ID NO: 32000 - DNA, 3000 bp, Unknown; identical to SEQ ID NO: 6239
  misc_feature (1)..( 3000): 2750-1469P.txt file - cDNA_ID_3048083; gDNA_ID_1621084; Annot_ID_170469

SEQ ID NO: 32001 - DNA, 3000 bp, Unknown; identical to SEQ ID NO: 6233
  misc_feature (1)..( 3000): 2750-1469P.txt file - cDNA_ID_3048091; gDNA_ID_1621084; Annot_ID_170461

SEQ ID NO: 32002 - DNA, 3003 bp, Unknown; identical to SEQ ID NO: 17282
  misc_feature (1)..( 3003): 2750-1469P.txt file - cDNA_ID_3048111; gDNA_ID_1621085; Annot_ID_170513

SEQ ID NO: 32003 - DNA, 3003 bp, Unknown; identical to SEQ ID NO: 17282
  misc_feature (1)..( 3003): 2750-1469P.txt file - cDNA_ID_3048111; gDNA_ID_2926183; Annot_ID_200390

SEQ ID NO: 32004 - DNA, 3003 bp, Unknown; identical to SEQ ID NO: 17737
  misc_feature (1)..( 3003): 2750-1469P.txt file - cDNA_ID_3048120; gDNA_ID_1621085; Annot_ID_170494

SEQ ID NO: 32005 - DNA, 3003 bp, Unknown; identical to SEQ ID NO: 17737
  misc_feature (1)..( 3003): 2750-1469P.txt file - cDNA_ID_3048120; gDNA_ID_2926172; Annot_ID_199593

SEQ ID NO: 32006 - DNA, 3003 bp, Unknown; identical to SEQ ID NO: 17737
  misc_feature (1)..( 3003): 2750-1469P.txt file - cDNA_ID_3048124; gDNA_ID_1621086; Annot_ID_170528

SEQ ID NO: 32007 - DNA, 3000 bp, Unknown
  misc_feature (1)..( 3000): 2750-1469P.txt file - cDNA_ID_3048148; gDNA_ID_1621088; Annot_ID_170562
atatacatattttcatataacttgagaattactcgagtcatatcattgtggtacagtggtaccgtacgagtagtaaaggtatagctcctaaaatttcaaatttgaattgtggtttaagtataatcgaatacaatgcaaattgcaaagttgtattagtttgaagttaagcattagagattccagaatatagttaaaagtgtaaagagggattttaaattaaatgacggaaacaaaaagtactttagttactttgtacctgaaggttgatgtagtcatgtaacacaaattttgcatacattaaagtgtaaaactaattcaaagaaattgactaatttcatccacaaatttctttctcgattaggctttttggatattgaaaagataaaaccaaataatcttgaggtgtagaaagattgactcgattttcagatcggtttggttttggtttaggcaaattctttaaccgttcaactggaatccattacatcagatcaccaacagcaacaaaacacaaaatttgaaaagccgtcaagttcttacatgatccatgcctactccgatagaaaaatggaaaagaaaaaaaagatcttccatttgtttagccttagagtacgtacatgcagcaaaagcatagtttctcttctgaaacttcttctctcactcaagcttgaatcttacgacgctgtctcagtcttccaccaatactatttgggtttggttcagcagacatctttcgcttgcttcttgtttctcggttctctttgtttgcagagttagccatcctctcagtttcactgcactgagcctcaagatcgatgatcacaggagttgctggatccacctctttcacatctaatggcttgagatcaccatcagtcactgaagtttggttgttcccagacgacaagaagcataatgactttctagctgaatccggattcttgtttgagccatcatcatcatcgagattttcgtcaatttgattgtcctgaatcccatcagttatgagaaggagatgatctccttctgaagcttgactatctgcaggagcatcagtttcatcatcctcacttgtttctgactgttggttggtttgaatcagataatgtgcaacagacttatacccgagtttatgtatctgagaacaaaagaaattcaaagggaaagccattaacttttgaatctatccaaggactcaaaatcagaattttcaccatggatcatactaatcgaaatagctaccttcctgtaagctgcaccagttgggagccaccctttttttgtacgacagaaactgcagttgcagatatcgcgacagactggacaaatccagtccggattttccagagcttcaagaacatgttctccatatctgttcaatcaccaaaacataacctaaaacattcagttccaatcctcattttgctgagcaaagcaagctactcaattcccagttgattctcacaaaaggaattactcaaaaacacagaaacaaagaaggttggaggctaatgtacctcatgtataaacaatctccacagaattgacctcgaacagaatggttacactggctgcattgggtatgataacctagcgtcttctgcctgtaaaatccacagtaaccattaaacacattagcctcaatcctaaccgaatcaaactacatcttcagagataaagccaagtgtacaaacctgcactggtggcaacactttcctctaacagggtcataaatccgtttcccatttttgtcacaaccatcaacaaaaagctcccaagttcgttctgtgttacctaacagtttctcatgctcctcagtgtaaatctctggccttacgccttctcctacccacaaaacaatctcttctttagacactttacccttcttcagttcaggttcctctgcgtaggaaactggtgtagcgttcttcaatctaaagaccacaacagagaaggcaataaaaatcattactttctattaaaaatcctagcttcctgttaaacccttgattttgaacagaatccaaagaacgaaacgagaaccacagagattgaatacgaagagattacctcgaggatctccgagaaactggcggctcctgcttcaatctgattataaaacagcgaaatgatttctctaaaaaccctagatttctctaaaacccctaattttggaagattgaagcaatgtgaacaaaatcgagagaagtcagtgactgaaaacgaagagattaccttgaggatcgtctagaggagacggaaagctgaataggagatgtttctcgacccggattggcattagagttaccgtaacgccttttggcgggtcggatctcggatttgagtttgagagagagatccatgattccgagattcttcatcctctgaagattctccttgatcctgtcttctctgcatttctcgtagatcgagacgtttgagtttcctcctccgactgttggattagggtttgtgacgggaatcgaacatttcgctctcgttctcaccacaggcattgtgagagattgatgaactgattttggattcaaagttccaatctttccctctttctctctttggatctctggataagaagaagaaatgaaagatttttttttaactttttaagtgagtgaagcggaacagcaacggtctggtttttttactctttttaaaattcaaaacatttttcacctttttaggtaaatgtgcttaatttgccaactaatgaaaacgttgattggtttgtcaaatggaaatcatatttattatctatcatacatctgtaaatttatttttcttaaagggcctttaggctttaataacggcccataaaaaatcccaaattgtactacgaagaagaataagccgccattctttatctttccattccttcctggagattacgcattaatatatttagatcttaggtcttattagcttctttattcgcacttttttttttcctctactcgaagcttaacgatcgtaacaatcatg

SEQ ID NO: 32008 - DNA, 3003 bp, Unknown
  misc_feature (1)..( 3003): 2750-1469P.txt file - cDNA_ID_3048148; gDNA_ID_2926212; Annot_ID_202716
taaatatacatattttcatataacttgagaattactcgagtcatatcattgtggtacagtggtaccgtacgagtagtaaaggtatagctcctaaaatttcaaatttgaattgtggtttaagtataatcgaatacaatgcaaattgcaaagttgtattagtttgaagttaagcattagagattccagaatatagttaaaagtgtaaagagggattttaaattaaatgacggaaacaaaaagtactttagttactttgtacctgaaggttgatgtagtcatgtaacacaaattttgcatacattaaagtgtaaaactaattcaaagaaattgactaatttcatccacaaatttctttctcgattaggctttttggatattgaaaagataaaaccaaataatcttgaggtgtagaaagattgactcgattttcagatcggtttggttttggtttaggcaaattctttaaccgttcaactggaatccattacatcagatcaccaacagcaacaaaacacaaaatttgaaaagccgtcaagttcttacatgatccatgcctactccgatagaaaaatggaaaagaaaaaaaagatcttccatttgtttagccttagagtacgtacatgcagcaaaagcatagtttctcttctgaaacttcttctctcactcaagcttgaatcttacgacgctgtctcagtcttccaccaatactatttgggtttggttcagcagacatctttcgcttgcttcttgtttctcggttctctttgtttgcagagttagccatcctctcagtttcactgcactgagcctcaagatcgatgatcacaggagttgctggatccacctctttcacatctaatggcttgagatcaccatcagtcactgaagtttggttgttcccagacgacaagaagcataatgactttctagctgaatccggattcttgtttgagccatcatcatcatcgagattttcgtcaatttgattgtcctgaatcccatcagttatgagaaggagatgatctccttctgaagcttgactatctgcaggagcatcagtttcatcatcctcacttgtttctgactgttggttggtttgaatcagataatgtgcaacagacttatacccgagtttatgtatctgagaacaaaagaaattcaaagggaaagccattaacttttgaatctatccaaggactcaaaatcagaattttcaccatggatcatactaatcgaaatagctaccttcctgtaagctgcaccagttgggagccaccctttttttgtacgacagaaactgcagttgcagatatcgcgacagactggacaaatccagtccggattttccagagcttcaagaacatgttctccatatctgttcaatcaccaaaacataacctaaaacattcagttccaatcctcattttgctgagcaaagcaagctactcaattcccagttgattctcacaaaaggaattactcaaaaacacagaaacaaagaaggttggaggctaatgtacctcatgtataaacaatctccacagaattgacctcgaacagaatggttacactggctgcattgggtatgataacctagcgtcttctgcctgtaaaatccacagtaaccattaaacacattagcctcaatcctaaccgaatcaaactacatcttcagagataaagccaagtgtacaaacctgcactggtggcaacactttcctctaacagggtcataaatccgtttcccatttttgtcacaaccatcaacaaaaagctcccaagttcgttctgtgttacctaacagtttctcatgctcctcagtgtaaatctctggccttacgccttctcctacccacaaaacaatctcttctttagacactttacccttcttcagttcaggttcctctgcgtaggaaactggtgtagcgttcttcaatctaaagaccacaacagagaaggcaataaaaatcattactttctattaaaaatcctagcttcctgttaaacccttgattttgaacagaatccaaagaacgaaacgagaaccacagagattgaatacgaagagattacctcgaggatctccgagaaactggcggctcctgcttcaatctgattataaaacagcgaaatgatttctctaaaaaccctagatttctctaaaacccctaattttggaagattgaagcaatgtgaacaaaatcgagagaagtcagtgactgaaaacgaagagattaccttgaggatcgtctagaggagacggaaagctgaataggagatgtttctcgacccggattggcattagagttaccgtaacgccttttggcgggtcggatctcggatttgagtttgagagagagatccatgattccgagattcttcatcctctgaagattctccttgatcctgtcttctctgcatttctcgtagatcgagacgtttgagtttcctcctccgactgttggattagggtttgtgacgggaatcgaacatttcgctctcgttctcaccacaggcattgtgagagattgatgaactgattttggattcaaagttccaatctttccctctttctctctttggatctctggataagaagaagaaatgaaagatttttttttaactttttaagtgagtgaagcggaacagcaacggtctggtttttttactctttttaaaattcaaaacatttttcacctttttaggtaaatgtgcttaatttgccaactaatgaaaacgttgattggtttgtcaaatggaaatcatatttattatctatcatacatctgtaaatttatttttcttaaagggcctttaggctttaataacggcccataaaaaatcccaaattgtactacgaagaagaataagccgccattctttatctttccattccttcctggagattacgcattaatatatttagatcttaggtcttattagcttctttattcgcacttttttttttcctctactcgaagcttaacgatcgtaacaatcatg

SEQ ID NO: 32009 - DNA, 3000 bp, Unknown; identical to SEQ ID NO: 6287
  misc_feature (1)..( 3000): 2750-1469P.txt file - cDNA_ID_3048164; gDNA_ID_1621088; Annot_ID_170538

SEQ ID NO: 32010 - DNA, 980 bp, Unknown; identical to SEQ ID NO: 6306
  misc_feature (1)..( 980): 2750-1469P.txt file - cDNA_ID_3048168; gDNA_ID_1621088; Annot_ID_170536

SEQ ID NO: 32011 - DNA, 3003 bp, Unknown
  misc_feature (1)..( 3003): 2750-1469P.txt file - cDNA_ID_3048179; gDNA_ID_1621089; Annot_ID_170645
gattttacaagtttggagttccacctaaaatgttgttgatcattgtagattagcagagttgaatatatgcattcaagggggtttcttcaccgtgacatcaaacctgacaatttcttgatgggacttggtcgcaaagcaaaccaggtgcttgtttttatgttctttctgttggtagattgtttcccacaaataacgttatgttagattccatcctcttctttttagtttactgttggtatggtactatggttatgaacatgagttcttgcttttttttttctttccatcgaatatttgttcatttggatgtctaatagtgtaagaaacagaatttcttagctgacctggatactaaattatgttctgaataatgtgtatctaggtgtatatcattgattttgggcttgcaaagaagtatagggatctccaaacacataggcatatcccctataggtgatttatggtgctttcatgttcctgtttatctacttcttttattttgttttaacttaaattcttacagatactcatgttgttttctttgcagagaaaacaagaaccttacgggcacagctcggtatgctagtgtcaacactcacctaggagttggtaagcaatacatagaaccactcgagaatttgctccaaagtcatatatacaattcctaaaatgtgtggatgtttgcatatctgttggcagagcaaagtaggagggatgatctggagtctcttggttacgtactcatgtatttcctgagaggaaggtttgtgcatacagatccgtttttgtctgactaaatctttggacatgtttgttctggtctaacttttctggattttcgggttcagcttaccgtggcagggactaaaagctggcacaaagaagcaaaagtatgacagaattagcgagaagaaagtatcaactcctatagaggtaaagacataatatggcttagataccattgactgaagttagatcagccatctcattgtcacataaatgaagggttaattgttctaccatactttaacaggtcttgtgcaagtcatatccacccgaattcgtatcatactttcaatactgcagatctctgcgattcgaagacaaaccagactactcatatctaaagagacttttccgagacttgtttatccgtgaaggtttgcatttgctctgttttggttattttttccctaagggacttcacagtacagttctgtgttgtgacattttgttataccaatgctttttttttatgcctggaattgctttttatctttgattgccctcactagttactgtcaaattttctagatattgaaatcttccttgatatttctataaatgtttcactcttttaacgaatggattcgcggtatcaggttatcagtttgattatgtattcgactggactgcattgaaacaccctcagagtagtgccaggtcccattccagtacacatgaaagggtgagtacacatgtctgtagatttttctatcgagtatgactatacatactcactttcgtttcgtattgatctcttcttcagcatcgtaccggtaaaccagggatgggtgcgggaccgtctgctgaaaaacctgaaaggatttcaggtaacccttgacttttttctacagttaagaatcatataactcttcttcgctaaacggtggtcggttctgattttgtgatcctgtctatgtcttacagtagggaacatccgcgataaattctcaggtgcggtcgaagcatttgcgagaaggaacgttagaggacccagtccccatcaaaaccataccagacatcgaactcttgacgaaattccttcaatgaaacctgctgtggtaaaaaataatatcatcatcttatatatatcaaaattttgatatattgttattacattatagaacgtgcttagtgattttaacacttttcaagaaatcaatcttgctcgttcttgatatatcaatttatttgatattgtcagaatatggtatctgagaaaggaagaaacacttccagatacggcagtgcttcgaggagagcagtagcctcaggaagtagaccaagctcatcaggtgaacaaagggagagccgggactcgagccgcgtagcctcaagcggtggcggtgtccgaccatcagtcttccaaagaacccaagcagcagctgctgtgagtggatacgagtcaaagacagcatctgcctttaaccgcgaccgagtagccgcttcaagaacagcacgagacgaggctctcagaagcttcgagcttctttcgatccgcaaatgaagccttcatcaattggctctttgctgtaaattggattcttctttacatatgttgtttggtcctttgtttccacgaaactcccaatttttcatgtattatcaaattctctggattttgtatcaatttttacacactttattgtaatcatgacaatttgttgagtttaattcaatgttacagttttaattttgtgttacatatgaatttatacctttaaattcgacgacgtcgtttccaagtgtataacgtgtacgccaactatcgtcgtttgaaaccgtcaagtttaacggcagcctccgtcggtgaccttgtcgtgacgcagggccttttcctcgctccaacatttaaattctctgaatttcgattgatcaatacggagtacgaagcacgaagatcgatttagcattctagttcatgatgttgaatccgacaaggtacaaacttgattgcttaaaggttatgtttttgccggaactgggacaatgtttagattgtattctcataagtctggtacttcctttaaaattggagtttttgtttgttggagaaacttgacttttagctacataagatttttaagggtcaattttgattgttgttagttgttttgatgaatttgtacagggatgatagtctataataggtttgctctgaatctggattgacccagagaaaaaaaagtgaagctttgtatgatttgttgtggatttatg

SEQ ID NO: 32012 - DNA, 3000 bp, Unknown; identical to SEQ ID NO: 6338
  misc_feature (1)..( 3000): 2750-1469P.txt file - cDNA_ID_3048184; gDNA_ID_1621089; Annot_ID_170632

SEQ ID NO: 32013 - DNA, 3003 bp, Unknown
  misc_feature (1)..( 3003): 2750-1469P.txt file - cDNA_ID_3048192; gDNA_ID_1621089; Annot_ID_170624
tgacacatttgaagaccaaatcttagtgttggacttagatcactcattcgcttacaacccaaggaaaccgaatctgaattatacaaactttcgcataaccatacatttaaagttcttttgatctctcagcttatgttgactttttaactgataatattcactaaaactgttttaactacaaaaaacataaacatggtattggttttctttgtatttattcttttgtcaacaaaagtcatagaagtatagaactaagacaaagggccacaacttgacagagacactctatattctaaaagcaacatttatacgaacggacacactgctttattcattcacagacctcaagggctattctttcatcatcctcatcgtttagccaccaccagagccatacttcttacccaacacaatgagctggagcttgtcatagccggccagtacaccagcgcctgcaaccgcacgaaggatgttggcacctgcacccttgaagagtgacttggccccttcgttcttgacgatctgagagaaggcctgaagagagctcttgtacttcactgcttcacctgacgtcatcatcattcttctgcgaaccgtgtcaattgggtaagacgccaatccagctccaatggtgattccccatcccagtaagaaactagcaaggaagctatcctgtacagattatagcaatgagtaaacagtaacagaggactcaatatgttgaagtgaggagttttctttgttttttacctggagaccatcaactagaaccacaggcttcaaggaatcatacaatccaaagtaaagcccccggtacacgacaattccaacgcatgagatgttgaaaccacggtaaagcccgacaatgccatcagaggctatagtcttcttgtacacgtcgaccatgccattaaactgccgctgaccacctttcttggccgccttcgcatcattggctaaacgggtacgagcgtaatccaaagagtacacaaaaagcagagatgatgcaccagctgcaccaccagacgccaggttccctgcaaaccacttccagtagccatctttttctttcttgaagttaaacagcctcttgaagtaatctttgaacgcaaagtttaaagcctgcaaaacaaaactatttgcttagcatacccatctcgacgtctatacaaataccacgtcaaagaagagaaaacaaacctgagtggggaagtatctgataacattggcagtgtttcctctccaaagagcaagcattccttcgtctttgactgttcgagcaaaacaatcactgattcctttatatggctcagagagacgcccagctttgatcatttcatcttgattctgaatcaagagcttcacacgctctataggcgcggctgccgtcttcgaaacagcagctgagactcctcccataaggaaatcgatcaagaaaccagtaccagttttctcactaggagcgtgagctaatacaggaaatgaaccatgaggtataagagacgagccaacgccatggctagttggctgcaatagactctgcaaacctccattgacataagcaccagagacacagtaaccacgagcttgcacactcggagaaagtctattgatcaagtaagattgtccatgtagcttctgaaagactgatggatgctttgatccatccattttttgtacaaatcagtaaaagctgactctgaaaaacaaaacaaaacaaaacaaaacaaaaatacaaattaaacaccacaaaatcttgctttctcgaaaatttctatatttgcatgcttaaaaaagaatgatcataaccaaaactggaacaaaaacagagaagacatcatcaacacatttcatacgatcctagttagcttcgttaaagacaccatttcaatctgtcaactataatgcgacctaattagcacaaattaaaacctagttgcagcagctcaattaaatcctctgtttctaaaagatcaagcaacgagtggcgtcgagaaaacagaattcacgagaagcagaacaaaaaaacagagagagctaggagagaagcattaatgataaagctagaacttctggagtcgagagcttaccgtggatttttcgccgaagcgttaacgagagagagagagagagctgtggaaaattgcgagaagagtaggtttctacatgattctcgacttctggtcctaaactaaaagacgaaactgagcagaagagaaggtacaattacgaaaatgctactggactcctttgacccgtttctttctgggcccaattttaagggacccgagtcttgacttcttctaaatggacccaaaatttattttcctaggaagataaaattcatacctaatgaaagtgagagacctctttatcattatgtgatatatgtctcatctacctgaaaattaaatatagaaaaatagaacaataatcaagacttttttggtttgccggaaaaatataatagaggcttgttaactaggtcttaaaaaattggatgttacttaagaagcaagaaagaaagttgaatcttttttttcttcttcagccggacagaactttacagatgcaaggaaggtgatgtggttcgaatttagtgatccaaaactagttagagaaatgttctacaaacaatgaaacaaaccgatacgtattgagagtaccagaatataggcaatgatatcggctcatgtattagataacaagacacatcatacatgtcatgcgatataaaataaactcgaattacatgcaataaccttaatatgtgtaggtagattatttcaaaagattcaagaaaactaaaagagaactcagctggaattcatccgagtaagaaggaaacatgagaactacatgtgttcattaaactaagccatgcataataaactccaccttagaaacgaattgattactatatatataatatatagatatagatttctcttcgtacacgaatcatatatatcaccttcgctagctagtgtactgagttcaatg

SEQ ID NO: 32014 - DNA, 3000 bp, Unknown; identical to SEQ ID NO: 6330
  misc_feature (1)..( 3000): 2750-1469P.txt file - cDNA_ID_3048196; gDNA_ID_1621089; Annot_ID_170620

SEQ ID NO: 32015 - DNA, 3000 bp, Unknown
  misc_feature (1)..( 3000): 2750-1469P.txt file - cDNA_ID_3048212; gDNA_ID_1621090; Annot_ID_170660
actgaaatattggtgaagaaaaggagtttcaaatggactgtcataaatttaaataaaccatttaaaatattttaactatccttctttaacacattcatcctcaagccttttttttcttcttctttatcactagtgggatggatcttcaattccaaattattggaggaacaagaaagatgataatctagaccacaacataaactatacaataaaatgataaatgtgttatagtcaatgaataaagaataagagagatggtgtgatgtttacacgtttggggcctaaaccaaaaaaaaaggatgggtccaatatgccaactactactattgtattgagagtaggaagagagagaaaccttaatggagacagagggacagtggggttatgtcaattgtcatattattcaaccactcaccaatcactcactccaaatctatatctctctttttacaaataattatgatagatttgatgataagttggttctcaaatcccagccgttcaatttatccagatatgcaagaaaatattagattttaaggaatcggcctttccttatttggtaagactaaatatctctgttcattctagttccaataggtaaaagagtaaccttttttcttacattattaataacttgcattgcacaataacgtattaccctataattcacaatgataatgtgttttgaagtcatctacacacttcaaagtttattactcaatcgaaaattgaaatattgtctaccactcaaatttcttgaaatggttaaaatacttgaacgtgtactatatgcaaaaatctctgatatttaactgctttgaaatttttatcagaatattactagtgatgggtcaatttctttgttaaccttgtgctttatgcacttatgtttatagtctctattttctacacctaaacaacacaatctatttgtaggttgcaactcggacccaaattttttgctaaattttttgttgaagtcttatattaagctaggattgtgacttaaaatatgaataaaactcatattgttggcttaaaaaacgaattaggatgtttgtatttagtaggaacatagtgttatgaaaccacatctgataaacacatgattttaaagtgttttaaaaactattctagcttcaaaaccagtttctcattcatcccgaatctttttttccatcacatatatagtaaattcatgatagaattttaatttaacctaaatatatatagttcatagttggttatgttcaatcgattagaagggttctgttggatccgaattcgagacctaggaactacaccatgatacatttggggaaaatatgatatacgttagtaggtcaaacacaaatattatctaagattagcctccggccagaaaattatggactttgtatgtgagggagattgagaagcgattgctaagattaataaatatggggcttgttggtagagtagatctataaaaggggtgatagagaaacgagtggaaacgcatgaagcacgttataaaattgaataattgaagattcaaccatattctttgataattggtgggcatttttattttattatttgttgtcaaatctctatataaagaaaaaaaattgttttaacgttttcggtttaatgtttgacgcatatatgtgggaacagttttgggcgacgtggtagcttcccctcctcgtttcccccaaaagccaatgcttaaaatgacgagaataccctctccaaaaaaccatgtgctcctaagtcctgaactagttctgattcttttcttttagctatatagggaagtgagacttgcgagggtgagtatgtgacatcaaaatggaaaacactaagctacataaccgttggactaaaatggtaataaaaagaagcagaacagaagtaggtgaataaaactgagaatggaaacaagaaacaactgaagaaatcggatttatatacgtttttgatcatattctttggttcaaactctataaataagtttcttggcttctttcttataagaagaatcgactacactttaagttaaaagaccacaagcaatacacagttacaagaagaaagaaaagtagttccaagtactctctctactttaagttataagatcacaagcaatacatagtatttaataattaacacaagagtcgagcttggactttcttctttcttgggccttcttctattccgattcatcccattgacaaacccaaagcgttggatactcaaatgctcattcgtaaacacgtatcctcattagctttttctttcccattttgcttgaatgtaactaattaatttggttttttttttaattagtaagtgtagtatgtcaatattgtacaactagatgatactgatccattagagtaacactaaagttaccaaagtttcatacaactccaacgacaagcaaggttaggcctttccatccaatattataatctaagaaggagcgattgcccttgatctgacccaacttgcgagtggaaaatctaatgcttatttgttcattcgttttctgagattctatatcaaataatagtcagtcatcactagaaaatgctcaaacaactaatatgattcatacacatttcatatcatatgcttggcaatattggaccgaacttcatgatttttctgtccatgaatgcaaatgtgttgtgatctctgagttacatctcaaaatgtgaacttgacatcatattctcgttcaaaaaaggaagataagacaaaacatttaagaaacatttcacaatcatagggggcaaaagatcaaaatttaaaatttcggacgagagtggaaactatcaatctttaaggggatgatttggcaaaagtgttgtttttatttttcttttactgttttcgttttatcatctttcaacgtctttctctcccgacggccaaaaaccccaattttgccaaatccaattttacacccagaaaccctaattttccttactttgatttgattttgtgatg

SEQ ID NO: 32016 - DNA, 3003 bp, Unknown
  misc_feature (1)..( 3003): 2750-1469P.txt file - cDNA_ID_3048212; gDNA_ID_2926252; Annot_ID_204403
tatactgaaatattggtgaagaaaaggagtttcaaatggactgtcataaatttaaataaaccatttaaaatattttaactatccttctttaacacattcatcctcaagccttttttttcttcttctttatcactagtgggatggatcttcaattccaaattattggaggaacaagaaagatgataatctagaccacaacataaactatacaataaaatgataaatgtgttatagtcaatgaataaagaataagagagatggtgtgatgtttacacgtttggggcctaaaccaaaaaaaaaggatgggtccaatatgccaactactactattgtattgagagtaggaagagagagaaaccttaatggagacagagggacagtggggttatgtcaattgtcatattattcaaccactcaccaatcactcactccaaatctatatctctctttttacaaataattatgatagatttgatgataagttggttctcaaatcccagccgttcaatttatccagatatgcaagaaaatattagattttaaggaatcggcctttccttatttggtaagactaaatatctctgttcattctagttccaataggtaaaagagtaaccttttttcttacattattaataacttgcattgcacaataacgtattaccctataattcacaatgataatgtgttttgaagtcatctacacacttcaaagtttattactcaatcgaaaattgaaatattgtctaccactcaaatttcttgaaatggttaaaatacttgaacgtgtactatatgcaaaaatctctgatatttaactgctttgaaatttttatcagaatattactagtgatgggtcaatttctttgttaaccttgtgctttatgcacttatgtttatagtctctattttctacacctaaacaacacaatctatttgtaggttgcaactcggacccaaattttttgctaaattttttgttgaagtcttatattaagctaggattgtgacttaaaatatgaataaaactcatattgttggcttaaaaaacgaattaggatgtttgtatttagtaggaacatagtgttatgaaaccacatctgataaacacatgattttaaagtgttttaaaaactattctagcttcaaaaccagtttctcattcatcccgaatctttttttccatcacatatatagtaaattcatgatagaattttaatttaacctaaatatatatagttcatagttggttatgttcaatcgattagaagggttctgttggatccgaattcgagacctaggaactacaccatgatacatttggggaaaatatgatatacgttagtaggtcaaacacaaatattatctaagattagcctccggccagaaaattatggactttgtatgtgagggagattgagaagcgattgctaagattaataaatatggggcttgttggtagagtagatctataaaaggggtgatagagaaacgagtggaaacgcatgaagcacgttataaaattgaataattgaagattcaaccatattctttgataattggtgggcatttttattttattatttgttgtcaaatctctatataaagaaaaaaaattgttttaacgttttcggtttaatgtttgacgcatatatgtgggaacagttttgggcgacgtggtagcttcccctcctcgtttcccccaaaagccaatgcttaaaatgacgagaataccctctccaaaaaaccatgtgctcctaagtcctgaactagttctgattcttttcttttagctatatagggaagtgagacttgcgagggtgagtatgtgacatcaaaatggaaaacactaagctacataaccgttggactaaaatggtaataaaaagaagcagaacagaagtaggtgaataaaactgagaatggaaacaagaaacaactgaagaaatcggatttatatacgtttttgatcatattctttggttcaaactctataaataagtttcttggcttctttcttataagaagaatcgactacactttaagttaaaagaccacaagcaatacacagttacaagaagaaagaaaagtagttccaagtactctctctactttaagttataagatcacaagcaatacatagtatttaataattaacacaagagtcgagcttggactttcttctttcttgggccttcttctattccgattcatcccattgacaaacccaaagcgttggatactcaaatgctcattcgtaaacacgtatcctcattagctttttctttcccattttgcttgaatgtaactaattaatttggttttttttttaattagtaagtgtagtatgtcaatattgtacaactagatgatactgatccattagagtaacactaaagttaccaaagtttcatacaactccaacgacaagcaaggttaggcctttccatccaatattataatctaagaaggagcgattgcccttgatctgacccaacttgcgagtggaaaatctaatgcttatttgttcattcgttttctgagattctatatcaaataatagtcagtcatcactagaaaatgctcaaacaactaatatgattcatacacatttcatatcatatgcttggcaatattggaccgaacttcatgatttttctgtccatgaatgcaaatgtgttgtgatctctgagttacatctcaaaatgtgaacttgacatcatattctcgttcaaaaaaggaagataagacaaaacatttaagaaacatttcacaatcatagggggcaaaagatcaaaatttaaaatttcggacgagagtggaaactatcaatctttaaggggatgatttggcaaaagtgttgtttttatttttcttttactgttttcgttttatcatctttcaacgtctttctctcccgacggccaaaaaccccaattttgccaaatccaattttacacccagaaaccctaattttccttactttgatttgattttgtgatg

SEQ ID NO: 32017 - DNA, 3000 bp, Unknown; identical to SEQ ID NO: 6369
  misc_feature (1)..( 3000): 2750-1469P.txt file - cDNA_ID_3048227; gDNA_ID_1621090; Annot_ID_170680

SEQ ID NO: 32018 - DNA, 3003 bp, Unknown
  misc_feature (1)..( 3003): 2750-1469P.txt file - cDNA_ID_3048244; gDNA_ID_1621090; Annot_ID_55485
gttcactatatcaaacagtgttttgaaaacctgcaaatatttttacttgagtactgaaattgttttaactgtctcttgtaaaccaaaaaaaaacagatcgctgtggatgttgaccgtacagtagtggaactgtacaaattcctgaagaagcacgcatcaatcccatttaaacttgagaaaccggcgacacctgaaccggtgatctcgaccatgaaatctgatgagaagatcgagggtgatagttccaaggatgagttgtgatgatcggaacagagtgtgtaacaaggctatagatgatgactcttctataaatgatagaaaatgttttgccctttgtttttttccattgttgtatgctatgaaatgaataattaaagaagttttggtttctcaagtttttggatgtaactggaggtttgatccacacattgagtgttgatttaatgcgacttgtggttcataacaactagcacaaaagatttcttacgaagcgtagagaaaccacacaatttctgccaaaaccattgttatcatagatcttatggtttacaaaaatatgcaccttcaaagttcatatagaatagacgtaaataaaaatccataagagatgtacgagtttcatatggaagagacactgtttattagtctagatccaacgtgttctctcgtactatggattagtagagaataattcgttctcttttaacgagatatggttgttatataagatatagaaattgaaaaaagcatggtaaacaattaaatccatgtttttctattatgtgtcactgcggtccataggctggtgaacacctaatagtgtagcattgtcaatatttttctttaccattggttttaaagcttccccaccaaaactcgtcatttttacaaaaaagttgcacaacatgtaggcatctgctttattacaagttcatggcggcactagtctgcttcgaaccccttaacattgcttacaatgaggcaaagtttctttttttcccccttgtttttcctaatatgacaaaattgatcaataaaaaagtagttacaattgttacaactttttattgcaacttttagttaaaatagttataatttttattgcaattaaaatagttacaatttttttattttggttatgtttttttatcgcatattttcgttaaactaccgcatagtttggtaaattttttgtaatgattcaaatatttaaatatataattataataatttagtacataaatactaggccagagcattcatttatattcggtttgcttctttcggttctaaactctgaagatccataagaaaccgaaaaagttatggttcaactcgattcggttctaattattttatccaaaatattttctaaaaggactgtatctaaatatcggaaactttttttgacaaaattataataaaccaaaatatcagaaaaattaacaaaaattaattagattagaggtaaaaaaaaaatgtattggacttagttttgtaaagggttgaccaaacatttttttgttctattcgggtatctaaaacagaaccagaatccttttttggtttggtttagtttggtttttcaatttcggtttttgttcctagctcaatatgcaaaatcaatattattttgtagtttaatatataaatacaaaaatttgtcgaaaatgagtttcagggtggagttcatatcctagttccacataatagtagagaacacgaaagaactttgacttatcaaactttacatcaacatataaatctaatatcatataatatactattaaaaattctataatttatttctagagtccatccacacacgtttctgatatttgttttttgtttgtaaaagaaaaaaggaaaaaagaaaagtactagacatctcttttccgtaaaatatatactaaaaatataaatattttattagcatttcattatcttacctgcatttcaactatggcaaaagaaaaaataacagatttgaaaagaaaaaaaaaaggaaaagcattcaacgttgatagtatgtaaactaattgatgctctaaattagcgttacatttgttatgtaaaataagaaagtcaaagaagcagagtaaagattaggtgatacttgcaaagttacctttcttttccaaatgtaagtaacgtctcaagtttatcaaactaatagtttatgctttacatattttcccaatctataaattttatttgtaaacagaaacaaatgccttcgaaactcttgtatggaaaaattaaatccaaaaagttagtatattattagagtaaacactcataacagaaagatctttttcatactccaatatggaaaattttagcatcaaaaataacatttttttgttgttgttgccaatatatcagcatttaaaaaaaaaataaccattcgcaagtatagaaataataaagtctcagtaaaagtgaatgcaactacaagtctctgggatggcaaaattgttagcaataattctgtgtttgtagtacataaaataaaattgattaattgctcgttcttcttttattaataatccgtgttttgttttgtcctttctcttcaatctgggtttggtggggaggttttaagtcaagcgtgcgatatatatatcatcaaaacagacatcctctgttcttgcctcttcttcttcttcttcttcttcatcttcttctatatattggtgtttcatttgttctgctttaaaagtacacaaagattcatcttttttcggtcctctgattgggcaaaagactagctcggtcgtgttttgaacaagagatacatgttttgaaaaattcctcgcaaaagaagagaaagaaagactcaaacttttgtttgaatttgataccattttttatatatataccaaaagtccaagactggtttcatttttgggtttggtctgaaacctctcttcgtgttgtttgttcatggtatgtcttaattagggtaaaaaaatacttgattgttttctctcaatcatcatg

SEQ ID NO: 32019 - DNA, 3003 bp, Unknown; identical to SEQ ID NO: 32018
  misc_feature (1)..( 3003): 2750-1469P.txt file - cDNA_ID_3048244; gDNA_ID_1621090; Annot_ID_170666

SEQ ID NO: 32020 - DNA, 3000 bp, Unknown
  misc_feature (1)..( 3000): 2750-1469P.txt file - cDNA_ID_3048244; gDNA_ID_2926252; Annot_ID_204398
cactatatcaaacagtgttttgaaaacctgcaaatatttttacttgagtactgaaattgttttaactgtctcttgtaaaccaaaaaaaaacagatcgctgtggatgttgaccgtacagtagtggaactgtacaaattcctgaagaagcacgcatcaatcccatttaaacttgagaaaccggcgacacctgaaccggtgatctcgaccatgaaatctgatgagaagatcgagggtgatagttccaaggatgagttgtgatgatcggaacagagtgtgtaacaaggctatagatgatgactcttctataaatgatagaaaatgttttgccctttgtttttttccattgttgtatgctatgaaatgaataattaaagaagttttggtttctcaagtttttggatgtaactggaggtttgatccacacattgagtgttgatttaatgcgacttgtggttcataacaactagcacaaaagatttcttacgaagcgtagagaaaccacacaatttctgccaaaaccattgttatcatagatcttatggtttacaaaaatatgcaccttcaaagttcatatagaatagacgtaaataaaaatccataagagatgtacgagtttcatatggaagagacactgtttattagtctagatccaacgtgttctctcgtactatggattagtagagaataattcgttctcttttaacgagatatggttgttatataagatatagaaattgaaaaaagcatggtaaacaattaaatccatgtttttctattatgtgtcactgcggtccataggctggtgaacacctaatagtgtagcattgtcaatatttttctttaccattggttttaaagcttccccaccaaaactcgtcatttttacaaaaaagttgcacaacatgtaggcatctgctttattacaagttcatggcggcactagtctgcttcgaaccccttaacattgcttacaatgaggcaaagtttctttttttcccccttgtttttcctaatatgacaaaattgatcaataaaaaagtagttacaattgttacaactttttattgcaacttttagttaaaatagttataatttttattgcaattaaaatagttacaatttttttattttggttatgtttttttatcgcatattttcgttaaactaccgcatagtttggtaaattttttgtaatgattcaaatatttaaatatataattataataatttagtacataaatactaggccagagcattcatttatattcggtttgcttctttcggttctaaactctgaagatccataagaaaccgaaaaagttatggttcaactcgattcggttctaattattttatccaaaatattttctaaaaggactgtatctaaatatcggaaactttttttgacaaaattataataaaccaaaatatcagaaaaattaacaaaaattaattagattagaggtaaaaaaaaaatgtattggacttagttttgtaaagggttgaccaaacatttttttgttctattcgggtatctaaaacagaaccagaatccttttttggtttggtttagtttggtttttcaatttcggtttttgttcctagctcaatatgcaaaatcaatattattttgtagtttaatatataaatacaaaaatttgtcgaaaatgagtttcagggtggagttcatatcctagttccacataatagtagagaacacgaaagaactttgacttatcaaactttacatcaacatataaatctaatatcatataatatactattaaaaattctataatttatttctagagtccatccacacacgtttctgatatttgttttttgtttgtaaaagaaaaaaggaaaaaagaaaagtactagacatctcttttccgtaaaatatatactaaaaatataaatattttattagcatttcattatcttacctgcatttcaactatggcaaaagaaaaaataacagatttgaaaagaaaaaaaaaaggaaaagcattcaacgttgatagtatgtaaactaattgatgctctaaattagcgttacatttgttatgtaaaataagaaagtcaaagaagcagagtaaagattaggtgatacttgcaaagttacctttcttttccaaatgtaagtaacgtctcaagtttatcaaactaatagtttatgctttacatattttcccaatctataaattttatttgtaaacagaaacaaatgccttcgaaactcttgtatggaaaaattaaatccaaaaagttagtatattattagagtaaacactcataacagaaagatctttttcatactccaatatggaaaattttagcatcaaaaataacatttttttgttgttgttgccaatatatcagcatttaaaaaaaaaataaccattcgcaagtatagaaataataaagtctcagtaaaagtgaatgcaactacaagtctctgggatggcaaaattgttagcaataattctgtgtttgtagtacataaaataaaattgattaattgctcgttcttcttttattaataatccgtgttttgttttgtcctttctcttcaatctgggtttggtggggaggttttaagtcaagcgtgcgatatatatatcatcaaaacagacatcctctgttcttgcctcttcttcttcttcttcttcttcatcttcttctatatattggtgtttcatttgttctgctttaaaagtacacaaagattcatcttttttcggtcctctgattgggcaaaagactagctcggtcgtgttttgaacaagagatacatgttttgaaaaattcctcgcaaaagaagagaaagaaagactcaaacttttgtttgaatttgataccattttttatatatataccaaaagtccaagactggtttcatttttgggtttggtctgaaacctctcttcgtgttgtttgttcatggtatgtcttaattagggtaaaaaaatacttgattgttttctctcaatcatcatg

SEQ ID NO: 32021 - DNA, 3003 bp, Unknown; identical to SEQ ID NO: 17829
  misc_feature (1)..( 3003): 2750-1469P.txt file - cDNA_ID_3048248; gDNA_ID_1621090; Annot_ID_170664

SEQ ID NO: 32022 - DNA, 3003 bp, Unknown; identical to SEQ ID NO: 17830
  misc_feature (1)..( 3003): 2750-1469P.txt file - cDNA_ID_3048252; gDNA_ID_1621090; Annot_ID_170663

SEQ ID NO: 32023 - DNA, 3000 bp, Unknown
  misc_feature (1)..( 3000): 2750-1469P.txt file - cDNA_ID_3048252; gDNA_ID_2926252; Annot_ID_204400
tttgaattcgttctatgttttataaaattgacaaaaacagaaggcccttcttagtttctttacagaaagtctatagagtctccctctttcatgaataacaacatttatactacaaccgtgcaaaatgaaaagtgcacaccttaagcagtcatattatcggggtctcacgaaaagccaaagctaagtcatcagtcaataatgtggtctggttttggcagactacaaacttgctgcacgtacaggttggaggtttccgacttgcccactaactagaatatcaaatgtagcaccatcgggtaaaatacccttgtcaagcatctcatcgtgaagtctaaaagcctcatcgagatttccttctctataatgtccggcaatcaccgcgttgtagataaggacattcggagtgacattattcttcttcatctcctcaaacatcttaaccacttttacaaactgccccttcttgctaagaccgtttacaattactgtgtaaatgatttcatcagggacaagacccaccgcctgcatttctgtgtacaactcagaggccaggatcaaatttccatctttcaacaatccatcaatcagtgttgtatatgtacccagatcacatcgtagaccgtctttcaacattttcttgtacaaatcaagggctgctaccatgtttcccagattacgaaatccagaaatcaagctgttgtatataggttggcttggattcaatccttcttcaaggagttcagagaacagagcagatgcgctttccatgttactccttttgcagaacccatcgataagagcaccataggctggaatatcgagtttgacacctttgttcttcatttcgtctctcatttccaatgcttgatccattctgttatttttgcataacccattcatcaagctggtataagttatgacgtttggagaaataccattgccacacatctcttcgtatgctgcaaccgcagaatccatttcaccctctttgaaaaatccatctataatgctattgtaactcatgcaactaacacataaccgtttttcttcgatcatatttgccaacaattctcttgctttggatgtctgaccaactttgcataaaccattgataattgtttggtatacaaccccgttgacttcaatattggaagaagtcatatgattgacgacttccaaagcgttttgttcatcatgattcctgaaacatccatcaatcagaatggaatacgtgtagttattcggctttagacccttttccagtatatttgaaaaaacaatacgagccaagtccatgtttttctgtctgcagtggccaagcatcacgttattgtaagaaactacattcggtccaatacctctactttccatcttgcttaataactctgtagcttcgtctgtcttaccttgcttgcataaccaggataatatagtgttacatacaaacacgtttgcaagaccggtttcaaaagactcgtcaaagagtttcagtgcctcttcatgtttctgacctttcaaccacccttgaattatcgtgtggacatgaaagacagaaggagtaagacctaagacttccattttcttgtaaaattcaagcgccttttccatttccccgttcttacgaaaccattctatcagaaccgaaaaagtaacgctgttcggagaggggccttccttttccatcttatcaaacaaaaccaaagcactaaccaagtcattgttcttgcagtgtcccgtgatcagactcgtcgcagcaactacattcatcgatatcccatcactcaacatctcatccttcaatctaattgcatcatccatattaccttgcttcacagaagccaaaatcacagaagtataagtttcctgcgacgggacacacaacttcttctccttcatctctctcaataaactattagccatagccaaatcaagcgtcttgcaacaagcctgaacagcaagactatacagtaaactatccggttctgctcctctctcaatagctctacttaaaacctccaaagcctccgcaggcttttcttctctcaaactagctctcattaacaattgcgttgttacattatcaccatcaacaccaatggcaaccatcctactgtagagttccttagcttcagttaacgaattcctttgaactaaagcactcaaggtcctattcacatatggaaaaaatggaatcacatctagttccaacatctggttgacgatatccaccgcatgatccgtttgcctatctttagaataagcattcaataagtaattaaaagctcgtgaattgacttcaaacccaaatgatttcgccgaatccaccaatttactgaccaaaacacttgccattggagttggattgctcgtagaaacgtaccgtatgagcaaatcacttgcacgtccataggtctcaggagaactgaccagaatatgaatgagtacccagaagacgtcaccatcttcaaaacttccacgccatggtctagcccaattatagaaacgaagagcagcttctgggttgttcctgcgattgagaagaacatcgattacagatgcatcgtccttctgttcaggcttcgcagacaaaagactcactttggaggtaactgggttttcttcagaagtggatccgtaaactagtagtctctgctcttgacttggattctcagattctttgggaaactgagactgtgaacaaaagggtttattgtttctcaagttacgaagacgaatccgtgaagggatttttctaaaaaccaataaagatctcatctttcgaggttcttctctcaactatcttcagcagagaaaagatgatcggagaaataaataaaagagacaacttgaaatcccgaagatacaccaaaaaaaaaaaaaaagaagcttaaaccctaattatgtctattaaacggcgtcgttttggggattattcctttttaaaaacgttctcttttcccgttttatctaatttcctcaaggaagagagaagcaaaaatg

SEQ ID NO: 32024 - DNA, 3000 bp, Unknown; identical to SEQ ID NO: 6365
  misc_feature (1)..( 3000): 2750-1469P.txt file - cDNA_ID_3048256; gDNA_ID_1621090; Annot_ID_170659

SEQ ID NO: 32025 - DNA, 3000 bp, Unknown; identical to SEQ ID NO: 17831
  misc_feature (1)..( 3000): 2750-1469P.txt file - cDNA_ID_3048283; gDNA_ID_1621091; Annot_ID_170738

SEQ ID NO: 32026 - DNA, 3003 bp, Unknown
  misc_feature (1)..( 3003): 2750-1469P.txt file - cDNA_ID_3048291; gDNA_ID_1621091; Annot_ID_170724
ggctttggctctggacctgaactagagaagaagcttaagtatgctgaacatgtttcttatggcgttattttcgggaaagaactcgttaattctccagccaatgttctcactcctggtgaggattgtttcttgagcatcagtcttagacttttcattttttttttttttaataatgtgagcatcatgtctgttgaagtttatttcaaacatttttctctaatctgctttgtatcttacagccgtactagctgaggaagccttgaatctggcttccatgtacagtgatgtcatgactgccaacatcttgaacgaggagcaatgcaaagagttgaagatgggttcatatcttgctgtagctgctgcttcagctaatccacctcatttcatacatcttatctacaaaccttctagtggccctgttaaaacaaaacttgctcttgttggaaaaggattgacatttgacaggtactagagctgttggcttctgtttgccgcatcaatctctttatttaatacttattagttattgaccagatggtttttgttcacagcggtggctacaacattaaaaccgggcctggctgcttaattgagctcatgaaattcgatatgggaggttcagctgctgttcttggcgctgcaaaagccattggtcaaattaagcctccaggtgttgaggtaagtttatcacacggagcttgcgtttctgagttaaatgaatgtacctaaacaaatgcttcgttgcacaatcaggtgcactttattgtcgcagcttgtgagaatatgataagtggtactggaatgagacctggagatgtcctcacagcctcaaacggaaagacgattgaggtatcataacaccgtttccatatgaattcagcttcaaaaggttcgagctttccattgttagttttacgccaaactaattgtgggtggtattgcaggtcaacaacaccgatgctgaaggtcgactaacacttgcagatgctttagtttatgcttgcaaccagggtgtcgataaggtattgtttcaaagattcttcgacttattaatacattctttctgttggtttttctctcaagtctcaacttgtgaattacaatatttgcaggttgttgaccttgcaacattgactggggcttgtattattgctcttggaacatcaatggcaggtacatagtcttgtgttttaaataagacagaataaaattctttcgtgatggttgactattggtttttctgcaggcatatatacacctagtgataagcttgcaaaggaggtgattgctgcatcagagaggagtggagagaagttatggagaatgcctatggaagagagttactgggagatgatgaagtcaggtgttgcagatatggttaacactggaggccgtgcaggtggatccattaccgcggctcttttcttgaaacaggtgagtatatcataagagtggaaacaaaagaacacatttcaatactgacgctattgttctctaacgaagaaccgggtttggttaatggttgcagtttgtgagcgaggatgttgagtggatgcacatagatatggctggaccagtgtggaacgagaagaagaaagctgcaactgggtttggagttgcgacactagttgagtgggtacagaaccattcttcttcttaagatgaagtctggtgatctctgactgatgtgaactagttgtgtttttgctttgtgtggtgggacaagttttttttttttgtgcaactaagtatgacaagttaaatcaatcagaagattagttttgttgttgtatgcttacctagtctaaacttaaattcaacaaccaccgtgagagacacagttgagccaccgttgttgctgtgtcccgtcatgttgttgtatttgaatgggtccgtgagttgttgagaaggagagatagtcgccgttcatcaccactacagccaccgtgtgtcaccggagagtgacaccacgagtcacaggatgtcaaccgctgtcaccggagtagtcgtagtccatcgccaaggccgttaagggtaaggaaaccctagatctattatgtaacttgctcaggaagtttttggctttctcttatgatctgtgctttgttttggttttgattgttgagctatgagaccttactgccgtgagcttaaaccgcctcatcgagccccgagcagatccaccgagagtaatcgccgagaaaggtaacggcgaaccttatctcccgtgtttgttgttgattattgaaccggatcttaaccagtctaaaccaatgactcttaatttagttaagaccagaaccgaaaccaatgacaatttgcgttgttggtgtattattacgtctgtgtggtgtaactagattataagaatttggtttggtttaattattaaaccaagtctaattaatttaattggaagaataccaaatcaattaatcgagatttctaaatttggtttggttattagattaaatcatgtatttttaattggatttcacctattgatccacaaatgagttacaaaagtgataatactgacgtgtttttcaatttcttttatcacttcgtgtaagaatgccttgaaatatttgaatttctataaatagtatcaaaactatgttttgtataaacaactttaaatttgaaggcaacaaataacagtagtaagtatttcagatatggttatcaagataagtttagtaatagtgaaacatgatcacattaaaatttgaaaagaagtctacagctaatcaagattgttaagatcgggtcggataatagcaatagtgagtgagtcaagtaaaagaataatcatcgtcaacaagacacgacggtcggacgcgggcggacgcaagaagagactgggccactctaattttctaagataactctaatttcatactatatatatatatatatatatatatgtctgcatcagccactctgttcttctccttataaataaatataaagaagctaagctcagtggagacttctcaaatg

SEQ ID NO: 32027 - DNA, 3000 bp, Unknown
  misc_feature (1)..( 3000): 2750-1469P.txt file - cDNA_ID_3048291; gDNA_ID_2926199; Annot_ID_201683
tttggctctggacctgaactagagaagaagcttaagtatgctgaacatgtttcttatggcgttattttcgggaaagaactcgttaattctccagccaatgttctcactcctggtgaggattgtttcttgagcatcagtcttagacttttcattttttttttttttaataatgtgagcatcatgtctgttgaagtttatttcaaacatttttctctaatctgctttgtatcttacagccgtactagctgaggaagccttgaatctggcttccatgtacagtgatgtcatgactgccaacatcttgaacgaggagcaatgcaaagagttgaagatgggttcatatcttgctgtagctgctgcttcagctaatccacctcatttcatacatcttatctacaaaccttctagtggccctgttaaaacaaaacttgctcttgttggaaaaggattgacatttgacaggtactagagctgttggcttctgtttgccgcatcaatctctttatttaatacttattagttattgaccagatggtttttgttcacagcggtggctacaacattaaaaccgggcctggctgcttaattgagctcatgaaattcgatatgggaggttcagctgctgttcttggcgctgcaaaagccattggtcaaattaagcctccaggtgttgaggtaagtttatcacacggagcttgcgtttctgagttaaatgaatgtacctaaacaaatgcttcgttgcacaatcaggtgcactttattgtcgcagcttgtgagaatatgataagtggtactggaatgagacctggagatgtcctcacagcctcaaacggaaagacgattgaggtatcataacaccgtttccatatgaattcagcttcaaaaggttcgagctttccattgttagttttacgccaaactaattgtgggtggtattgcaggtcaacaacaccgatgctgaaggtcgactaacacttgcagatgctttagtttatgcttgcaaccagggtgtcgataaggtattgtttcaaagattcttcgacttattaatacattctttctgttggtttttctctcaagtctcaacttgtgaattacaatatttgcaggttgttgaccttgcaacattgactggggcttgtattattgctcttggaacatcaatggcaggtacatagtcttgtgttttaaataagacagaataaaattctttcgtgatggttgactattggtttttctgcaggcatatatacacctagtgataagcttgcaaaggaggtgattgctgcatcagagaggagtggagagaagttatggagaatgcctatggaagagagttactgggagatgatgaagtcaggtgttgcagatatggttaacactggaggccgtgcaggtggatccattaccgcggctcttttcttgaaacaggtgagtatatcataagagtggaaacaaaagaacacatttcaatactgacgctattgttctctaacgaagaaccgggtttggttaatggttgcagtttgtgagcgaggatgttgagtggatgcacatagatatggctggaccagtgtggaacgagaagaagaaagctgcaactgggtttggagttgcgacactagttgagtgggtacagaaccattcttcttcttaagatgaagtctggtgatctctgactgatgtgaactagttgtgtttttgctttgtgtggtgggacaagttttttttttttgtgcaactaagtatgacaagttaaatcaatcagaagattagttttgttgttgtatgcttacctagtctaaacttaaattcaacaaccaccgtgagagacacagttgagccaccgttgttgctgtgtcccgtcatgttgttgtatttgaatgggtccgtgagttgttgagaaggagagatagtcgccgttcatcaccactacagccaccgtgtgtcaccggagagtgacaccacgagtcacaggatgtcaaccgctgtcaccggagtagtcgtagtccatcgccaaggccgttaagggtaaggaaaccctagatctattatgtaacttgctcaggaagtttttggctttctcttatgatctgtgctttgttttggttttgattgttgagctatgagaccttactgccgtgagcttaaaccgcctcatcgagccccgagcagatccaccgagagtaatcgccgagaaaggtaacggcgaaccttatctcccgtgtttgttgttgattattgaaccggatcttaaccagtctaaaccaatgactcttaatttagttaagaccagaaccgaaaccaatgacaatttgcgttgttggtgtattattacgtctgtgtggtgtaactagattataagaatttggtttggtttaattattaaaccaagtctaattaatttaattggaagaataccaaatcaattaatcgagatttctaaatttggtttggttattagattaaatcatgtatttttaattggatttcacctattgatccacaaatgagttacaaaagtgataatactgacgtgtttttcaatttcttttatcacttcgtgtaagaatgccttgaaatatttgaatttctataaatagtatcaaaactatgttttgtataaacaactttaaatttgaaggcaacaaataacagtagtaagtatttcagatatggttatcaagataagtttagtaatagtgaaacatgatcacattaaaatttgaaaagaagtctacagctaatcaagattgttaagatcgggtcggataatagcaatagtgagtgagtcaagtaaaagaataatcatcgtcaacaagacacgacggtcggacgcgggcggacgcaagaagagactgggccactctaattttctaagataactctaatttcatactatatatatatatatatatatatatgtctgcatcagccactctgttcttctccttataaataaatataaagaagctaagctcagtggagacttctcaaatg

SEQ ID NO: 32028 - DNA, 3003 bp, Unknown; identical to SEQ ID NO: 16945
  misc_feature (1)..( 3003): 2750-1469P.txt file - cDNA_ID_3048294; gDNA_ID_1621091; Annot_ID_170723

SEQ ID NO: 32029 - DNA, 3000 bp, Unknown
  misc_feature (1)..( 3000): 2750-1469P.txt file - cDNA_ID_3048333; gDNA_ID_1621093; Annot_ID_170809
gaacaagcatttgtcaaatggttccaatgatctcccttaaaactctcattcgcttttttatagataattaacaaggtgccaaaagaactggagatggtactacgggtcaaaaggcgggaagaacaatttcatgttcttataacatgttagccatgtacaaaaagaaagaaagcaaacaatgaatgttctcgttcattgtggaagaaacatgggttaaagatttgagctggatcagtgcgggtcttgtatggttttgttttttttacgggttgcgtccatcttttttggtctgtagttttgagtaggttagagagacgcgagagagagagagaggatgtggcggtttgtattatgtaaatgcttgtcttataatgagagagaccttattgatgataccaatctttgaggtccaagtaacacaacttctttgtgattgatatgtatgagataattaatttgtctattttcatggcatgatgtatgtgatatgtctgagatttgcaacattcttctataaagttgagaaataagggtagtttagtctttttaaccaaagatttttatttatttgatcttttccctgttttaaaaagaagaatcgagtaatcgggtggttttgaagacgaagaaggactaagacatcacgaggaacacgatgggtgaagcggtcaaggtatgtttttatctttgtctcctctgcttctgatctgttaatgccaatcgataattcctagttttgcgatgcaagcatgaatcgtcgattgttatctgagtgatttgattcattttcgacgattttcgaatcatcataactacttcttttgctcaaatctcgcagtcagtttaatgcctattcgtattcaatttagttatgcaattgacgatttctcgaattgtctgaagttttgaagctaaaatcagattaaatataaaatatctgaacattgcctcccaaggaatctaatcccatcttgatgtgcttttgcttaggatgggagagaagaagtgattcaagcttggtatatggatgatagtgaagaggatcagagacttcctcaccacaaggatcctaaagagtttgtatcgttggacaaacttgcaggtccccctctttgtgtgtttcaattcaatgttgttctctctgcttctctattttgtttcacatgtaatgtttgtgtgcagagctgggagtacttagctggagacttgatgctgataactatgaaaccgatgaggatttgaaaaagatccgtgaatctcgtggttactcttacatggtttgtggtctttatttatttactatcccactagacttgaatggtagatgtttatttttgtccaagtcttattttaactctctaggggttttctcaatcttggtttgatgattaaaaagtgttcaaaatgcaggacttttgtgaggtatgcccggaaaagcttccaaactatgaagtgaaagtgaagagctttttcgaagaacatttacacactgatgaggagatccgttactgcgttgcaggaactggtaagaacttcttttactggcggctttactcgtaaacttaaaatttcgatatagtagtcatgttttattttcttgggaaaaaggttactttgatgtgagagatcgtaatgaagcttggattagggtattggtaaagaagggaggtatgatagtcttacctgctgggatctatcatcgcttcactgtggactctgacaactatatcaaggtgcaatgtcagcttttcttctagccatttattttatagtttgggcttgcttagaaaattgaaatatcttgttgaacaggcaatgcggctattcgtgggtgaaccggtatggacaccatacaatcgcccacacgaccatcttcctgcaaggtacaatgtcctgggttttccccttttgtttgttctcttatgcaaacaatgggatatataatcaagcaagaaattctgttattttacgagaaataaattctgatattttacaggaaagaatatgtcgataacttcatgatcaatgcctcggcttagagagcttcctctctctatatctggctttctgaaacaaggatctataaacaaggcctacaataaagaaagctttcctgtcaagtattggatatttatatgtattcctgtgtagaatgatggcttttggtatgcttgagttgttgtaaacttagttacactctctgatatgtctctctttaccatctttgtcgtatcccatatacgaaaagattacattgggattcatattgtcttacgttcgttcctatgtgcaatatgttgagtttttacacaaatctctattcttttttatttgcttttcaaaaaccaacaaattagaagaaactaataagaagtaatacgtccaaccgcgtcaacttctttggtttaatctaaaccatggttcgtttggttgttgttgtgtatcttaacatgctgacggttttaaggatggttcgtttggtggttgttgttatcgaacatgttcacggttctaaggaagaaaagtgtggttttgtgtatttgtggttggacataagattttcgttttcgtttacatttgtggctttcttttgtaatttccttttagagtttggaatctccttaaatccgacctacattaactctatagtctatagaattggagtaatcattttattctcctatcttaatggattacaataaacagtagttgaatggaagaaaaaggggatataaaagtaaacttagcaagtttagcagccatgattaggcttataataatttatgtagacgtggagcttacgtggcagtctagggagtttccctgctccgggaacaattcccccaaattgactcccccataggaaaaactattcgacctcactctctctcgccactgttccgctctctctcattcttcctaattttacccccaaaacctccgattattactgaaacgccactgctctctcgccgggattccggtgaagaggaggagatg

SEQ ID NO: 32030 - DNA, 3000 bp, Unknown; identical to SEQ ID NO: 32029
  misc_feature (1)..( 3000): 2750-1469P.txt file - cDNA_ID_3048333; gDNA_ID_2926160; Annot_ID_198716

SEQ ID NO: 32031 - DNA, 3003 bp, Unknown
  misc_feature (1)..( 3003): 2750-1469P.txt file - cDNA_ID_3048337; gDNA_ID_1621093; Annot_ID_170791
ctcccactaagacttggcatattcgtcctaactacaccgcactaatataagcccttatttaaagaactatttaagcatggaaaaagttttctcatataatttatatggaatccttttgatttatagtcaaaaatatctcagaaattgtattatattgatagtggaaatagtattttctttgattttatataaatatactttatgcgagaattgaaggtgagttggtcaaattcattttgtgatattacaacttttagttggatgcagatgattgaatataggtatatagtataagagatactgagatagtagtgacaactgacaacctataaggagttatgtagaaactttaatatatgaaatgtgacataagaaataagaaaaggtctattacaagcgttataggggaaaatattgtgtaaagggctgcgagcatgttatccttgtcctcgagcctaaaagcatgcatcgtcgaagaaggtttttaagtcgaagcaagttttgtagtgcaaatagataacatttatcgatacatgtccaaaataaaagtatagctatataacacaactttaagaatgatttcttcttttattaaaaatatttgtttaataaaataatatttaaaaactaaaacatgtaatctagctatttcttttagtattgccgatttaaactttatgtaatgcatgctagctattggatattgagttattgacataaaaaactaataaaacttgatataatgaattaggcagagcaaatgattacttgaaagattaagaatcatttttaaaatttgttttctatcaatgcattgtggttgtatggtgtgtgtgttgttgtcatatctcaaatcatgtaggtggagaaggtgaaacgtaaggcgccaatgaaatggtacgtccgacatatatatacgttataacatatgatttgtcaataaaacaatcatgtaatcaaaattgtgattattatttcataagacaagttaggcgaggctgttcatggacatttggacatctggagatcacaacccgaaagttgggctttcatttaattggtgggacgccatataatcatatgtcttaaatggaatagtggtgagacttgattgtttatttttatatatacaattttttacagagaacaaagacaatacaaagaatacaaggagccaatgttactaaaaagacgacattacaagagaggccacaaaaacgagaactaaacaatgggaggattacactttggagaaagacaaaaaaaaaaagacgacatttgaatttgtgaagaacttttaaattttgtttggtaacagagataatagaagtaattacttagaccgtttttacctacaagaaattgatttatttgttttattatgtcaatggaatatgatgtaatattcaacaaatttgatacttaaaagaaaacattatttttaaatattagtagggttatgagacttgactatatatttggcctatagaattaatgaagatggttgacaaaaaataaataaaaaataattaagatgtcagagaaaccattaattccttaaatatgtactaaataaaattaataatgttacaatcatatgtgttagtagaatattagtgagacttgactatacatgttttactggcctataaaattaactaagatgtcagagaaacaagaattctatggactacaaactataaatttcggtaagattcaaatatcttatgactttatgacagtattttataaattatattgctcataaattctgtaaatgttttgcttttatataaaagttggagtcgcacattattcagtttctctaaaaataggcaaacaaattaagtgaaatcgatggatggacttggattctcttatttaattctgaaagctacatggtcgtgggaatgttgccttcataggtggttgatgctccatcaccgttaagagtcacaatatgtagttgttattcaatattttgtcgataactaagatcaaaaatgggacaatactatataatgaactcgtctttccgagtcctttggtctcttctactgacaataatatttaagtgtctttgttaaaaaattcaattcttcatcatatcaataattgagtatgattttattagcaacacaaacaaacaaaattctctaaacttattatattctcagagaaaacgacagataagtaaaacattaaatgtttttctttttcttgacgcccaacatcagctgtgtttttgtatttaggttaaaatgttacatgtatttataggatataaacgataacttaaaacatgtgattttgtgcaaggttttccgaaaattctgtttttatgtttacgaaaaaaaaataaaatctcatatttaaaaagttttctgtttttatcattgtatttacttgatcttgttgacaaaataactattttacttattatttataaaatttaagttaattaatttgtttaagtagtgattaacttactgatatgaatatgattgccactagtatgcttttcttctcaagtcaatatgaaaaatgtgaaattgttagccctaagcatctaacggatactgggaagcatacggttcatgtttgtcactacaacaacaatttttattagtcccttataacatatctcttttactgatcttaagcatcatccatagacaattgcaggatcacaccagttttggatcatctaaattttttttaattttactaaaattcctccagatctaaatttcattaaatcctaagtctaatacattcggtatttgagaaccccgcctttgttttaagatttttaatcataactcataagcgcgtatgaattcggattatccaaaggctaaactacagaaccaaaacgacatagttttttgtcgtttagaatctataagcgcagacaaaagtcaactttagaatcaacccaaaaatagaagtcaaaattaaaaaccaaaaccctaagattttagagtagactctcttcgaatg

SEQ ID NO: 32032 - DNA, 3003 bp, Unknown; identical to SEQ ID NO: 17877
  misc_feature (1)..( 3003): 2750-1469P.txt file - cDNA_ID_3048351; gDNA_ID_1621093; Annot_ID_170766

SEQ ID NO: 32033 - DNA, 3003 bp, Unknown
  misc_feature (1)..( 3003): 2750-1469P.txt file - cDNA_ID_3048356; gDNA_ID_1621093; Annot_ID_170764
tttttttgtgaatgtataaacattcttcttcatagataatttcacttctttttttttgtcaaagataatttcacttcaatgtaagaaaaaaatcattttatttgcaattaaaaaaaaaaggtatattagaaaagtaatataaaaagaagcaagaaaaggaaaagtacagactaagttggacccagaagaacaaattctaatttaagcttccatcacaaataatgaatcatgatgatacatgccaactaattccactctcacatcatgtaattaaaaaggtactataaactcatatgatcatatagtttttcactttttctagacatagcttaagatatttgataaaagcctcactgcaacttcataataatggatgatataaagctggcagattaattcctagattacttagatagattcagttttgttctaggatgcacaaaaaaggttacaaaattatttgttttcttactgtttctggcaccaaaacagaaaatgccttagatgagtgaaccatggccatacatattcatatcaggatcatcttcatcttcataatctggttctgtagatggtctgcttctctttgcctctcttgctattattgattgtcctctccctttcttcggctttcccctgtaattttatcacattggtcaacaaaccaaaaccatgtatcagagacatacagggcaggtacgaacgaggtaaagtaagctaggtcgggaaactaactgtgtcgacaaaccacccttggatcgccctggccctaattcagctcgtccatctatatcatacagagataaagtgtgtaaaaactgatccaagatttgcaaaagtgaattcagtgtagttgtttgctgcagggcttaccttctcttccaacaccaagttcttcagcctgaatacatttcagggaagatcaacataccagtctaaaaacctttctctctaatgaaggcagagtaataaactaacaaatgacagtcacaagaaaagacacaggcatttcaaagaactccagtctctagctatttgacatcatagattcagctttcacttaagtttgaagctgctagagatattagccatgtagtaatcaaccatatctaaagaaactatattctcaaaccttttttctaaagaaggccgagtaataaactaacaaacgacagtcacaagacaagacatatagtcacagaactctagctctttcacaatcatagattcagctttcacacttgtttgaatctgttagagatatttgccatgtagtattcaaccatatctaaagacactgattctcaaaccaaactacctactagaaagggaaccatatgttctttcggcagttgattctattgcaaaccaacacaacaaaacaaaaaacgtctttgcatatgaaagaaggtgataaaaattgtctaaaacatacagctggtgatgtaactgaggacaatgagaagactctgtcttcaggctgaaacttccttgaccttttagcactgcagaaatgggttcataacttcatatcaaactcaatttctcgttccacacaacaaaatactaaaactgagaagttaccacattctctaaagtgtatgaagctgcaaatagaatccaaagtcaatgttttttcagaatcaagagaagaggagaatgagagacctagcagtactcttggaggaagacaaaaacccttcaaagcctttcaaagcatttccaatatgactcgattcttgaagatagcttgtctccaattcataaacctaagattacaaagaacccaagatttgaagtatgccccaaacaataatttctctatgaaatcgaatttcacaattgaatcgactctggaccattggtgccctaacctgtttctcgatgcttcgtaactcttggcgaagcttctctcgcttgttcagaagagaagtgagcatcgcaccaggatccgtcgaactcttttgccctaacgacattttctgagaaagaaatccacaaattgcgcagctttttcccttcccagaaatgggtggtcgctgaaattcgacgcggaggtaaccgttgcctgatttgagtcgattacgatggagacgatgattctggaattcgatttgggggttttcaccaatggtccggtttgatgtcaacaaaaataaaaatggtccggttctcttttctttttataacttttttttatgggtcagagattttattaactcaactagcaaattgaccaaatagtctacggccaaatgtggctacctgctttgctaaagaaagaatcagccaaagagttggcattgcatggaataaacacaagtaaagtgagaagcatggaaaaagaatattgaaaaatattctacctcttgtaagaatattgaaaaatatggtggtatttgcgatcccattgaatctaatgtttaatataaaatgtagtgatgtgcaacaaaataggtaaaataagaaatgctttgttaaaagtcattgatataaaaaagtttgatgtccatggaaaaaaaaataagtttccagtataacgcttgattggttcgatacttcaatttgaagctgttgaattattttacagtagaacgtgcataaggtccaaccaattactcagcaaactataataaacgagtgatgaacttagatttctggtagcctaaaatcactagcttctttataaagtttccactatgtcacatattctcggtgttttatgttaggaataggagcatctccgctgaaaccccgccgcaactttctcccaacaaaatagacatttagactttattaagagacgacgacttcaaagtctttaattataacttaatgacttaataactcgggtcattttttaatctttgtcttgaatttttctcctaattatttccgactaaagaaacactttcccttaatttatatataggtgacctgaccaccactccttccgatcatcatgactcgacgtggctcgagacaaaacttttaatataaatg

SEQ ID NO: 32034 - DNA, 3003 bp, Unknown; identical to SEQ ID NO: 32033
  misc_feature (1)..( 3003): 2750-1469P.txt file - cDNA_ID_3048356; gDNA_ID_2926159; Annot_ID_198664

SEQ ID NO: 32035 - DNA, 3000 bp, Unknown; identical to SEQ ID NO: 6422
  misc_feature (1)..( 3000): 2750-1469P.txt file - cDNA_ID_3048360; gDNA_ID_1621093; Annot_ID_170759

SEQ ID NO: 32036 - DNA, 3003 bp, Unknown; identical to SEQ ID NO: 17893
  misc_feature (1)..( 3003): 2750-1469P.txt file - cDNA_ID_3048372; gDNA_ID_1621094; Annot_ID_170899

SEQ ID NO: 32037 - DNA, 3000 bp, Unknown; identical to SEQ ID NO: 6483
  misc_feature (1)..( 3000): 2750-1469P.txt file - cDNA_ID_3048376; gDNA_ID_1621094; Annot_ID_170897

SEQ ID NO: 32038 - DNA, 3003 bp, Unknown
  misc_feature (1)..( 3003): 2750-1469P.txt file - cDNA_ID_3048384; gDNA_ID_1621094; Annot_ID_170888
aagtctttaccttttcttatatcttcttcctcttgaatgaattagatggatgcggaattagaacctgtagctcttacacctcagaaacaagacaatgcatggaagcattgtgaaatttacaaatatggtgatagacttcagatgcgttgtctctactgtcggaaaatgttcaaaggtggtggtataactagggttaaggacatcttgctggtaaaaagggacaaggtactatctgtgaccaagttcctgaagatgttaggctctttttgcagcagtgtattgatggaactgtgagacgtcagaggaagagacataaatctagttcagagcctttgtctgttgcttctttacctcctattgaaggagatatgatggtcgttcaacctgatgtaaatgacgggtttaagtcgccgggtagttcggatgtcgttgtgcaaaacgagagcttgttgagtggcagaacaaagcaaaggacttacaggagtaaaaagaatgcttttgagaatggtagtgcgagtaacaatgttgatttgattggtagagatatggataatttgattccggttgcgattagtagtgtgaagaacattgtgcatccttcctttagagatagggagaatacaattcatatggcgattggaaggtttttgtttggtattggagctgattttgatgcagtgaattctgttaatttccaaccgatgatcgatgccattgcctctggaggattcggggtatctgctcccacgcatgatgaccttcgagggtggatactgaagaattgtgttgaggagatggcgaaagagattgatgaatgcaaagcgatgtggaagaggactggctgttctattttggttgaggaactgaactctgataaaggctttaaagttcttaactttttggtttattgccctgaaaaggtagtgtttctgaaatctgtggacgcatctgaggttttatcttctgctgataaattgtttgagctacttagcgaactggttgaagaagttggcagtaccaatgttgttcaagtgattacaaaatgtgatgattactacgttgatgctgggaaaaggttgatgcttgtgtatccttctctatattgggttccttgcgctgcacattgcatagaccagatgctcgaggagtttgggaaacttggctggataagtgagactattgaacaggctcaagctatcacaagatttgtttataaccatagtggtgttttaatctgatgtggaaatttacttctggtaatgatattctgctaccagcatttagctcttctgccacaaattttgctacattgggaagaatagccgagctcaaatccaatctgcaggctatggttacttcggccgagtggaatgaatgttcatattcggaagaaccaagtggattggtgatgaatgctctcactgatgaagccttttggaaggcagtagctttggtaaaccatttaactagtcctcttttgcgggctttgagaatagtttgttctgaaaagagacctgcaatggggtatgtctatgcagcattgtaccgagcaaaggatgcaatcaagacacatctggttaatagggaggattacataatatactggaaaattatagatcatggtgggagcaacaacagcatattcctttgcttgctgctgggtttctttcttaatccaaaactcttttataataccaacgaagaaaatccgtagttagcttattctatcggtgcccgattgcatttgagagattggttcctgacgacaagattcaagataaaatcatcaaggagttaacctcccacaaaactgctggtggagtttttggaaaaaacttggcaataagagctcgggatacaatgcctcctggtatggttaattttcctgattttcttgtataaatcttttcgcttgtacttctcttacttgactctcgttacattcttgtttcttagctgagtggtggtctacgtatggagaaagctgcttgacctctcacgttttgcgatacgcattcttagtcagacgtgcagttctcagttagctgcaggagaaaccagatacctgtcgaacacatataccaatcaaagaactccattgagcaaaaacgactcagcgatcttgtatttgttcagtacaacatgcgcctcagacaactgtaagtcttagatcttgtcccatctcagccaactgcattgtttccaaggaataagaaagtatagaaataatggttctatgtcttctctaggggtcctggaagcggagatgacacactagacccgttgtcacacaacaggatagatgttctgaaagaatgggtttctggagaccaagcttgtgtagaaggaaatggaagcgcggactggaagtcgcttgagtctattcataggaaccaagtagcaccaatcattgatgatactgaagacttgggttcaggtaaaaagatttagcatcctcggacaactttttttgtgtgtttcgaagattttagattttaaaagttgaaatgaatgtgtacaggtttcgatgatattgagatattcaaggtagaaaaagaagtgagagatgaaggttattatacaaacacatcggagaagttattcacgtaagattgatcatggttggtttaagcttcttcgtcgatgctttctgacttacatgaagctgttgtagtcataggtgtcgatttgtaacattagagtcttccctttagaattatctcttctacaagacgtttcagtattcttattcttcttactctgcattgtcctattaggtttccatagagtttgggttttataatcaggttctgtccagatttttaagttgtttgacaaatatatttaatatggtcatgaaatctaaatgcctattttctttcatatatatatttgatggctttgttagaccatctgttttattactagcataattactccttaattcttgtcaagtttttgaccgatatctaagcatacacaacagaaggacctctcacaatg

SEQ ID NO: 32039 - DNA, 3003 bp, Unknown; identical to SEQ ID NO: 21262
  misc_feature (1)..( 3003): 2750-1469P.txt file - cDNA_ID_3048432; gDNA_ID_1621095; Annot_ID_170974

SEQ ID NO: 32040 - DNA, 3003 bp, Unknown; identical to SEQ ID NO: 21262
  misc_feature (1)..( 3003): 2750-1469P.txt file - cDNA_ID_3048432; gDNA_ID_2926163; Annot_ID_198915

SEQ ID NO: 32041 - DNA, 3003 bp, Unknown
  misc_feature (1)..( 3003): 2750-1469P.txt file - cDNA_ID_3048448; gDNA_ID_1621095; Annot_ID_170936
aaggcttgcctttggaaacaacattgctcgtattggagaaacccttcacataatctcactcgcatagtcttcatattactcaattctctgttatgtagccttctcttctggcaaaaagctaaggacatgtaagtctccgctccccattttgaagtatgattgtttgcaatcaaattgtggaatcactggctttctttttttttctggggtaaagctcgaaacttaagttctttaactacgattcagtaaacgtaacttctcataaattagagagtatgctgtctttttaatagaattagttttttcatgatgggtgaaatacatatcatagtaagacacccgtaccaaaaagttcaggttccaaaactcatcttgttttctgaatctcacggatatgcaataaacaaggattaggtactagaaggtttcccaaaatgttttgcttactaaatctacacaaccttagtttgatattctatggttgtaagtcttcatcaatactaccaacatttcacactgatcaaatgttaattaatatgagtgtcactttactttgcagaaataatcagcaagatctttttagcatatttggctcaatgtacactatagtaatcttctcgggaataaacaactgtgcgacagttatgaacttcattgcaaccgagcgcaatgttttctaccgtgaaaggtttgcgcggatgtactcctcatgggcgtattcattttctcaggtttaaattttttccatttgtaactttggttttgtcgacttttaagaaaaaccttatatagctcgtctcttaggcttccactcatattggatggataccatccactggccaaatttctctatacatgattcaggggcctaatgtttttgcaggtcctagttgaggttccatactcactactccagtctctactatgtacgatcattgtatatcctatgatcggctaccatatgtctgtttacaagatgttttggagcttgtacagcatcttctgctcgttgcttatcttcaactactgtgggatgcttatggttgctttgacgccaaacattcacatggcattgactttgcgctcaacttttttctccatggtgaatctgtttgctggctttgtcatgccaaaacaggtaaccccttatctctggctcttcttttacatacagccaaaatccaaagtatatatcatggaacctgtggtcttagaaacttattgcatcaataaccaagagatatgtcaagtcgagctaagtcagaatgttgttgcattgcatggaaatgagaaaaatgtaatgttttccgcagaaaatcccaaaatggtggatatggatgtactacctgagccctacatcgtgggtgttggaaggattactgagttcgcagtatggagatgtcgagaaagagataacagtatttggagagaagaagagtgtttcagctttcttggaggattacttcggctacaaacatgactccttggctgttgtagcgtttgtcctcattgcttttcctatcatcgttgcttctctttttgccttcttcatgagcaaactcaattttcaaaagaaatagttctttttatttttgtcagttaggcttttctttctcttatgatatcatcataaacgttttacattttctctatctggtctcaaaaatgggcaattgtgaagcacacaaagaacaagttttgagaattgattccagcagcaaaagatgatcttttattacatataacaacataactagaaaattcttgagaggtggcttggttttgttgtttattcaaaatgcggtatggaccataccgtatggtctaaaatgttcgacgtaacgattccaacggaattggctcgagaaagcaacccctatttgtttattgattacttggcctgtgttattcagttgcaccatgcctataaggacggacttgtctaacttttttttttttttttaattttattttgtaaagttgaatctttttatttttctaatgtggtttccaataatgaaaatgcatcaagacggatgaaatttagtatgatgacttgatgatgagattaccaaattttaggtaatttgtcatcggaaaaacgtgttttcttttctcaaaagaattttaaatttgtgtgttgctctcccaaaaaaataaaacattccttacactgttacacataccaaataggcaaataaaaccgaactctgctgtgtaagatttggttttaaccaaaaaaacaacaaagaaaaaactatttcttggtggaatttgaagattccattggttaaatgatctactaactatcctcatccatattttactaataaagtaataatcatgttaatttatgaaagaactaaaaattgtcactgtttggaggattaaactcctctgacatgtttttaaaaaactatatacacacagttatttgaaagttaagttttgttgcgtcaccacttctcatattgtaaacgcgtttgcaagctaaggttttttgattaaacaaaaccttatctcattaaattctgacaacgaatcaaatattcaatcttcgtgctgatgttgaagataatatcacgtctctctcactgcagattcgatctcagggaaatataatacttttacagagttacgtggtcaaagtgttcgacgaaatgcctcacagaaagccaataagttgcgttcaagtatgaatactcttgcagatagtgggatcattgtcaataagctgattttcgaaaagatttcgtcttgataacattttgtcaacgcttaccagatttgtattagtttattcgatctttttctcccggattctatggatatgatcacgtgaagcatgggagatgataatgtatgcgtaatgtttgttaaagttattataattacaaacattcttccttcaatagttcttcattcatttgacgtttgcttcttcttgttcttgttaagtttgttttttgttgttgagttccgttggcattttaactgaaaatg

SEQ ID NO: 32042 - DNA, 2435 bp, Unknown; identical to SEQ ID NO: 17937
  misc_feature (1)..( 2435): 2750-1469P.txt file - cDNA_ID_3048456; gDNA_ID_1621095; Annot_ID_170924

SEQ ID NO: 32043 - DNA, 3003 bp, Unknown; identical to SEQ ID NO: 17938
  misc_feature (1)..( 3003): 2750-1469P.txt file - cDNA_ID_3048456; gDNA_ID_2926162; Annot_ID_198853

SEQ ID NO: 32044 - DNA, 3003 bp, Unknown; identical to SEQ ID NO: 29102
  misc_feature (1)..( 3003): 2750-1469P.txt file - cDNA_ID_3048459; gDNA_ID_1621096; Annot_ID_171008

SEQ ID NO: 32045 - DNA, 3003 bp, Unknown; identical to SEQ ID NO: 29102
  misc_feature (1)..( 3003): 2750-1469P.txt file - cDNA_ID_3048459; gDNA_ID_2926164; Annot_ID_198951

SEQ ID NO: 32046 - DNA, 3003 bp, Unknown; identical to SEQ ID NO: 17943
  misc_feature (1)..( 3003): 2750-1469P.txt file - cDNA_ID_3048467; gDNA_ID_1621096; Annot_ID_170996

SEQ ID NO: 32047 - DNA, 3003 bp, Unknown; identical to SEQ ID NO: 17943
  misc_feature (1)..( 3003): 2750-1469P.txt file - cDNA_ID_3048467; gDNA_ID_2926163; Annot_ID_198924

SEQ ID NO: 32048 - DNA, 3000 bp, Unknown; identical to SEQ ID NO: 17953
  misc_feature (1)..( 3000): 2750-1469P.txt file - cDNA_ID_3048493; gDNA_ID_1621096; Annot_ID_171048

SEQ ID NO: 32049 - DNA, 3000 bp, Unknown; identical to SEQ ID NO: 17953
  misc_feature (1)..( 3000): 2750-1469P.txt file - cDNA_ID_3048493; gDNA_ID_2926164; Annot_ID_198987

SEQ ID NO: 32050 - DNA, 3003 bp, Unknown
  misc_feature (1)..( 3003): 2750-1469P.txt file - cDNA_ID_3048500; gDNA_ID_1621096; Annot_ID_171043
attgcataactttttgggaaagatattgagggtgttctttgaataaatatgttgtacactgaaaatttcccacattaagagtaggggattgatattcatcatcttttcaaacgtaatcttgtaaagttcaacttcaacccaaagtcttggcctttgtacgtttgttcctcacttgggaattgggatgcaaagctgtgttgcaaaatgtttagaaataatatttactgttatatagtttttctggtatcattagtcacaaagcccgtctagctcagttggtagagcgcaaggctcttaaccttgtggtcgtgggttcgagccccacggtgggcgctttgtttttgtttttttaatccaaatttgatcatattctgattttagttttgagtaccttgactagtgactcttgagcatgtgttttatgcaagttttaagatatcctcgcctttaattacgctacgtagaatatgtgaattagtatggtacacccaaagaaagaacacaaatactttatataataatacaacatccaaagtcaaaaccttacaatacatatggtaccattttgttcccctctctctctctttactaatctctctactgaagacttttgtctctgtttgtcgcctgtctccgccaaaagctctaagtctctaaccatcacgtagagtaatttgttgtgtcttcaatccgtgcaattaaatccatgacaaaccgatatccagattatgagaacaagtagtagcaagatcccaagaacccaccagttttatcttcatgttctggtaaccacaaatttcctcctccacctgtgtcccttggttttcttgtattcccgcgccttaaagtatacaaattaacccttacattaaaatggctatcacggaaggtctatgaatttaatgtttggagtcaagtttgcctttacctgagagcgtagattctcggtcttgtcagtaagaactgttagattttcccctctgtcgattgcctgaaaatggatcaacaatattggaggtgtataaagcacagtgatttttgcagacttatcattgtaaaaggtaaagcaaaggagaatgatttgttgcttgtcttaagtgtggagaaagacataagagagtcaaatgatgagcattaccttgtcaatattctccaacattatacttttaacttctgaaacctgagccttgacttttattagtttttcaatctcctctgcatggtcaacaatataattcatgtgttccttcatcaccggcctgcaatattttaattttaccattaccttgtattcaatatattatagaacattttcctcaaatattgaaatgttttctaagtacccgaactccttgttgagacttttggcgatagctgtacttgcttttccacctccatatctcttcttgaaatcagctttcacacgctccagaaatgcgatcgagatttgcttgctaagagaatctttcgccacaacacaatatgctgaataagaaatttcaaagagccaccatatataagtgaaatgcaatccaaaccataacaaattattttgaaacacatgtgtgtagtttcatctccaaaccataacaaatacaactacatacagaaagaaagacacaaacatctccaatccgcatcacgtaaaggtatcaccaataataagacgcgtaatgtattcatcataaaaactaaactaccaaacactgaaagaattttgagactgcttagttactaattgaatctcccaagagaacaaactccacaaaaacatatcaagattcatgattagataacactttacttaatttgttgatggaaaaaattcttttttgattagatatatgtgcttaattggtatttacaaagtggaaaccaaacaaaatcagtaaaaaagttaaatcaatctaagctcaaatctcaatggaactaatacacaaaacactgttgtatcgccaagtaatgcgaatccaatctatgaagatcctgaaaatgccttaagtttcagatgatgcatatcagctaaccctgagctagatccatcaaaaccttaatggcttcaaactaaaaacattgttcgtttccagagaagaagatagagagagtgaccaaccgtaggcatcttcgacaaggaaattgaaggtatggtgatcgcagttgtaagtgaacttgctgttgctggaggacggaagcttctggagacactgagcagcaatagacgggaaattgcctgtgaattcggtatactcggcgaggatcatagttcctctggcgacgaagctatagataaacgattcttgacccattttgagtcgccaccgagtatggaaccgagttggctcagacagagagaaagagaaagagaaagagagtctttttattctttctttacctttgctgcaaagaaaccaagtactttgcccgtgactcaactcaactacatttcttagtttttatttttaattttcctttttgtatactaaattaaataattttttctttttttggtaggaaaattaaatattttttttcttcatattaaatttgtgttattatttataaatctaatacaattcaaaaaagcgaagatgcatcttaaatttcggcaggaaataagtgtgaaatactcacaaagtcaatatcaatctatgaaaacaatagtattttgatgctttttaaaacacaaaaaaatgtaaaacttatgcatagtgaataaatgaaaaagaaatgaatatacagaataaaataaattctggggaaaacaaccctatcacataaaataaattttgaaatgttgtcatattttattaattttttgttttttgaaattttgagtgtggctcgcaacgacatcactaatttattctcatgtttgtttgtttctcactttaccaatctcacttacagatcttccttcttcttcctcttcctcttccttcttccttaaaccctacaagcttctactctattgacaaatttgattccgagtttacatcgataatg

SEQ ID NO: 32051 - DNA, 3003 bp, Unknown; identical to SEQ ID NO: 32050
  misc_feature (1)..( 3003): 2750-1469P.txt file - cDNA_ID_3048500; gDNA_ID_2926164; Annot_ID_198982

SEQ ID NO: 32052 - DNA, 867 bp, Unknown
  misc_feature (1)..( 867): 2750-1469P.txt file - cDNA_ID_3048541; gDNA_ID_1621097; Annot_ID_171151
gggatgtgaagaaagaccaaaaccctttacaagatcattcatacttgattcttatcttcttctccattactctattacaaccctcctctttatttttaataaatacgttctgaaagcagcattacctcacatgtttgtgtatccgcaaacttgttcggtttatcttatctgttggagtgtgcaaattgattcttttactcggcattagttttattttgttgcttcttctttctttctatctaaatttgttagttggagtaaaatccggacaaccatattttacagggaacccaaatggcgagatagttttaacatgagaaaggaaagattcatgtgaatgagaaactggttaacttgaatctcatagatcattgtatacttggacattttcccaagattagaacaaacaatactagatctctcgaaaatatcttcatcacagttgcaaagagccgtggagaacccaactcttgagctcaaaattgtatcagctagtgacgtcaaccatatcgaatatgtcacggacaaaatggacgtatacgccgtcgtttcaatcaaagacaacacaactcaacagcaacaagcggccaaaactcccattgatatataacggaggttctaatccgacttggaatcacacaccgttaagttctccgtcaacgagagagaagccacgaagcccaataattatgttaaccagtgtaacgttttttcacccacttaattttttggctgggtctgcctaacattctaggcacaagttaaagaggtgatcaatttttagaaattataaccctaatgctaacatgaatgatatataaaaaggccgcaatggtagactataatggcaacaactctgaaacaatg

SEQ ID NO: 32053 - DNA, 3003 bp, Unknown
  misc_feature (1)..( 3003): 2750-1469P.txt file - cDNA_ID_3048545; gDNA_ID_1621097; Annot_ID_171147
aagatacatgtactaaaaaattacccaaaagcaaaaatatggcttcaccatccaacttcccattttcttgacaatacatcttcaccgctcgctgaattccaaagataaaggccatcagtttttgcagtccaaatgcaattcttccaaccgcatctatggaacaagataacatcatcccaaaacacgtttacattcatatgaccattatctttgttcatatagcaccaaaaaaaagttgagtgaagcatattttctccgaagttccaagaaaatctatttctaaacttcagattaatttcacctagatcatcttctttagatttacaatggatgaaaagagtttcaccagttgtcaaaccgttaacaaccgtgacttgccactcagaaatcttcgggactataatgtctctcgtggtggtgccgccgactaagacatggtcttgacatgttagggccagagaaaagcaaattgccaagagaaattgtttgatgcaattcatacttttttcaggcaagcaaaatctttagggagaacttttttgttacttctttttataatggaagagtgaaacggtaattgacgtttaattaaattttgatgttattacattgcattaatgaagagtcatgctgcaaatcatttaagtgattgcatgttaattagaaatgaagctgaaaggttagtacatataataatccaagtacgtagatgattgtggcataatatattaagattaaaaaatactaatttatattgtggtgtaagctattagttttgaatttattatgtgaatcaattttaaaagttattagtttttagatttagattatgacccaagaattcgaagtatataatcgaaaaatttaatgtataaaaataataattcaacatggtcgatcgggtatttatttctagtaaaatagtatttcataaacctaattttagttaactatataaattataacactagtaaagtattctgccttttacgttactttattgggattaataaaaatatattggattcgttgaaatccaataacaaattgtaattttgatctttgattcatagaaacaaaaagttacgaaattaaagaaatttttaaacaaaagagtactcgaccagaaaaatatgtttttttttctattttctcactcatatttttcagatagagaaagcaattttcagtacaccgaaattaaaatccgacgactaaaaatagtttcttctctctctcaaatccttctgagaggagaggtttcttgtcgatggagtttgatttcggttttgtctggaattttatatatttccgtgtatatacaaacaaaataactgccgaccttttatcggatttccgttattagctttgttcgatttatcaaaattttatatacttttgtgtatatacgctctagcgaaattgatctctcttccatctgtgtccgttgatgtctccgtttttcttctaaatcttatacgatctctccaattttttcgaggagtaacatctttgtcacttccttttgctaagttcatactacatcaagttaggtgtatatagtggtggagtttcctcggagtttggtgttgttcgaagaatttcgaacaatctctttcaatagatctagagattaattgacggttggtttggaactgagatcgttagaaaggaggaagtttctcaaaatgacttcattaagcaaatgctttttctttgcattcttgtgtttcattgctctcttgactccatgaatggcaaaattaaattacctaggtgattatttacgctatcctacagatattttcgattttttttgttttgttttgttttattaaatattatgttttgataaatttagtttctaatttactaagcactcactcatccattcaacaaattcaacaagtattcttatttcttagtgtcaaagtacttttcttatcaaccttatcaacaatgtatcacactcacactcttcagaaataaatttctatcctaaaccaagtttaaagatgataatgttgagattatataaaccagtaagtatatggttaaagtgaaaatagtgctatatattatttccttcaacataataccgtagtttctaatttgattttctaagtaaatctaaattgaataaaaaatttacttttatcactaattttaattttaactttttataaactagatatcttttttggtaatatatttttaattgtaaatcattgactcatattttcatttacctaaatactaaaccaaaacaatcttttcaactatatattttccccatgtacttaactaaaatatcataaacaaataccatacgcagcgttttgaagcatacgtcgcatttctctttaatcgttaatttcctgatttaggcttcaccaattttttttttttccctgataaaaattttagcttcaccaccaccattgttcgtttgggtgttttgaacattgatgaatcgttgcttctgagatctcgacgaagataaaaagctcttcggctacttcaggtaaatttcaatttcgatttctgtatcaccaatctccttgcgaatgaggttttgtaaaccctaaatccagttttgaacctctttctctcttccctagtagctctctttctctatccactaattctagcattttgcatcagtattcctctctgcgttcatttctgttttgatgtatgtgattgccctaatcgtcttggccgttactcatttcgttttccttttactctggttctaggtttcgagctcactctgctagaaaccctaaaaatttgattttgtgaacttcccgtggtaaatttgaaagggagatatctcagaacccctaccaaggacgaatcttgatcagagcagacttgatttttgaggtgagaagcttagggaaagttttgttaattgtgcgttcgaatttgagagttttgatagacagtgtttacattggaggttttagattgggtgtaaggaataagtagataggtatg

SEQ ID NO: 32054 - DNA, 3003 bp, Unknown; identical to SEQ ID NO: 32053
  misc_feature (1)..( 3003): 2750-1469P.txt file - cDNA_ID_3048545; gDNA_ID_2926165; Annot_ID_199081

SEQ ID NO: 32055 - DNA, 3000 bp, Unknown
  misc_feature (1)..( 3000): 2750-1469P.txt file - cDNA_ID_3048551; gDNA_ID_1621097; Annot_ID_171144
tcacggttgttaacggtttgacaactggtgaaactcttttcatccattgtaaatctaaagaagatgatctaggtgaaattaatctgaagtttagaaatagattttcttggaacttcggagaaaatatgcttcactcaacttttttttggtgctatatgaacaaagataatggtcatatgaatgtaaacgtgttttgggatgatgttatcttgttccatagatgcggttggaagaattgcatttggactgcaaaaactgatggcctttatctttggaattcagcgagcggtgaagatgtattgtcaagaaaatgggaagttggatggtgaagccatatttttgcttttgggtaattttttagtacatgtatcttgttgtttttggcaaaaaaaaaattgaaataataaaaaacatttgttttaactttctctcttattttgtgtatttttcatcaatgatagattttttgttttagttctttatttataggtcatttaattattagattaatttcctgagataataagatcatagattaaataacaatattgtgtttgtgatatatagagattacattttacacttatatatagtggtaagatttctttttgctttcaaaccattaaaaacctgttaaacgattaacttgactcaagacaaagccattgattattgactcatgaatctagtgactcatgatgaaggagacgaacagtaaatattcatttgattattttaggtaaaaggtagttcagacctagtcatatatcctctaaattcatatagtgatgcaagtattttgcattacttagaactttatattattgatcacccaacacatgatttaataaacgccatgaaatgcatgtactatatcaaaatgtttctgaagcatatagttgacatgagaattttggattggacttaagaatgtgagagttacctgaaatgtcaatttttttccctttgttaacgaaaactcattggaacaattgtatcccccttttggcagtatataaatatattgatggcccaagtagctgtattttccgttatcagccaagactcaataaagtctaccggtccaaatttcaactgaatcaccggtccaaccactattaccgtaactagaccgctttttcttttttacattcggacaaaaaaatcaaaatttcgagcaactaaattgatctcatcttcaatcaaattcatcatcttcgatactcgtttcttctctctttggtttcatacagatcccaaatttctagggctcctagtcctttgatttcttcgactggaatcgcaattccccactacgtcaagctggacagacaccgaagggatcgccatgagagtggcggctacgaggattcctaccataaccaccgagcccatcccagaggtccatctcgtccctcagattcacgcttcgaagaggatgatgatgattttcgccgccaccgtcgtcgtcgtggaagcagccctagcaattatcgaattggaattgggggcggaggaggaggtaatggtggtcgacgctgggaagatgacactcctaaggattttgatggtcccggagatggaggtttccggcagatgaatggtcccccagatagagtagattttaagcctatgggtcctcaccatggtggaagttttcggcctatggggtttgcctacgatgatggttttcgtccaatgggtcctaacggtggtgtgggaggagaagggacacggtcaattgttggagctcggtataactatcccgcgaagtatcctccttcagagagtccagacaggaggagatttatcggtaaagcaatggagtctgattattctgtaagaccgactacaccgccggtccagcagcctctttccggtcagaaaagagggtatcctatctcagaccatggcagctttactggaactggtaagcatgagttcactcttctttcttctatgtatatttattcttgtagtctgttaaggttcctgagtgtctcttatttttgtgggaatcaatgattagagtattgaaaggtagtatggttgttatgttactgtattgttgaaggtttttcatgggatcgactctagaggatcctttcgattttcccatgtatgtgataatcaaaactatatgccatcttcatgtgtatccttatctggttaatttgatttgcagatgtctctgatcgtagcagtacagtcaagctttttgttggatctgtaccaaggacagctacagaagaagaagtgagttaatcttggaaatcattgttatctatatactcattactgagaaccttttctaaattttttctgttggttttcatattgtagatccgtccctatttcgaacagcatggaaatgttctggaggttgctctgatcaaggacaagagaactggacagcagcaaggtatgtcaatctccattttattaggaaatagtcgtgaattatactttttaaaatttcaggtctccctgaaaaggctgatgggaagcaaccccagtctcatcattggcctccaattgtttgcaacaattttcgggcttattgcttatgcttgccagcgtcttatctgtgttcgattctgtcacagaagaaggctacctgtgctaagaaagggtttatgtacttatgttgggcaaatagatttcgctacttgtgtgtattctagaactttagatgtgtttgaaaagtgtagaatttattgagggtgttttagagttggagttaatgtacagagaactgaattttgctgttgcctttatagtgggaattggttataagaacatcgctattttcctctcctattgaaattcattttctttactcttcctctagatggattgaagatgttgtgtatggtcttgacaggatgaatgtatttttttaagttggtagtttgataaggacatgaggttcaaaagatggtttcttgatttgccactcctgctggtcaaagatttggccgtctttctaattttatcatg

SEQ ID NO: 32056 - DNA, 3000 bp, Unknown; identical to SEQ ID NO: 32055
  misc_feature (1)..( 3000): 2750-1469P.txt file - cDNA_ID_3048551; gDNA_ID_2926165; Annot_ID_199078

SEQ ID NO: 32057 - DNA, 3000 bp, Unknown; identical to SEQ ID NO: 6559
  misc_feature (1)..( 3000): 2750-1469P.txt file - cDNA_ID_3048559; gDNA_ID_1621097; Annot_ID_171140

SEQ ID NO: 32058 - DNA, 3000 bp, Unknown; identical to SEQ ID NO: 6559
  misc_feature (1)..( 3000): 2750-1469P.txt file - cDNA_ID_3048559; gDNA_ID_2926165; Annot_ID_199074

SEQ ID NO: 32059 - DNA, 3003 bp, Unknown; identical to SEQ ID NO: 28108
  misc_feature (1)..( 3003): 2750-1469P.txt file - cDNA_ID_3048571; gDNA_ID_1621097; Annot_ID_171131

SEQ ID NO: 32060 - DNA, 3003 bp, Unknown; identical to SEQ ID NO: 28108
  misc_feature (1)..( 3003): 2750-1469P.txt file - cDNA_ID_3048571; gDNA_ID_2926165; Annot_ID_199065

SEQ ID NO: 32061 - DNA, 3000 bp, Unknown; identical to SEQ ID NO: 6562
  misc_feature (1)..( 3000): 2750-1469P.txt file - cDNA_ID_3048577; gDNA_ID_1621097; Annot_ID_171125

SEQ ID NO: 32062 - DNA, 3000 bp, Unknown; identical to SEQ ID NO: 6562
  misc_feature (1)..( 3000): 2750-1469P.txt file - cDNA_ID_3048577; gDNA_ID_2926165; Annot_ID_199060

SEQ ID NO: 32063 - DNA, 3003 bp, Unknown; identical to SEQ ID NO: 17970
  misc_feature (1)..( 3003): 2750-1469P.txt file - cDNA_ID_3048581; gDNA_ID_1621097; Annot_ID_171124

SEQ ID NO: 32064 - DNA, 3003 bp, Unknown; identical to SEQ ID NO: 17970
  misc_feature (1)..( 3003): 2750-1469P.txt file - cDNA_ID_3048581; gDNA_ID_2926165; Annot_ID_199059

SEQ ID NO: 32065 - DNA, 3000 bp, Unknown; identical to SEQ ID NO: 6564
  misc_feature (1)..( 3000): 2750-1469P.txt file - cDNA_ID_3048585; gDNA_ID_1621097; Annot_ID_171122

SEQ ID NO: 32066 - DNA, 3000 bp, Unknown; identical to SEQ ID NO: 6564
  misc_feature (1)..( 3000): 2750-1469P.txt file - cDNA_ID_3048585; gDNA_ID_2926165; Annot_ID_199057

SEQ ID NO: 32067 - DNA, 3 bp, Unknown
  misc_feature (1)..( 3): 2750-1469P.txt file - cDNA_ID_3048593; gDNA_ID_2926112; Annot_ID_196673
gaa

SEQ ID NO: 32068 - DNA, 3003 bp, Unknown; identical to SEQ ID NO: 17977
  misc_feature (1)..( 3003): 2750-1469P.txt file - cDNA_ID_3048593; gDNA_ID_1621097; Annot_ID_171115

SEQ ID NO: 32069 - DNA, 3003 bp, Unknown; identical to SEQ ID NO: 17977
  misc_feature (1)..( 3003): 2750-1469P.txt file - cDNA_ID_3048593; gDNA_ID_2926165; Annot_ID_199051

SEQ ID NO: 32070 - DNA, 3003 bp, Unknown
  misc_feature (1)..( 3003): 2750-1469P.txt file - cDNA_ID_3048597; gDNA_ID_1621097; Annot_ID_171114
cattggagatctctgcatattcttaggcaataatgagcccttttgtgtcaaggcaagctcattccctggtctaaaccctaactccatctattttgcaggcgatggcttcggtgtttacgatatcgccactagaaaaccacgttccttccgtcccaagtctccctcagccttctcgtcagcatcactcctcccttactggatccctccaatgtctctttagtttacttgttcttcactagtcatgttctgtaacttttgttttttatgcttataattgttcttttgcgagcccttggacgttggccgccatcttcatacgagttaataaattttggtgtgaggaaatatacgagtcaatttatgaaacgaaggtagtaactttcgtaattccttttttttttttttttttctctggttgtatgaatcattcatcatcgatatcttatacttttgtatcatgatcgtatggatcattcatcatggaccttgaggggttactcaatagagagcagtagtgtggaagaccttcttggtatgactaagctcagaactctcacggtccattcccttgatggttgtacgttagaaactctgtctgcatctctctgtgaatcgagagaactcgggcagctttcattgtacgaggtcatgcatgataggcataatgaaggaaaattagttcttgatttgattcaactcaaatttttaacggtgggcatgcatatgcctaggttgcctgatcaacatcgattccctccaaaccttacgaacatatgtcttcggtattgttgcatggaagatgatccaatgccgattctagagaagttgctccacttgaaattggttgaattatcatatggtgctttcactgggaagaagatggtgtgttcaaaaggtgggtttcctcaattgtatgagctaaatttatgatttggaagagtggatagtagaagaaggctccataccatgtctccatactttgactataaatgaatgcagaaagttgaaggagcttccggatgaggtcatatacataacatccttaaaacaactgacaattggaggaaggaatagtgaatgggtgtggaaattgtctgaaagaggacaagatcactacaaagttcaccacattccttgtgttcagtttatttactagacctttgtctaattttatgtataaaaattataacaatgtagaaaactacaacacaaatgagatcaaattctgatttttaaaatccggttgtgatgattattaatcgtggaaaaaaatcagggattataacttttgttaaattgtgaacgtacaatattgaactgaaaatgccaaatgaattggttattattactttgatgaaaatgaattgatcgtttaattttttttatatttataacaaaaatgcgatatgctctttttaattctttatttctatttttgcttcagaattttttttcattttatttttggtcaaaaaggttattaatttccttttcaatttgtacgaatttaaacggtgacgtttttgtttaaattatcaaacaaatcaaaacaaaatcaataaaatctaatctctcatcatgaggcatctttgactgctctttaattcactaaaaaagtctaaaaccctaaccattgccctttttcaaacgaagaagaagaagacgaaacgctaccatcatctacacacacacacccaactacttttttccatcgccggcctgtacaaatgtcgactacccgtaggatccgcggcgagaatcggttttataacccacctccgatgagaaaacttcaacaagagcgtgagaagaagagacttgaagcggaggagatagagaaagagaagaagaaggcaaaggagattctcgatcgaaagattaaagtcgaggagaaggagattaagcaacctgaggagtgctcgacctccgattgctctgtgccgagtcgggtctcctccaccaccaccaccaccggaactacttcttccaatttgggccggtttctggattgcaccactccaattgtttctacgcgcacttgcctttggtaattactccgattttgaagttttacttgaatcgacgactagggtttgggcagttttagaatgagaacattagcatcaagcgttgaaaatgggaactttttatcaattcttgggaacgattatgatctcagtctcttattgaagatagaattggtttcaggttttagaatttatcgctatttaggattgtagatttgagaaacagattcagttagtagaacaattgtgatgttgttgtggtcagtcatagtttctgtgtttttgcttcagacaagtagtaaggggtggagaactcgtgaaccagagtaccgtccctatttcttgctgaatgatttgtgggattcatttgaggaatggagcgcctacggtgtcggggttcctcttcttttaaatgggatcgattcggttgttcagtattatgttccttatctctctggtattcagctttatgaagacccatctacgagcctgcacaactaggaggtgagttcttacattctgcttatatttttgattgtttcctatcaaccattagcagtagtgatcgggttctttgctcgttgattggttcttcttctgatagaaaaaaggatagcagttggcttttttgtcaatttatatattttgagatgaagccacttctttcttgggttgttcttaatcttcggatgcacgttctttaggagataggaaaaccaacttctaagcgttctctgctacaatatctagagatattcatttggatgactaatacacaacaacttttatgctctcaaatactagtcagtggttcaagtttatcatggtgttgaattccaaatttgtttcatctcgttggttttctctttaattcccaattcgtttctgctttctagagtaaaattcgttgttttgatgtttgttcttaaacaggagagttggtgaagaaagtgatggtgattcgcctagagacatg

SEQ ID NO: 32071 - DNA, 3003 bp, Unknown; identical to SEQ ID NO: 32070
  misc_feature (1)..( 3003): 2750-1469P.txt file - cDNA_ID_3048597; gDNA_ID_2926165; Annot_ID_199050

SEQ ID NO: 32072 - DNA, 3000 bp, Unknown; identical to SEQ ID NO: 6549
  misc_feature (1)..( 3000): 2750-1469P.txt file - cDNA_ID_3048610; gDNA_ID_1621097; Annot_ID_171109

SEQ ID NO: 32073 - DNA, 3000 bp, Unknown; identical to SEQ ID NO: 6549
  misc_feature (1)..( 3000): 2750-1469P.txt file - cDNA_ID_3048610; gDNA_ID_2926165; Annot_ID_199045

SEQ ID NO: 32074 - DNA, 3003 bp, Unknown
  misc_feature (1)..( 3003): 2750-1469P.txt file - cDNA_ID_3048679; gDNA_ID_1621098; Annot_ID_171230
agaagatgataacagtaataataaaagcaaaaggcaatcaacggtaacgacgaaggctgagagagttgtttttcttccatgtagccctgcgagatggacggttcttgtggttgttgtgaccctttccgcggagacctctgttcttctttccctctgaggtaagtcctctgagctcacggtgcttgtgaactgggttgcagatccagttgattctcgggtcattacgcacagcattgtgtgctgggtcaaccaagatgatctcgtagtacttgtaggtcgaatcctattaaagaaaaatggacaagttaaaatatctaaccagaataatcacctaaacgaaagagtactgaaagaaggtagtaaatgtacctcattgagccagtaagagttgacaactctgagaccacccaatttcctgccagcacgctcctcagcaacagaacgcttgctacgctggaacttgagttgtgtcactccctggtttgttggcttaccatacacaatacccttaggcactggcctcttgcgtccaccacgtctcacacgtacacggtacacaacaaagccctgacatacatcaacatctcaactagatttgtaacagaatttgagactagattaaaaatgattcaatcatcaaacaacgcttccatatttctccactaacacagcaaaaacatcaaaatcaaacaacttaatctagatcatacacatatatcacagcaatatcaacaaaaacctcactatctacaacactccaagatctcattttcaccaataacaatcaacgtctacaaaactcattatacagctgaacagcagtgatcaccaatatgaaacaaaatcagctaaaactcaaatttagggtttaaagagtcacctgcttggccttgtaacccaaacgacgagccttatcaggacgagtaggcctgacgagacgaacaatcgaaggttgctgtctgtactcccagcacctaaccctctggaggaatctcatcacatcggactgtttcttcctccatagctcagatacatacttgtacgcacctatatcaatcaaatcattaagctaagtagtttgcaataacagatacgtaacagaaacatcatttgaacaaacaatggagaagctgaatcgatctaagaaacgagaggatttgatctagaagaagggatggagaagaaggatttacccattttcgaagattcgcagagccgcacaacactggcgcagtgaagggtttgttcctgatttaaagtggaagattagggttttatctccaatggacctttatattatacgaaattgggctacttgaattaataaataaaggcccataaaagacttccactattgggctttgaaattcggattaaggccctttaatttctttttcagacgaacagacacacacacaaaacaaaacttgtattgagtacaaaaaaatatttcatcatttgacaaaattagaaaaacattattatgtataaatagtaaactattttctgcacaaaaaggtaaactattttttcatatgatgatcgattaaaagttcactaattttatccttttttttagagtgatgcaaaaaatcattgtcaaaggaatgaaaggaaccaaagaagacacggggagagcccatcccagccggagagacttataagtttgatagacaaaaacgtcagaaatcgtttgactacgatgagtggtggtggtgttctgaagtataaggatggaatgagagtttggtttgcatctcgtgcttagaggagagaagtttctttttcataaaagtttcaatcagtttgcattttagtgtaaagaacgttttatttctttgaatataatttagcattaaattcaaaaaaaaaaaaaaaaaaaatcattgtcccaacgactatagttggtcgttggctttgacacaaacaagtataaatgaatacaacgatcactagcaaaaaagacatgtttattgtgaacaacgagagttaccgaaactaagacgtaagtaacaagtaacaactcgacaagtatgttttagacttttctagttgaatatgcaaaacagagtatacgctttttgttttttgtttttgtcatggagaatcaaataaatacgaaaccatctggttcaaacttcaaaggttgtaatcttaaaaagaatttggcccgtattttgtcatatttccgaatcatttatttttcgttttttgcattggtataatcatgaagtaattttgtccactgaagtcttaatcttcttaaaatcgttatccttcatagttattgtagtgaccaatcgaattcatatttggtgatggatgtgatgctttcagctattatcattggttaatggagatatactttgttttcttaattatatcgatttatgacctaattttcaatgttatatcaaacaaaataggcatgatcatgttttaaacgtgtctcaaattacagtgtatgtgtgtattttcttattaatatcattttcattgttaaatatgatgaacataaattttaatattgtttggccaaaaaaaatgaaaaaatagtaatatgttaaatatgatgaatacaaatgtaattaaccttattgtatacctcatgtgaggaaatcaacctttctaaaaaaacttaattagaaagtgagagatatctaaatcatttgttttatattagtaatttttaaaatcagaacaacaattgatttaaatggtataacttcttatcggcctctacgtctataaatatgtacatcaagtgtattgtttgacagagtgacaaaaaataagccaccaaagtgtttgtgttttatttatcagctccattaacctttacaaatatatggctgctcataatctatgcttcaattcagcttttgtttgcaacgttcatcatcaaaagactcagcattttccttgtaacgctgtctccaaaacgacctcgacccatgctgtcaccttccaccgccgttccgccaattatcgtccacctctatg

SEQ ID NO: 32075 - DNA, 3003 bp, Unknown; identical to SEQ ID NO: 32074
  misc_feature (1)..( 3003): 2750-1469P.txt file - cDNA_ID_3048679; gDNA_ID_2926166; Annot_ID_199160

SEQ ID NO: 32076 - DNA, 3003 bp, Unknown
  misc_feature (1)..( 3003): 2750-1469P.txt file - cDNA_ID_3048683; gDNA_ID_1621098; Annot_ID_171225
ttttgtagttaattacttcaaaagttttagttacttgtttaaaaaataaagttataagattttgttagagataaaatcataaaatatacttagtctagcatatgatagatttattgacaaagaaaccaagaatacaatttgaagtgagtaaagagagtaacctcaagaggatttcgtaatatattggcccaacaccaagctccgtgactggccctatgaacaaacacaaagagaattacggactcatcaccaccgtaacctcccatcgtaatctcaatcaatgtgtgtgcttattaatgctaatccactcaatttttaacactaaatgtatgcagtttagtccacatactggagatatcataacgttacacgtctatctgtgttggacaaaaccaacatatgtactctcttttcttgctagctgacaagtctttcaaacaagctagtgttcactcaaacaatttcaaggaaaaaggcagaaaaaaggaaaaagagacgtgaacttaatctcctctctcgtctgtggtccaaatacgttttgaggttatccgtaaaataacgtacacatgccttatgaataataaaaacaaaattttgctttaggccatcctgttatataaatttcggatctctacacttttaataatatatatttttttaaaatgtgaatctaaactgaaccaaaacaaaacaacaagaactatacgctaaggcatcgaagggtcacaaaaattgttaaaagcttgaggataatgacatgtcatagtgttgagataatgagatgacatgtcatagtattcacctcatgttgtcgttcaaggatatctttatcacctcatccatcaaaaacaaagatagcaccatatagtttttctccatgaaacttaattaatcttagctactatgatagatttattgacaaaaagaaaccaaggatacaaataacattcctttacaaggagatttctatctctcttaccctggattgcttcgcatgtaaagcttattcaaactcaaatcaaataacataaaggaaattacttaatagaatcataatatcatatcaatcaccttccaaacaaatcatctaattattcccaattagtttgttatctagatcggaatgtatgaaggataagttgaagtttatcgttgaagaaaagaaaccgcacggaggagatacgcgaataaggtagttgggacagagaagaaagcagaatggtcactatcctccaagacatacagctgagaaggtggccaattctccaccaaaaggtcttgacgcacagaatcaaatagattatccttagcagtcttgatgtaaactcgaggaactttctcggcctcgggatttggaggtagcttatcaagatcttgaaaggccctcataggagcaggacgcaacagcttagatgacaaagttacgtcctacaatataaccaattttatttatatactcaattcaccacatattaacaaaaacaataataataatactatagtgttgaaatataatttatgtatactagtaattaagagattaacctcaagagggctttggctatagtaataatggcgtataaactccggtttcatgaggactccggtgggtggtttatcggtaccttcaccatatgtgtactcccatatatcttcttctcccacatgtatctatcaaatactcacaagagttaaatagctagcgagtggttctatatatcttctatacattacaaaaaaaaacgaagaagaagagaggtgagttagtaaaagagtcacactcacgtttgaaagatgcggagaagggatggatccgggttgaaccatggaagccgcgaggtaaatggccatggagattttgtcagtgaacttgcaaagagcttcggtgacacttcctccaccgatgctatgtccaacgagtatgactttgtggtgaggagggagatcggacaagagagagaagagaggacggttatattggtcggagtcgaagacgatgttagagtctatgaggctgatgccagcgccggtgagatctacggaggttgatttgaacccggcggcgtcgagaagagtggtgagtttataccaacaccaagctccgtgactggctccatgaacaaacacaaagtgaattacgggctcagcaccaccttctcctcccattgcatgaatcttgatcaatgcttttacactatctcaccttttaacacgttatgcagttttggtccacagtttggagataacaacgtaacgtacgatcctttttttcctttttcaaaagggtctaatgtttgtatttaattttgctaccagctcaattttccattttttcattttaaatttgtaaaaaagatattgtaaagcacacaaaaagaaaattagatgttaaggtaaaaagaaatatttaaatttcagataattaagattccaagtatctgagcaaaactggaatcttaattatctgagtattattttcttgaaatgcctaatatattctaaagctattaactatgggatccctaataattattttggtacttattaacttatatgaagattctaattggagaacttgcttgctattaaaatatgtgatttatacatagatatatttaacggagattattgaaatatatttttatcatatgaagtttaatgtggttattatgtggttaactattctactagattaatatgataaattttacgagtatgacacataatcgaatgacttgtaattagtgtcatgtcttctttagttctctaaatttaaatttaaattgggccataagcagaggcccattaaatttaggtaaggttttaggctcagtaagcaataaattgggccgtaaagcaaaggcccattataagtagtgaggaaccagaaacagaaaaaaaaagagactcacctgacgaatctcaccggagagtctagatctcttctcttccacaacgaagtttggttcatcaccggcgaatcctttctccgacgtcataatg

SEQ ID NO: 32077 - DNA, 3003 bp, Unknown
  misc_feature (1)..( 3003): 2750-1469P.txt file - cDNA_ID_3048685; gDNA_ID_1621098; Annot_ID_171221
atagtaataaaattttgtgaggcgatattgaatgctaattagttagagattaattaatgatagctttttttggtgactatatatgttgattaaaggataaaataccacaaaatataatttcaaataaatgaaaattattggattgatatgtctactacatcacatcatactgtatatcggacataaaagcaagtacgtaattaatggattgatgatattcgtgagctaattaagctatgagtgtgacatagataatatggaacgggttcgttggagtatagttgaggtagctaatgagtttgttgaccagaattaggtaaatttcaatttcaataatatatccgatccttttttaactggagtattatttaagaataatcaagaccttctcaaggtttactagttcagattcttcgttattgggaaagtttgtctgaagaagaaatccttagaatcatggagagggttacgtgtgagaggagacaactaacagaagagtctcctgttgaacaagatagggaggttgaaccaaaaggataaacaattctaccaattagcttcaattatttaattagttttgtagattagtcctatcgtattcaaactctcttaagcataccattgttttcttcgttggaggctgcctatgtttatctactattattaaaaactatagatacgtcacataagaaataaacagatgtaataagattaaccaactagatgaattacctttggttgttgaaagggagataaattataactgatggtgatgtaatgcattcggagaaattctgagagagacatggacaatggcactagaggtgtcccaacaaattatatttccacacattattattcgattagggttccaaattccaaccacttgttttttttatccatattgatttattcatataaaacatatcattatcgtattttatagcgataaaaacatgtggatacttttaaagaagataaaaagattaaaataaaacgttattcagtatatttcgtaattctttgtagtactagggacttacctggacgggatcaactcgtgatcaataagacaagtggcctaggctagtgatcgcattgcacatatcgtttgggtgctatgcttaaggttttcctttaaggaagagtatgtgtcattatttgtgacagaggagatttgcattcgcgcaatgctactgattttcaattttccactcttgtcacgagtactgttgagagttaaaaggttcattgtcaagaacataatcggcattttagtcttttggactcaacatttgcattaattgtattcaatatagatggaccatggaggcgtgaatattgttctaactgctaaggacatcatatctcgatatactagcttgaccaaatggttgagctctttacatactcttcctcaatcactcgtaaaattgaacaaaaaaatttcaaatcccccgtttcaaggaaattatttaatattctttcatccttatttcaaactcactatataaattaaaatattgcttatttataagctcattatacaaattccatatagattctcgtccctttgattaataaacgtcaactaattaacggtaataacttattatatagtaccttacaaatctctagattggtggtccaacggtatttggatcaacaccattgaaataatttagtttattgccgatttaaagtagattaattatcctaatgacaaatatgattttttttttcttctttttgtcatcacaaatatgaattggtatcctcattggcctgattaacatttctaattacggatcttacctcttcgtgccaaagaagacatttggaaatatatgacccccataaaccaaatatatgtttcttattaatgttgtggaatttgggacattttttaaaatggacaaaagaagacagaaacaattttcctacccaaaatggcgtccttaattttttcattaaattgtaaagcctgtttcaaaagaaaattgactttttgttgtgatagtataaaaaatgacatttgactttttaagtgacaccaagattctgacaataacgaattatatccatgctaattaattgatagcttaattaacaattgcgcaacataacgtgatcaaattaattaagctacatatcaggccttgatccgtggtccaaataatcatcctactaaagaaaaccagcttgttatagtaaaaagccgaattcgtgtaaaaatcggtttaaaatattcggtatagactctaatctcgatttactccggtttggttatcgtgtgtgtgatcgtaacttgccggtggatttgcgacggacacgtgggatgttgtaattgtctcacgtgactcatcgtaactacctttaaattcgctactgtgattttccagattcttatgtacatttgtgacttcttcggtctatttttgttatgtttccaaaaagacatgaatgaagaaacattattacagtttcttttcttcccttaagcctatttaaaattgatatttctaaattcgaactatttattcactagtcgaagccttttaacgcaaatctgagctcttaagtggcgcaaaaaccggtttaatatgtaaatagtaactcggtttagattaatttcgggttatttttgtgattagtgtagttaactaattaattcaggtgaataattatattagagagaaataaatttcaggacaaaaaggcaaagctttggtactgtctcttctcttctccgtcttcttcaccatttcgaaaaatctcaaaactttacagagagaaagagagatcctttacatatacttcactgtcttcttgaaaaccctaatcctccgatctgtttaacctccgatcaagagagatttcttcagcttgtgtgtatcagattcctttggattccccgattcttcgtcgtatcgaatcgggggatggcatttccgtgaaatcagtgatgaaattggaggtgagaagaagttatttctatctatg

SEQ ID NO: 32078 - DNA, 3000 bp, Unknown; identical to SEQ ID NO: 6606
  misc_feature (1)..( 3000): 2750-1469P.txt file - cDNA_ID_3048697; gDNA_ID_1621098; Annot_ID_171207

SEQ ID NO: 32079 - DNA, 3000 bp, Unknown; identical to SEQ ID NO: 6606
  misc_feature (1)..( 3000): 2750-1469P.txt file - cDNA_ID_3048697; gDNA_ID_2926166; Annot_ID_199137

SEQ ID NO: 32080 - DNA, 3003 bp, Unknown
  misc_feature (1)..( 3003): 2750-1469P.txt file - cDNA_ID_3048699; gDNA_ID_1621098; Annot_ID_171201
ctcaacttgcaaccaacaatttacatcaacttcgttttggtaaaaaaaatatcgatcgaagataggtgtttttgaccaaactgatgaatgtatcaattctaatcgtaatacattttcgacatttaccacactgatgaatggtttttactgttagggtcgaacaaaaaaaaaatccaaattgatgttagctgttctgatgtctctaatttcgattaattctaccaaaacattaataacttggactacattttagttgaaatttaccccttaaaaacatccaaattgggtgatacattggtgagagagaaaccaaacctcatttaaagtcataagttataataatgcagatgaggacaaatatagattaggatatggtgttgctggtaaaggtgtgaagcgactttgcctccttggtaccttgagaaatgtaatgatgaagatgatagtgttcgtggtgaggatgatgatggtggatatagaggttatgaagctgagtgggaagaagagttattggcccataattctaaaaatatacgacagccattttgaatgatttcaactaaacatacggttagttccggtttatattcagtttcgtaaccaaagaaaaacgcaaatcccaaattttccggaaatggaggaatatttgaatcttatgttgaaagcgagagagattcttgttagtgaaagccatgaagaagtagcgatggtcatcgatcatctctttaagcgtcaagactccgaagagtataaaacatcgcgtgcgctgtacgacatctgcgtttcttgtaacccaggttgcttaaccctaaagcttcttaaagtctatcaatcttcttccagtggcattctcagactccgatcaatctctcaactctctgagaccctcacctatctgaaaaatcaaatcgtattttccaaattctctctcgactctctctatgaaatcaaaccccttttgattttatgccttacaatgcaagaaaccaaagaatctgacatcaagatcctcaggaaaatcgtgtcttttgtaacttacaatgtcgtggagttgcataaagacaaatgggacgagctcggtgattgtatcttatccctagcgagtagcaaagaacctgtcaaggcttttcacgtcttcatcgatctgccaccagtctacaagagtttcatcggcaagtttttggacaaaattttagaggaagctagtaatgtctttctttatccttatagagttgaagattggagcttggctttacaaacttttgttaaaatgtggattcagcttgagaaaacaggggtgacagtagagttactaatggcgttgatggagatttggatttcctctgttgtgaattcagtaaagaagctagtggagatgaaaaaagaacagtttttggtacgagggcttgaagatttcgagagtttcttctcaggagacatgaatctgtatcattacactaaagaccaattccattttgtgttggcttccatgaacgagatcgaaggagtagtcggaacagagacaaaggagattgtgaggaagatcaaaatgttggtgacagaaccatatgatgatcttaagaatcgtagagaagagtttgaacgtggctggtatgacattttgaaggatttatcatcactggaagtgttaaagattcttgcgtcctctgaacttgaagataggtccaaagagatagcaatcagacgactcaatgtcttactctctgatcacacttcaaagaaagtgcagatagacatttcagagatgagacaactccaaccattgctcatctcttgcttaaaggaagaaggactttcctttaacagtatgttcaaagtcctaggtgaggtggtgaaccatgttgcatatgagatgttgatctaccaagaggagacatggtacgagctacgagattatattgcatcgagtaaaacagagtttcatagagcggtttatatcttccagtgcttaacaatggcacttattgacgacgattttgtgattcctgtgatggagaatcttttcctagagataatcacaaggctagacccaccaagagagttgttggtagataacagtagctgggtcttggcgtttatgggtggcttttgtttagcaattcacttgatagagatgtcaagtaaagctgaatccgttaaggagattgcacataagatgatagattctataagagagctaatggaaagagaaatggaagttgggcttgtgaagagaggtttcagagatgtggaaagcatcgtgaagaaacaattggaatggtatagtacgagccaatacaaattcattaagggtctgctttggagactgtatgcaatcaaaaggcatgaaatgggaaagtaagattgtgttgtggagaatcaacgtcattgtggagagaggagtcaaagaagaggaaaaagagctaccagagaatgagtttgattggctcaaccttaatgctgaatagaaaactagtttttggtgttcactatctgatattgtgcagaatcttgtttttggtgtatatacagtttgcattgaagaaggaaataaatagataagagttttggaacatgtacttagtagttcttaaagcactttaattttgagagttacttaataatctttcatttactagcacttttatcttgatgctaaaacaaattcgtagcatcaacaatactacatgtgtcacagattttctcaacaagaatctgaaacagagattcattactgttgttgacgttgcatcagtctaaagcagatctattgggcctttgattattaaaatatcacttaatgggctcaatgggctcaataggcctcaaagttaactatatcaataattaggcgattttctctaacttctctgccaaaattcaattttattccgatcaagtttttattttccaattcgcttcgaagttctctcatccatctcctggttcgattcaatctcatcgtttgaaaaccctaattttgtttggtaagattaagccatg

SEQ ID NO: 32081 - DNA, 3003 bp, Unknown
  misc_feature (1)..( 3003): 2750-1469P.txt file - cDNA_ID_3048701; gDNA_ID_1621098; Annot_ID_171185
ctgtagtgctcaagacactgttctttactcttcgttcccacgtgctccgcaacctctgcccagtttcccaagccataaatttcaagtccctgaataaagacattaaaagaaattacttttcactgaaagaatcagacattatagacttcatatcagtacgataaaagaagtagtggtacctccaggagaagcatttcatcatccgcactccagtcaggacaaataagcgggaaagttagatttccctaacaaagcaaatgaaacatatattaagctttggtagaattcaaccaaaagatattttcgctaagtataatgaatcaaactctttccaaactaaaaggtaagaaaagtaaatgaaaactaaccataactcggtatgggtgatcacatttgtgaggagtgatctctgctccaacagacatacattctatacagagatcaaaatctggacagacagcacactttatcctaatttttccagtaatgtctttctggcaataatcgcagttatacttccctcctccctcagcacctggtactgtctccacaaataaaaaatgttgagtaaaagaagaatcttgacaggagaaacaaaaaaaaaaaaccttgataagtatttttttacccaaagaagtagactcaaagttctccacattagccgcatttttctttttcctcgttctgcaacaaacgcataacacgattctttcatgtcagcttcaacagtgaaaaaacaattacacagatgaaaacagagaagagactacatagctactgaaagttttcaaaagcaacaaactttaagcgatgctcattgtcccaactgaaaaatcaatgattgttgcacaaagcagatgcaaagaaacttcaaaatcaatcaatttcagcagaaattggcacaattacatagatgaagatagaggagactatagctactgaaagttatcaaaagccacaaatttgaagccatgctcattgtcccaactagagatcaatgacaattgcacaacacagactcaaagaaacttgaaattcaaatcaatttcagcacaaattggcaattacaaaagagaaatccacaaaaaccccaaatcggaaattagagtagtgaattaggaacaaacctctgagtagggtcttcgaaattttggaagttccctcgagagcgacccattgatgcccaagtagaaaattggattattgggttatgcgaaaccacagagaagaagaaccctagcgtaatgccaacatgggagactcaccggagaagatggaatgggtacttgggggggtttcgtggaagaaagatctaatcggaattcaacaaaactcggtcgaaatttgtgaggttttggatctctactaatattattcagaagttccgaccgagaagattaaaattagggaagtcgaggtaaaggaaatttctaaggcactgtactttttagattttttgggattagacggtcatgcttattactaaagcatatgacttaaactaaattgactcttataacttcaacttaaaaaactattattttttatgttaattgttgaatggtggttgagggaaaaaaaaatgaagaaaaaaaagctaagatagaccatttttattggtaattttttattattaaaataataaaaataataaaaggaaaagaaagagagtgtagaatgtttctcgttaaactatgaaatactttatacaaaccatcataatatttttctcttttcaattggttcgctaaaataaaaatttaatcatatataaaattataataaaatactaatattctttttgtttgaaaaactgtttgggtttcttcttgatggagatgtctttaatatttggttgggttatggttattcgtttttaggtattttgttcatggacattttcagtaaatgaattagcaagtaaataaacttgtataggaataaatggttagtgttgtcacacactatcggaacaacattatgatgtattttaaaatcttattgatgctaatttgaaaaattgatttggaagaaggttaagcaaggaaacaaccatataagatagtttgatgctaatttaaagtttcttattttggtcgaaaatcgaattattagaaatgtttgaaccttttttattagacatctagtgataaattttataagactcatgtcaatcgaataaaaatatcgaattgttgttttgctgaacgaataagtttgtctatattagacgcgattagttcttctaaaccacattatccaaaaaaatcgtgattgactacatggtgtaatgatacctatcataccatctcaagaatatggcatgactcatccaattaacaattgtatttgcgcataattgtaagatgtgtaaattccttttccgcttattaacggtgatttgcgataagttaattcagaagacgagtttcgattctcccatcataataggttgtactacgaaataatttcccaacatgtacacataatctcgacaaaaatccagtgatatgggtttacttgtagttgaatagatattacaccacaatgacttgtggtttggtatgtaagaaaaggcaaaagtatagtttgcagttaaaaaactgaaggaaatgatgtccttggtattaaattacgattaaacccatattctctctctcgcatagtctcttcctcttttcttctttcttcgtcaatttcagaacaagtcactacagatctgaagtgaaccaagctcaggttttgtcttctctttgatcattcctttctcagcaatataaattagagttatatcctttataaaggattttgctttttcaccaacaaaccctaaattcggtgtctcagcaagaatcacgtgattctcgttcctcttcctcacgaaacccatcatcttctatctcatttgtaagcagcgatctcaatccaaatacctttaattttatttgattccataccctaatttttgtatattccatgtcaatgaacgtttcaggagaaatg

SEQ ID NO: 32082 - DNA, 3003 bp, Unknown; identical to SEQ ID NO: 32081
  misc_feature (1)..( 3003): 2750-1469P.txt file - cDNA_ID_3048701; gDNA_ID_2926166; Annot_ID_199117

SEQ ID NO: 32083 - DNA, 3000 bp, Unknown; identical to SEQ ID NO: 6612
  misc_feature (1)..( 3000): 2750-1469P.txt file - cDNA_ID_3048705; gDNA_ID_1621098; Annot_ID_171184

SEQ ID NO: 32084 - DNA, 3000 bp, Unknown; identical to SEQ ID NO: 6612
  misc_feature (1)..( 3000): 2750-1469P.txt file - cDNA_ID_3048705; gDNA_ID_2926166; Annot_ID_199116

SEQ ID NO: 32085 - DNA, 3000 bp, Unknown; identical to SEQ ID NO: 6581
  misc_feature (1)..( 3000): 2750-1469P.txt file - cDNA_ID_3048711; gDNA_ID_1621098; Annot_ID_171178

SEQ ID NO: 32086 - DNA, 3000 bp, Unknown; identical to SEQ ID NO: 6581
  misc_feature (1)..( 3000): 2750-1469P.txt file - cDNA_ID_3048711; gDNA_ID_2926165; Annot_ID_199087

SEQ ID NO: 32087 - DNA, 3003 bp, Unknown
  misc_feature (1)..( 3003): 2750-1469P.txt file - cDNA_ID_3048723; gDNA_ID_1621099; Annot_ID_171305
atccatatgtagaatgacagtgagcaaattttagcttttacctgttaatcatgggatttcggaagacagttctgacattcaaatgagttgtgcctttttaaggtcagacacaactcctctgtcttggctgcccctttcattgtaaaccacctgcacacagattacagaaagagaatgattcaatcatgcagaagataataactctatgttgacaggaaaacaaaatcgctcatacgttttacggatttttctgacattttatcgtaccttatcaatgatcccatattcaacagcctcagtgggactaaaatatttcgggcgtttcatgtcagcttcaatctgctccggggatttaccaatatgctttgaatacagcttgaccttgagcataacattacatagaatagagacacatctttcagataagtttgaaggtaaaagtgaaaagttgcggacagagaatgatagcatgatttgagatttgctagcatgtgcatactattaatggctaactgatgaatattaagatgtctgcaagtatatacacccattgcctgcaagttccatttatttatatctcccccttaaaagacccaaataacacacacaactggacactgttgcataatgaagatcaaactaagatattctacgtacatcacaagggtttgattctctactatgtgaattcatatcaagtttatcttctcaccatttctgtctttatgtgcttgatttctttccttgcaatttcaacatcagttgcttggccttgaaatcgagcaatgggctacaaagttaacatgcaagagaaaatatattgataagtaaaaaggtgcatgcacagaattaagaatcataaaccttagattcttccaacttgaaaaagaaaaccaaaatcttctagcagggggaaaagacgccacctaatatttaaaagaaacgatcagaaagaacctgctttatcataatagttgatgagggcaacgcagatcgatttccttttgcaccagcagtcagaagcaaagcagcttcaccccaagcattcccgacgcaaagagtaaagattggtggtttgacatacctgaaattcaaagataaggtaagagttgattgttgcattgataattggtcgttctccccaaaatatgctggatatgaaaactgtctccaagtgcaattttgaatatttgggaaagcagtttaagtatccaagtcttgttatcgatgctattacgggaagaagtaagttgaggaaagagatgaagatcaattaccccatgacatcatagattgcaaaagcctcagtatcatagcccaacttttcaccattctgaaaagggagaagataaattctcttaaaaacagtttgaacgataggtaatgatttctaagcttttagtcattcatttgaaacaaaccacagtttcaattttactattcagtatgcgttcttaatatgatggactacataatggaagcccaccttggttgtcccagtcgagtttatgtaaaggtaaataggcttttcctcgtcttcatactgaaggtaaagaaactccgcaagtatcaactcagtaactgaaggtacgagagacattcccaaatatacaattcggttcttgaacaaatatgatgccaaatcaggaggaggttgttcgtgtgcacttccctttgagaaaggtataacctgttgataagacggaagcacgaagataagaatcatataataacaacaataaacaaaagactatatgtgaagaatatagcagcctccaaattctctatcataatcataatcagagcaattgatgcatattataagtggcacacacaatcaagtgaaacctctgccacataataactcaacttcttccttaccagccaaacacacagcataatttcttccgaaactgcattatttaatcttcatactcaactctctaactaaacatgtaccatttccgatcaattaaacaacagaaatgaatgagccgtctttgctatctaattgcatatatcaatagtaactctaatccattaattcgccgtttaaagctaagtagcaaccgttggtaagattcgacccataaattttccctcaattcaccaccacagaagcataaatctcagctatagaatgaatgagcattactcccccttgcaatctaatagcctatatctagagtcaatctaatccattggttcaaaactaaggaacaccatttctcgacaaatacaatttctgaaaattcactaccacagaagcataaatctcagctatagcaacgaaaacctcaatttcaaaatcctaacagaatagggagctcgttaattaagaaactgaaaaaaagtataaattcgagtaccatagtgacaactccgcgtttaggcttggaactggaaaaatttaacggattaagcgattccgcacgaagcttagcgccgcataagtcactagagatgcttcctccggtatacggcgaaagaaagccattcgaaagagaagctctgagagatgaagatgaagaaaatctcggtttagatctcagattacgtgtagaagacgggataatcgctgacgtacgagctcgaagcgttgtgaagctcgtcgcagtcgctgctgctacctccatttcttctttgttgcagagagagagaaagagtgaaagtccctgtgaccccgaaacgataacgatctgtctcaaatcgggcttcataacattatttatgggctcaacaaataggcccaatagttgtagttttttttctctgaaaatattccggtttcgactataatagtaaccaaatcaaaccgaagtaaaaccgggaatttctcatttttcgaaaacgtataatttaatatgaggctaccaaataaataatctactggccactgcagagaatcatctgtcgtgttctgtttgttctcacttctcacttctcagatttttataaacatgaatgaaacctgaattgttccactaactctcagcaaaaatg

SEQ ID NO: 32088 - DNA, 3000 bp, Unknown; identical to SEQ ID NO: 6628
  misc_feature (1)..( 3000): 2750-1469P.txt file - cDNA_ID_3048727; gDNA_ID_1621099; Annot_ID_171304

SEQ ID NO: 32089 - DNA, 3000 bp, Unknown; identical to SEQ ID NO: 6628
  misc_feature (1)..( 3000): 2750-1469P.txt file - cDNA_ID_3048727; gDNA_ID_2926167; Annot_ID_199224

SEQ ID NO: 32090 - DNA, 3003 bp, Unknown; identical to SEQ ID NO: 18031
  misc_feature (1)..( 3003): 2750-1469P.txt file - cDNA_ID_3048734; gDNA_ID_1621099; Annot_ID_171295

SEQ ID NO: 32091 - DNA, 3000 bp, Unknown; identical to SEQ ID NO: 6633
  misc_feature (1)..( 3000): 2750-1469P.txt file - cDNA_ID_3048738; gDNA_ID_1621099; Annot_ID_171289

SEQ ID NO: 32092 - DNA, 3000 bp, Unknown; identical to SEQ ID NO: 6633
  misc_feature (1)..( 3000): 2750-1469P.txt file - cDNA_ID_3048738; gDNA_ID_2926167; Annot_ID_199214

SEQ ID NO: 32093 - DNA, 3000 bp, Unknown; identical to SEQ ID NO: 6635
  misc_feature (1)..( 3000): 2750-1469P.txt file - cDNA_ID_3048744; gDNA_ID_1621099; Annot_ID_171282

SEQ ID NO: 32094 - DNA, 3000 bp, Unknown
  misc_feature (1)..( 3000): 2750-1469P.txt file - cDNA_ID_3048748; gDNA_ID_1621099; Annot_ID_171281
gccattgtaaagattatatcattatactagtttacttcgtatttttttcaggggacagaaacagttcttggaatacgtttctgcacagctttccgatcaaaagagctattaccaatagatgaaaaatcgttccaaggcatgcgtaatctccaatgtctatcagttactggggattatatggatctacctcagagcctcgtttatttgccccctaaactcagattgctagactgggataggtgtccattgaaatgtttgccttatagttttaaggcggattacctcattcaactcacaatgatgggaagtaagcttgagaagctgtgggaaggaactgtggtacttaattcttcattgaaatagttgtcaatttttagaacagacctgtggtaaaaattaatctatttgaaatgtttatgaatgtgtgtattatgtttttccctattttgttttcagccacttggaagcctcaagaggatgaatatgcatggttccagatatttgagagaaatttcagatctttctaatgccagaaacctcgaggaattaaatctttcggaatgcagatctttggtgacactttcttcctcgattcagaatgccattaaactgatctatttagatatgaggggttgcacaaagctagagagttttccaactcatctcaacttggaatctcttgagtacctcggtctcctttattacgataatttgagaaaaatttccctgtgtttaaaatggaaacttcaactacttcgccacatggaattgagatccgcgtagaaaattgtatatggaacaagaatctccctggtcttgattatctcgcctgccttgtgagatgtatgccatgtgaatttcgcccaaatgatctggttcgtctcatagtgagaggcaaccaaatgcttgagaagctatgggaaggcgtccaggtacattgttaatattatagcatttgctgatttttgtttaacctctgttgtaaataattacgtataaccaaattaaagttgtcaaaatggcttgtgattccacggtttatatttacatacagaattatgtcttgattataattttgtttaaatgtgtatagttattaaattaaaatgaaagtgattgaagcataacaatttttttttttaatttctgtttcagtcgcttgcaagtctcgtggagatggatatgtcagaatgtggaaacctgacagaaattccagatctttcaaaggccactaatctggtgaatttatatctctctaattgcaaaagtttggtgacagttccttctacaattgggaatctccaaaaattggtgaggttggaaatgaaagaatgcacagggctggaggttcttccaaccgatgtcaacttgtcatctcttaaaatgcttgatctgagtggttgctcaagtttgagaacttttcctctgatttcaaagagtatcaaatggctctatctggaaaacaccgctattgaagaagttccctgctgcattgaaaatttctcgtggctcactgtacttatgatgtattgttgcaagaggttgaaaaacatctcgccaaacattttcagactgacaattcttaagctcgtcgactttacagaatgtagaggtgtcaacgtggcgatgagtgatgccagtgtggaagatcactcttcttatataccattatatgaaaacattgagtatactcgtcatcgtttctgggaaaaccttaaccacaaacatttggcctgtagggcaggttatctgtaacgcccgcgatcctcaataggattgttggctgggacttggtctgagaaaagaaggtggagtctcggacaagtgggaaggagttggccataagctcggacaaagggaaatcatgcgggctaagctaggatcgtaaaggaatcagctgggtcagctcgtccgaagctcaagctcagctggaaggagtgacggttactcgggttgagtgacagtccacctcgagcagctgggcgagtgacggttgagctcgaggcagctggtcgactgtctgaccagctgggcggttacccggacggttacttgggcggttacggtcgaacgggtgctcgcccaaagggtggataagggcgagcagttacggaccgagagatgcaactcttcggaaaggtgcaaggaacggaggtgatccttcgggaagcatcaattcgccccttatataagggagggtgcccaagacctttagaggcaccagaacacacagaaaataccggaaactcactattaaactctcgtcctttcgggagaataaatcgtcggaggaaatcggtagtcggactgtgaccggcaaggaagaagaagggtcggatcgaccgaacatcgtgaaggaaggtaagggaaacctagacctcgagtctaaggattctagaatacgttaattgagtcgagattccttgaaaggaacgactaatgggctgggtagaatcgggtcatgtgcaacctacacaagactcagtccgggcaagggatcggctagggcggggacgcggctcggtggaggaccggagggtcttaattgacctaccgagaatcggctggacttatgcgcgatcttcccctctccaaatcctctccgcggatccgagtagtgtaaggactatggagcattgcatggacttgcatatgactaagtaaatgagattacttatggctctatgactttcaggaaccaatggtgatcgtgggaaggacttggcttaggcgcgagagactcaaggccgggatgatgggtggtgatagtttcggatagtctagggatcaattatattacttgtaatagcttatatgcaaactcataagttgtatcgaatcctttacttaattaataaagtatctgattgtttgtttactctattcgtctcatatattgaatcacagaatcgtatgaaacggattacactagggaatgaacctcataaatggttagggtccattcacttagtgacttgggtcgagagatttgcgagcatg

SEQ ID NO: 32095 - DNA, 3000 bp, Unknown; identical to SEQ ID NO: 6671
  misc_feature (1)..( 3000): 2750-1469P.txt file - cDNA_ID_3048752; gDNA_ID_1621100; Annot_ID_171388

SEQ ID NO: 32096 - DNA, 3000 bp, Unknown; identical to SEQ ID NO: 6671
  misc_feature (1)..( 3000): 2750-1469P.txt file - cDNA_ID_3048752; gDNA_ID_2926168; Annot_ID_199307

SEQ ID NO: 32097 - DNA, 3003 bp, Unknown
  misc_feature (1)..( 3003): 2750-1469P.txt file - cDNA_ID_3048756; gDNA_ID_1621100; Annot_ID_171374
taataattctatcacagaatgtttccccctctctgctttgatctcagaaagccatccttgaacttccttttgtttcatgacattgataggtcacacaactagaatcggagagcttaatgcttcaaatggtatcgtctccttcttgacttccagtttctttcttttttctgttacagtttatcagatttagtagtccatggttatgtatacacgaaattgattgtgtaggtgctgaaacatcagaaactcattgatgaagtaatggaagagaacgaaaagcttcgaaggataatcatagaagatctcaaagtttcacccgaaaaactgaaattagtttcctcttacaattacgaaacaccaccatgcaaagattgctttgagtgtcgtagaaaacagagaagaaatagaggaagaaagctgtaagccaattccttcatttgttatgagataaagaaatttttcacaatatcagacaaaacacagaatacaaagaactgtaagttcctctgcaaactcataattatataacagaacaaaactcttgcgcaaacaatggtttctgttcacactgcctctctcgctgctcccttctccatcatcttctatcggttaacagtggttcagaagcaggaactgcaaagcaaacaaagataaagtcagatcattgtttctgcaattgagattactgtgattagtagaaggaaactcaagagatttggttatttaccttcttcatcaacatatccaagtttctctctaatttcagcaataaccagacgggtcaaaagcaaaccagcacagagagctccaacgaccaacatatagaacacagcttgccaacccagagtagaaagaaaccctgtcaaaagcggacctaaagccgcaccggcagatccagtcccgtcaatgatagcagtaacagtcgcaagcgcccttgaatcgccttgtaaagacttgtgcgttcccagatccgcagagactgcggttgtgatgagtgcataaggaccattgacaaacaaaccagcaaccatcatgaggaggatgttgactgtctgagagacacctccataggaatggtacacaagcattgccggaatcgcagcgtacatgaatgcagctgcagttgtagcccttgctttgaatttgtctgaaatgtaaccacaaagaatccctcctacaatgcctccaacatcaaatagtgtggagagattccctgctgttttcacagacacgtactctccaccaatagctgcaaataagagcaagtaagaacatggtctaaatctggttttactagcagaaaatgacaatcaaaacttacttgtttggctcaagtaaaacggtaaccagtacaagaacgtgtacgcgaccagcttcgagaaaaagagacacaacgcaaacggtataacaccagggatcatacaagcttgcaaaagtccaacacttcttttattctcataccctgaacctgaccctgatgatccctccccatccccttcaacatctgtccctaaatcttcttctacttcctcttcttcctcttcaacatctctcttcctcttaataaacttccctgaattagaattgatatctggaaacccaacatcctcaggatacgcagccaagaacaaataaacaagaactcctcctaaagacatgacaaaaccaggagctataaaagaccatccccaaccatattcaagaacaccagcagcaattaaagaaccacaaatgttcccaacagaagtatgagcattccaaatccccattataagacctctcttccttttcccaaaccaattcccaacaacagccacaacagatggccatcctgtcgcctgaaacaacccagccgccatttgcataaccaaaaagaaccaaaacgcatgaatgttccagaaataacccataccaaacaacccaacaaagaacccactcccaatcattccccaagtcagaaacaatctcagatccaaactatcacccaaatgaccagcaacatacattcctatagagtaacaagcaagaaacgccacatcaatctctcccaacctagacgtcccatctttcccattaaacggttcccatcctttagacttacgatgcaacaaaacctcatctatatcaccaatttctctcttcacaaacacgttacccataggccaaggataaattttgtcgctgttatgttcttgaggtggcttagtgcttgagtctgggtgtaaaacgctcttcactatgctgcttggtttacgagaagcatggtaacaagcatatgcgatgaaagtaataaacaaaatcgcgtaccgaaacgtctttggactccaatttcttcctctgactctcctcagaagcgcaatcccaggtggtgttttcctcttcgaattcatcgccatctctcacaacaaaacaaaattttcaatgataacaaaaaaaaaaaagaatcaacctttacggatcaaaatgaaatacccaaatccatttgttttagtgtttgataaatcagaatcacgaattaatttgattgagagagagcgattagagagaagagaccaaagggagagagatattggcgggagagagagagagacagagagagatagaacacgacataaactgtgaagacgcgacacgtgtcctatttgttacggtagagccaaaaggcagaacaacagttgtcatgccacggtgaccactttggtacgcatgaagcgacggcccacacgaccgacgtggtggtgggcccaaattataggtttatgtaatcataataagactgtgtcattagccgactcttttattgatatttttataaatcatagtactatctatttatattaatattgatatactaaaggcccacaataacaaacggcccataaagaaaattcacacgtgcgatggcatacgtgtgccaaaataggaagcgaaaagcagataaggctcttttccactgtcttccctccattttctccgagtaactgagagtttgctgcagctatg

SEQ ID NO: 32098 - DNA, 3003 bp, Unknown; identical to SEQ ID NO: 32097
  misc_feature (1)..( 3003): 2750-1469P.txt file - cDNA_ID_3048756; gDNA_ID_2926168; Annot_ID_199293

SEQ ID NO: 32099 - DNA, 3000 bp, Unknown; identical to SEQ ID NO: 6681
  misc_feature (1)..( 3000): 2750-1469P.txt file - cDNA_ID_3048768; gDNA_ID_1621100; Annot_ID_171361

SEQ ID NO: 32100 - DNA, 3000 bp, Unknown; identical to SEQ ID NO: 6681
  misc_feature (1)..( 3000): 2750-1469P.txt file - cDNA_ID_3048768; gDNA_ID_2926168; Annot_ID_199280

SEQ ID NO: 32101 - DNA, 3003 bp, Unknown; identical to SEQ ID NO: 22830
  misc_feature (1)..( 3003): 2750-1469P.txt file - cDNA_ID_3048776; gDNA_ID_1621100; Annot_ID_171354

SEQ ID NO: 32102 - DNA, 3003 bp, Unknown; identical to SEQ ID NO: 18070
  misc_feature (1)..( 3003): 2750-1469P.txt file - cDNA_ID_3048784; gDNA_ID_1621100; Annot_ID_171351

SEQ ID NO: 32103 - DNA, 3003 bp, Unknown; identical to SEQ ID NO: 18070
  misc_feature (1)..( 3003): 2750-1469P.txt file - cDNA_ID_3048784; gDNA_ID_2926168; Annot_ID_199271

SEQ ID NO: 32104 - DNA, 3000 bp, Unknown; identical to SEQ ID NO: 6666
  misc_feature (1)..( 3000): 2750-1469P.txt file - cDNA_ID_3048788; gDNA_ID_1621100; Annot_ID_171347

SEQ ID NO: 32105 - DNA, 3000 bp, Unknown; identical to SEQ ID NO: 6657
  misc_feature (1)..( 3000): 2750-1469P.txt file - cDNA_ID_3048799; gDNA_ID_1621100; Annot_ID_171329

SEQ ID NO: 32106 - DNA, 3000 bp, Unknown; identical to SEQ ID NO: 6657
  misc_feature (1)..( 3000): 2750-1469P.txt file - cDNA_ID_3048799; gDNA_ID_2926167; Annot_ID_199234

SEQ ID NO: 32107 - DNA, 3000 bp, Unknown
  misc_feature (1)..( 3000): 2750-1469P.txt file - cDNA_ID_3048837; gDNA_ID_1621102; Annot_ID_171449
gaaccaccagagaaaagaattaagaccaaaagcaaaagaggtacaagcattagatgcctatgttggttccctttaggacttaaagtaatcaaaatcagtaaaacacacaagaagaagcttaaccattttttagcatataccaacacagaggattttaatattcaaaatctcaactttgatcaaaaaaaaaaaaaaaaaaaagatacaatggtctcaggaaagaaaagttgcagaaattggttggctaaaaccacagctggtttcactagacaggtatgtaaagctgattgtatataaaaccccacaagtctcagctaatggggctttaagaaacatcacatgtctaacggtagactgaaacagggatcatctgaaactcctttcacattttttacttattttatcagaaagaagtaaagcaaccaaatctctttctttttttctgtagtccctcaaaccaacttgcatcacttgattagacaataccaactttgagtatctagattctagaagaattaaaaaatgaacaagaaacttcgcatgtctaatggtggcatgaatatagtaccatttttctccccaaattcctttttcgctttccctaggtgctgtgatctttctaacgattcaaacttagccaaatggacaacaaccttgagcattctctctattcatctctcaaagcgtaggtacaaaacttaatatcaggaaaccatatcaaaacaaaaaagaccttgaccctcataagataaagggaaatcagtttgaaaatggtgaatcatgtggcgattggcgaaaacattatttatatccttcaatatctatctctcatttaacacaatcctgatcgagctcttaacattattagaaggtccagagaacaatatccaaagcaaatggaccaaaagaagtaaaagaatcaggacctgacttcttccaatgttacaccctcaaacctcagcaggagtctttgccacaatagagagagcatgtaacccgctcttcaactcatcttgcaacaagtcatatatcagcctatgtctcttgaccaagcttttaccttggaaagcatccgaaacgattcgcaagttgaaatgtgtttccccatcatcaccagcactacctctaacagcggcatgtcctgcgtgctggtaagaaacatcttcaacttctaactcaacaggatctagctccttctccaatttctctcttatcctcatccctctactccctaaagcaacaacatttgacccactctcagaatcatcaatcttttctgttcccaaatcctcaactagatcaggtttagactccaaatccacctccggaacattagcttcgtccttagtctcaggaatagacacaaagctggattctgaactctctccagaacttgaatcttcctcacctttgacttccaaatgaagagcctttttctgcatcagcttaagcatattaagtaatccattgtttctagaaggagacagactctgctgcaacccgagaagaacagcgaaatcaggtgttatcctcaaaatctcagggacaggtcttccagataaacccttgactaatagagcagctaaccctttagtgagaaccgaatcagaatcagcttcatacacaacattacgttcctcatcaaagaaagccctaacccaaacctgagaaacacatccttctactttattctccctcgtcttgaattgagaatcgagaggtgtcagattcttcccgtagaacataagctgctcgtatttagcctttggctcttgtaccgattggaaaagcttgacgatctcttgtagcttcggtggaagctcttcgattggttgaaggtctccatagctcgacggagatgatgaagccgatggtggaggaacaatcccggttgaaattttctggaaagtgatgatcgtccggcgaaaggaaggaacttccgacggttttagtggtcgtagaagaagggttttggccggataatggattgaagaaaacaaggtccgtttgaatgggattaaacgaagcgaggaagcgcaacaagaagaagacatcgctgctgccatagtcgcgaacttgaaacttcgagagagactgagatgatgatgaaagctctccttcttcactttttctgagtcaaaaaccaataccgccaattaggtagtaaccgggaattaaaccgggaatgtaccaaaatccaaaaattagatgtaaaatcaattgtggggttgattatgaataattagaaagtatacgactcttttcataaataaggaaaagaaaaagatatctagattttttttgttttgttttgaagcatcgtcttcctggttcttcgttctcttgcgttcgtcacctcaaacacgtccgccattattatatatcaaatcaatcatgtccgaatccagcttttaccaatgtaagcaattaaattaaattaaataaaaacacttttatcaaatttaatcaaattaaaaaactgtccctttcttatctgagattctattgtttctgtctacttccacagaaagaaactgcatctccgtttttttttctgatttgaggctttccttagatccttgagagcaaaactgaatctgggtaattttaaaaatctcatttttacgacttatctcttttgaacgatctgttttttcatgtaagtacgatttcacctcgagatgatcgatcattgctcttctggttcttccatgtttgattaaatgttataacttgagggttttgtttcttttggattgttctcgcatttgttgatctatggttatcaaaagagtttggatttacagtttttggttgcagctgaaatttttcactcttttcttctctgttttgctggataaagttggatttgattcacattgttgtttagaatctagatgaagttgtaagattccttgtattgtgtttgcttatgcatgattgtgataaagatttaagttattttaccaatgtacaatgtccagaattgtcgtcgggatg

SEQ ID NO: 32108 - DNA, 3003 bp, Unknown; identical to SEQ ID NO: 18119
  misc_feature (1)..( 3003): 2750-1469P.txt file - cDNA_ID_3048841; gDNA_ID_1621102; Annot_ID_171447

SEQ ID NO: 32109 - DNA, 3000 bp, Unknown; identical to SEQ ID NO: 4372
  misc_feature (1)..( 3000): 2750-1469P.txt file - cDNA_ID_3048841; gDNA_ID_2926189; Annot_ID_200881

SEQ ID NO: 32110 - DNA, 3003 bp, Unknown; identical to SEQ ID NO: 18121
  misc_feature (1)..( 3003): 2750-1469P.txt file - cDNA_ID_3048845; gDNA_ID_1621102; Annot_ID_171445

SEQ ID NO: 32111 - DNA, 3003 bp, Unknown
  misc_feature (1)..( 3003): 2750-1469P.txt file - cDNA_ID_3048857; gDNA_ID_1621103; Annot_ID_171501
cttttttagaatggatcttcttctttttttggttgtgagaaacgaatgtaaatggtaaaagttgttgtcaaatgcaaatgtttttgagtgcagaatatataatctttggtctccccataagcaacaaatcaaaatataatactattacgtaattcagtgaattgaaaacaaaaagtttgggctcacctgtaaaattaaagttagatgattctggcatttccgtgtctaagaaaagttctaggcacttatgtaaatagcaaaagttccaggttggttgatagcaacagtttctgcctttctgctaattcagcaaatatcaagactcaaggacgtttggtaaatatccaaagttccgtgagtttttgtaaatatgataaattataggcactatatagatatctaacgtttcaaaaaatgtttgaccccaaaaaaaaaaaaaagggtttcaaaaaatgtctgcaaataaaaaaaaaaggatgcggagacacttttaatttagtcaaagctttaggcagtaatgtaactgagaaacgatcctatgtaaatagcaaaagatacaaaaaaaaaataaaaaaaaaaaaatagcaaaagatacaagatagtgatagtgtataagtagtatcaagagatttatatacagtatttatggaaataacaaatgtttcgagattgtaaagagaaaatgatccatatagtaaaaatctacgggatattttattggtgagtagcagtaaaatccgaacacttgtatatagcaagatacctacccggcaaagcacttcacataagtttcgggtacttcgttgaatatcaaaagatctaaggcagtaaggctctttggtaaatagaaagttgggtaacgctttggtaaataaaattttgggtaacttgggttatattcttctttgaatagcaaaagaagaagtgagcaactggggtaagtagtacagttttgatgatagcaaaagttccaagtgctatttggatttctcaattaggagacatgatgatcaattttgatgacagctaaagtttgcatcgagtccataacccaagaagaactttcacgtaaaccttttcttttggaaaagaaaaaagtgtaactatcatgatttttgtttttctttgttttgatgacaagtatttctcctcgtgaaatcagttttttttttcttttaatgaatataaagaataaatcagattattgagattcacaaaaatccatcatcgcaagttcttacgtattcgaaagacgttactacggttactaacttactgtatatgtatgtgatgtcgaaaaagaagaagagaagacgttacgtcactacttgtatgttcatcgatcagtccacgtggctttttgtaaggtccgagagaggaaagtgaaattcagacgccgcttttttttttttggatgaagttccaaaattagccattttatacagtggttaagctcgttggaccaatatcaatggcgtctgcaacgactcttctcttccaccacggttccactcgagtcctcgtcgctcgtagacggtgccaagcttcagtccttagaccctacggcggtttaaagccctttctttccttctgcagcttacctaactccactgcgccgttccgggattcgttgagagcaaaatccgatggattggctcgggcctatgttaccggagcgccgcctatcgtggaagaaccagacccaaagattgaagaatccaaatctgaggctgaatcgaaggatttaattagttgggggcttctgtggagcttgatgagcaagcacaagctcaggctcagtgtttgcttattgactctccttggatgcagtacttgcactctctctatgcctgttttttctggtaatcggttcttcaatccactctcccaccattagcaaattgtaactgtactctttttttctctttgggtttgatgtagtttaagtttgggtatgatgatttagcttgtcatctgtgtttctctttatcttggtgaagctgttttataatggtaagtgttattgttttgagtaaaggtagattctttgaagtactgattggggtgagaccggagcctttgtggcggctgctgagcaaaattgctgttttgtactcgttggaacccatctttactattgcttttgtgaccaacatgactgctatctgggaaaacgttatggcaatattaagagctcagattttcagaagggttttgatccagaaggtatgttttgtttagtatgatcaaagttcgcttaagctatattgttggctgtattgaaatatcattgatgggtttcttttttttgtcttttatatattcaggcagagttcttcgacaaatacaaggtctgttccttttattcttggtttgctcaggtttgagacattttggcacaaaccttccttatgttagattgagttcatttgttttaggttggagagctaacggggctactcacgtctgatcttggtgctctgaatagcattgtgaatgataacatctcacgagatcgtggatttagggcatttacagaggcaagccatttctttactatgcaaatgtgagatttttgtgtttgtacatacatttttcataatgaatacagatttaatcttagcctggtgttggtgtctgctgttatttttggagttctataaatgacaaagactatcctgttgcatctcaagaatgcccagttctcatggcttatgcgttatcccttttgtaggtttttggaacaatatgtatcctatttactctatctcctcaacttgcacctgtacttggtctattgatgctagctgtgtcagttctagttggtaaattctctatgtctttttcattctcctaaactttttatttttggtaattactttggtcatctttgcttactttgcttacctctacatctactccctcggtcaaatctcaaaagctgtgtacaagagatcgactgttcctgtttataaatcgcatggattagctcaagcaacaatg

SEQ ID NO: 32112 - DNA, 3003 bp, Unknown; identical to SEQ ID NO: 18130
  misc_feature (1)..( 3003): 2750-1469P.txt file - cDNA_ID_3048879; gDNA_ID_1621104; Annot_ID_171531

SEQ ID NO: 32113 - DNA, 3003 bp, Unknown; identical to SEQ ID NO: 18130
  misc_feature (1)..( 3003): 2750-1469P.txt file - cDNA_ID_3048879; gDNA_ID_2926185; Annot_ID_200527

SEQ ID NO: 32114 - DNA, 1554 bp, Unknown; identical to SEQ ID NO: 6785
  misc_feature (1)..( 1554): 2750-1469P.txt file - cDNA_ID_3048898; gDNA_ID_1621105; Annot_ID_171569

SEQ ID NO: 32115 - DNA, 3000 bp, Unknown; identical to SEQ ID NO: 6780
  misc_feature (1)..( 3000): 2750-1469P.txt file - cDNA_ID_3048914; gDNA_ID_1621105; Annot_ID_171553

SEQ ID NO: 32116 - DNA, 3003 bp, Unknown; identical to SEQ ID NO: 18168
  misc_feature (1)..( 3003): 2750-1469P.txt file - cDNA_ID_3048959; gDNA_ID_1621106; Annot_ID_171596

SEQ ID NO: 32117 - DNA, 3000 bp, Unknown
  misc_feature (1)..( 3000): 2750-1469P.txt file - cDNA_ID_3048973; gDNA_ID_1621106; Annot_ID_171589
taaaagtgaaacattgtaagtgtttcaaccaaattatatgtgttatcaagtactgtaattctgtttctctgcttcttctaatgtttttcatatcttgtacttaattgcagattctgtgcctatgatatcttctgtgatttcttgggtaacaacttacattttcttggtgacgtctttcgttgcgggactcctcactctttcaaccacaagcctttattctcttggcgcattcccaagaccatctccttatctgatatcagaccccacgaggaacctttttgtatgagtttttactcctttataaagctacatatatattgcctttgtttttcctgcaagttacataattaatcaaatggtattgtgtgctttgtggttctaatgcagagaactgcctgtcacattcagttttttgcactcacgagatggctaccggtgacattgcctgttgattactatgaacttgtgagagggattcagtggataatcccttattttcctctcccatgggaaactaagatcaaggaacagatcatggtggccacaagtccttacattggtccacactccttcatttctaaaactcataacaacatgattaatcttaagacatcaaccaacgcggagtcagtattcggattgccactcaccgcaatggagtacagattattctttgaggtcaaaagaaacgtttttttcttccctgtattttgtattcttttgatcatgttttaatactgtatgagtgtttacagacttcaaatcttaagccagaagcagaacacgttcttggcctaccacattcaacagtgtaagtcactataatccaagtctatacttctttctatagaaaattttgtgaagattttattgcagcatttgttgcttacttttaatctaattaagaagaagccataaatattcgagtttttcgctttcctgtaggtggagagatttcaataggatcatgttttggatagctataattggaggaagtttggtactactgcatatagtcctctctctgatactgaagttcaagaaagcacacagtgagaagaagaggagttttggtgcgtttgtcttcccaagattcgagctgtttcttctcattctcgccttaccttcaatctgcaaagctgcaaggagccttatacaaggtattcttattaccagccttgagaatatctttaaatttgaacacatacgctaaattctctctttgtcaggctattttaaacaccaaggagctgcagaagccagtgtcattgttggtatccttgtgctttgcgtggtagctattctgcttctggcattgtttctcttcctctcggtcgggataacgtttgggaagttgttacagtataaagagattcatcaagaaggccaaactttccactggtaccaagaactcatccgagtgacccttggtcctggtaaaagaggccaatggacatggaaaacagagaactctgtctatctaactaggttaggtccagttttcgaagatttaaggggtccaccaaagtacatgctcacacagatttcaggaagcaatccactcaagcaacaagatgatcggatcatcgcatcagatgatgaaaacgaagatgctgaagctccttgcatacagaaactctttggaatccttagaatttactacacatttctcgaaactgtgaagagggtgtgtttggggattattgctggtgctttccttgacaatgaaactgcgaaaactccgatagtggtcttgttgagcatcacttcctttcagctgtttttccttcttctgaagaagccattcatcaagaaaaaggtacagcttgtagagatcatctctatagcatgtcaagtcggcgtattcgcctcatgtctaatgctcttggcgaaagactttcccgaggcaagcggaaagaaactcgggatattcatggtcgtattgttcttgattggattcattatgctgatgtgcaacgaatggtactcattgtacaaacaaacaaagcggttagaccaaatcaacagatctttcttgagtggtcttaagatgtttatcattggacttgccgcgttaatcctacctcagaaaatgatcaagaacaagatccccgtggctcaactagaagcacgaagcagcagcaatggaggcacaaccccagaattcaggtatagaaattcttccggaagccgaagctcgggtagcttggacaagccatggttgaaacagattagagaaatggcaaagtctagcttcacaagagataggagcaatagtaaggttcctagtgatccttcgtgtagcaaaagcggttggagcagtagtatttggggaacaaagacaagtggaagctcttctaaggaatcatctgcagattacaaatccagacctaagggactttacaaagatttagaggccatttttgcttcaaagtaagaaaaaatggtcatcatgctctctgtatttactctctattcgacgtaaggactactttgtgatatttaataaataatggggtttagaaggtattgatatgaagtatgagggcttgataagtaaattgtaatttacattatcatctattaaaagtaatatatttacatatttcctctaaaattgattaaagaaatagttgaaattttcagaaatcgtcttgtgtcaatcctgcttacatgattcctaagcctggtcttgtttggctccgagaaaattcaattcgaaggagacgaagaagctccaagcatatagacgaagctaatctacgcatcgtccagctcttatcgtgcacctaaatctcagttgttctccaagttgcttcttctttctcaagtacttggctcgatcaatttcaattttcaaaacccgattggggattttggcgtgcttggatcttcatcaattggtgtgagaatccgtctccgttcgttatccatcgatcggttttgtataatttactgttttatttccggttgattcggttttggttttggtttcaaatg

SEQ ID NO: 32118 - DNA, 3000 bp, Unknown; identical to SEQ ID NO: 6807
  misc_feature (1)..( 3000): 2750-1469P.txt file - cDNA_ID_3048982; gDNA_ID_1621106; Annot_ID_171576

SEQ ID NO: 32119 - DNA, 3003 bp, Unknown; identical to SEQ ID NO: 18911
  misc_feature (1)..( 3003): 2750-1469P.txt file - cDNA_ID_3049025; gDNA_ID_1621107; Annot_ID_171620

SEQ ID NO: 32120 - DNA, 3003 bp, Unknown; identical to SEQ ID NO: 18216
  misc_feature (1)..( 3003): 2750-1469P.txt file - cDNA_ID_3049067; gDNA_ID_1621108; Annot_ID_171658

SEQ ID NO: 32121 - DNA, 3003 bp, Unknown; identical to SEQ ID NO: 21076
  misc_feature (1)..( 3003): 2750-1469P.txt file - cDNA_ID_3049089; gDNA_ID_1621109; Annot_ID_171750

SEQ ID NO: 32122 - DNA, 3003 bp, Unknown
  misc_feature (1)..( 3003): 2750-1469P.txt file - cDNA_ID_3049093; gDNA_ID_1621109; Annot_ID_171745
ggggcttattcctgctcgaaatgttctagttacgttgttcattcattatgtgcaactagaaaagatgtatgggacatggtagaactagaaggaacaccggaagaagaagaaattgcgccattcgaggtggttgatgagaacacaataaagcacatgagtcatgatcatgatttaatattcaacaatgatggtataaatctccatgaaagcaagctttgtgaagcatgcgtctcccagatcaatactgatccgttctatagttgtgagctatgcggttttattttacatcaaacatgtgctaatatgcctaggaagaaaaggcatgttttgtgcaacatacccttctctctacaaacagacgatagcaaggattcttcacgcctaagaagaaaatgtagtctttgtctccaacatttcactggatttgcgtataatctgcatattgcgtataactcgcgtaccgaagttatggatatacgatgtggttcgatatttgaaccatttgttcatgaaaggcatccacatcctttatactacaagttcttcaccttttcggcggttgcgaagtgcgacatctgtcacataacaagaaggcatttgttatgttgtgaagagtgtgactttaggttggatttcaggtgcgcaactttaccaaaaaaagtaatgaagcaaaggtacgatgaccatccacttttcttgtcttatggtgaaaataatgtggatggtgaatactggtgtgacgtatgtgaaaaaagggtagatgcaaagacatggttctatacatgtgatgcttgtggggtcactttacatgtttcttgcgttgtgggtgacttctcctatcatatgccaggaccattatcaaccgtagttagcgaatacaaaatggtaccgcccgcggtagtaagcttatacaaagtggtgccaaacacttcgatttgtagaccactttgctccaggtgtcacactagatgcaaactcccttgcattcttgaaacctccgaggatggtgttaatgtttacttttgttctaatgattgtcataaaaatccttgggagtcgtcgtattattagtagcgcacttggtttatttatttctttctattttcttatttacttttcaaagagtattttactttacgtttattattaataatgataggttttgtttgtgaaacctatctaaacaattgagagcgttgaaggattttatcgggttaggccaagggatagttctcttgggagagtttttctcttgttatattatcgttttgtttatctactatcataataaaagttttggttttgaattgcattctatcttgtacagttatcatctttcttttacccaaaatttgctttgctttcttttcattctctacattttcacatgtcgatatatgaatcccctagtgttatatgtacaatttatacatatatgtatccgacatgcactaaagggtacttccattcatggattcttatctaagaacactaacacttaaaacatagtgttctttactagtagatgttgattgtatatggagaaagcaccgaatatatgctctggtttctccgctgtttcacctctggtagcccaatatttaaaattataaaaatggcatctatgttttgatttcccgagtgaagaaattttttaggtgttcttcaggatgcaagcttccttatattcttcaaatacaggaaacttttgttgtaataagtgttgtgggaacactcacaactattgtggtcataatttgttctcaatagttgtagtgtatgatgatagtaatgttgtgggaacacttaatgtacagtttctatcgttgtttttctcttttgccaacctccgtgaataaaagaatgttttacataaattatagtttttttaaatacttgcatttaatttgatcaaatcagtatagtgctttttatataattaactagtgatcaaactaatttattcaacaattttagttatactgtcttccaaaagcagtgataaatttaatcttatggtactttctttttttgttgctatcggaggtttcttgcttaacaagcaagtagcgttcttctcttaaactatttcccctacgtaagccgccaaacatgtaccgccaaagcagcttcatcataacaatagattcatggtttttccgttttcaaggagtttgctctaggctctagcaaattgtattaatattctacaatttaataaaaggcaaaataacacattcgtcacaaacataggatccgcacaagtggaagttaatataattaagattagagttgtaattgggcagactataagtctataacgtactattaggatccagtgatttaataacagtattattgtgtatttttaatgaattaaaatcggcagaattagctgtctctagtgggatctgcaaccacggaaacagcagagaaactagtggcatcgacaagtaaaaccccgttgctcttgtgttgcttgtatctcaagaaagcacagttcttcgctatttcgcctccgggaacccaatactcacaccaaaacctatatatgtgcaagatgacgatcgttttgttctcccggattaaattggtagccaactagctagctcgtacgttgaaaataaaagtcatgaaagggccaaaaaaaatcttatcactaatcttggatctactcaagtggatgattgattatacataataacataaactataaagtagttgtatggaatttctataattctatgagtacgatcaaaatatttaataacacagataactattatagagacgacttttatttggagtattaaaaatgaataattcccggaaagtatggatgtatgtctataaattattttcttcgatcgagttgagagattgaatcgttacagcaattaaaaatctcattccatttaagaaaaaaaagaaaaaaaaaaaaaaaagtcaccttttccttcaaatcacaagagattaggttgatttggatatcattccgcgatg

SEQ ID NO: 32123 - DNA, 3003 bp, Unknown
  misc_feature (1)..( 3003): 2750-1469P.txt file - cDNA_ID_3049126; gDNA_ID_1621110; Annot_ID_171777
ctgatatacttgtggccacttcatgggacaatcaggttttcttttaattccttggctcctttgtttttccatggcttaaaatctaatttgtttgtcctaataactcttgtatatatattgtaacatgtgagtttgcttcttctattgcaggtgaggtgttgggaaatatcccgtagtggagcctctctagccagtgctcctaaagcatcaatatcacatgatcagccggtaatatgtcattcttcttcttatcttacctttttttttcttttgcctttgaatctgatgcatatacgtcctttcttgtgttgaaggttttatgttctgcttggaaagatgatggaaccacagtctttagcggtggatgtgataagcaagcaaaaatgtggcccttgttgtctggtggtcaacctgtaactgttgctatgcatgagggtcctatcgcagctatggcttggatcccgggaatgaatctccttgcaactggaagttgggataaaactttgaagtaagaatgattgttcattatttcctatgactgaatgtagcaaattatagaatgttgactgattcatttatttgctgccatgaatttaatgatgtatgttggttttccttccagatattgggacacaagacagcaaaatcctgtacatacccaacagcttccagacaaatgttatacattgtctgtgaaacatcctctgatggttgtcgggactgccgatagaaatctgatagtcttcaacttgcaaaatcctcaggttagaatttttccttgttgttccatgttataacttgcgcatgagagttctaagtgctaacaatgctgtcagcatcacatggttttgggaattcgtgatcaatttagcccatgtgctatcttacaaagaatagatgaacaggctttcaccattagattaacagtttctcttgtgtaaactgtagactgagtttaagagaatccaatccccactgaagtaccagacgaggtgtgttactgccttccctgatcagcaaggttttttggtatgtcttcttatttatgttctgttgtgttttggttaattcagttttacaggaattagcttgttcgttagatgcttacattttaggttagacattgcaatgtttttatttgcaatctcgagaagattttatgtatgtcattctagcaaaaaatagagtaattttatatgggagattgttttgctagtcacatctccagatcctatctaaatcacaatggtgttgaatatgaaaaattaaccagatccaatgatctctataggttggttcaattgaggggcgggttggtgttcatcatctggatgattctcaacagagcaaaaacttcacattcaaatgccacagagatggaaatgatatatattctgtcaactctctgaatttccacccggtaagctctatctatagttatactcttatactcgtatgtattctttgaagccttcagcatatgttgagcgatgaaaatgattgtttgagttgttgtggatttaaggtacatggcacttttgcaactgctgggtcagatggtgctttcaatttctgggacaaagatagtaaacaaagactcaaggtattttcctcctgcattgattttttattttgttaaccaagtaattatctaacagttttgtattctgtgtccccacaggccatgtcgaggtgcaatcagccaattccatgcagctcgttcaaccacgatggatcgatatatgcatatgcggtatgatataaatcttatttggtttcactttatttgtacatgctcatgttatatgttgcaaaatcgagatggtcttttacttggaatctaaaaccatcattgtgttgaaaaacctttgagagcatacatgaatgctttctaacatgtattattatataggcttgctatgactggagcaaaggtgcagaaaatcacaacccggcgactgcaaaaagcagcattttcttgcacctgccacaggtgtgtgcgcgtcacagacaatagtaatatcatcatgtttcctaaacattagtgtctgtatctaacggacggaatttgttttaaatgaaattgcaggaaagcgaggttaaggccaagccaagagttggagcaaccggcagaaaatgagcgttgcttagtctgatttcttcgctagtgattttttttttttttttagcttgtggacttcgttgggctttgttatctactttagttcatgacattttgaatatacattaggagtcttgtctaaaagactaaaagtaaatctctaatgtttctagttgggcctaatttggaaccatctcgtctcatacctctttcgtttcatcatactaaggaaatctttttttcttatcaagaatttattttagtacatctgattccatagttaaactttagttattttaataactcaaatcaataaaatcaaccaagaaatgtttatctaaaactagtataattaaaacgactaatgttttcttctctcattgttactgtcggagcaaattttcctaaatttggttattagttaattttttttttggttgtgtgattaaatatggtcattagttagttagtgaagaaagagagagagataacgtggcagtagattagtggaagcaggagaagaaagcgggaatgagcaaaggacctggactttgtccatagccaagaaactcgcgtcctcttcttcttcctcttcacctatataaacactttgtcttcgaccccaattttccttcaattttatataaaaaataatttgttttcgttttttgtgtttctgtttttctcccttttgttcttctgtttcgttagaataacaacagaaaagaaaaaaagatcgtgagaaaatttcactttgaaaaagaaaaaagtgcagagagagatactttggaaaaattttgtcaacaaagaaagaaagaaagaaagaaagagtgaaaaagaaaacaaagaaacacaccaccctgtttctgtaaaacaagatg

SEQ ID NO: 32124 - DNA, 3000 bp, Unknown; identical to SEQ ID NO: 6891
  misc_feature (1)..( 3000): 2750-1469P.txt file - cDNA_ID_3049165; gDNA_ID_1621111; Annot_ID_171806

SEQ ID NO: 32125 - DNA, 3000 bp, Unknown; identical to SEQ ID NO: 6892
  misc_feature (1)..( 3000): 2750-1469P.txt file - cDNA_ID_3049169; gDNA_ID_1621111; Annot_ID_171805

SEQ ID NO: 32126 - DNA, 3003 bp, Unknown; identical to SEQ ID NO: 18228
  misc_feature (1)..( 3003): 2750-1469P.txt file - cDNA_ID_3049177; gDNA_ID_1621111; Annot_ID_171796

SEQ ID NO: 32127 - DNA, 3003 bp, Unknown; identical to SEQ ID NO: 16127
  misc_feature (1)..( 3003): 2750-1469P.txt file - cDNA_ID_3049184; gDNA_ID_1621115; Annot_ID_171851

SEQ ID NO: 32128 - DNA, 3000 bp, Unknown; identical to SEQ ID NO: 6903
  misc_feature (1)..( 3000): 2750-1469P.txt file - cDNA_ID_3049188; gDNA_ID_1621115; Annot_ID_56185

SEQ ID NO: 32129 - DNA, 3000 bp, Unknown; identical to SEQ ID NO: 6913
  misc_feature (1)..( 3000): 2750-1469P.txt file - cDNA_ID_3049188; gDNA_ID_1621115; Annot_ID_171850

SEQ ID NO: 32130 - DNA, 3003 bp, Unknown
  misc_feature (1)..( 3003): 2750-1469P.txt file - cDNA_ID_3049192; gDNA_ID_1621115; Annot_ID_171848
tgaaatggcaacattcatctggttcttggtaaggccaccttataaaatgcatcaatacttaaatcagctatgcaaagtttttcagtttttgagaagatcatcaatttcatgtatcagtggggaatcaaggaaagatcttgcttcatgaagaaccatgtgatgatatcaagccggctaatttctgggtgcgtttcaaatacacaacaattcgcagcaacacactgtctcttaagattttttttttctttctggtgaatgcagggttctcgttcagttctggtgtagttatggcactgtgcctctcaatgtaatcgttactcaggttcgtcaaaacctttcatatatctacaattccacaatcttaagcctatccaagtctgtgactaaacatcgttcataaaaactctatggtttcacctgaatctgaacagatgggatctcggcataagaaagctgtgatagcagagagcgtaagagactcacttcacagttggtgcaagagagtgaaagagaggtctaagcacacgagatcagtgtgttcccttgacacagcaacaatagacgagagagacgagatgacagtggggacattgtctaggagctcatcgatgacttcactgaatcagattaccataaactccatagaccaagcagagtctatattcggagcagcagcttcatccagcagtcctcaagatggatacacgtcgagggtggaagaatatctgtctgaaacatacaataacatcggttcgataccgcctttaaacgatgagattgagattgagattgaaggtgaagaagataatggagggagaggaagtgggagtgatgagaataacggtgatgctggagaaacacttcttgagttgtttaggaggacttgatcttgtttctgcttttagaagcttggttcagttgtaattacttgacatccatacaagaataacaattaacaaagtaaatcttttgttggtccagtaaaaaaaagtattcaatgatcaaagtacatcttttgttggttcagaggtaaatttaaaatataatagcatggattggaacgagatattatggcattaggaaactttttgattatggcagtataaacaaagaccacaaattatggcagctatacatatattgatttcaaaacagagataaagacttgtcacctgtcatttgattatttatgaatttacctctgcagcattttccttcttctgtgcagtcacgcctaccgatggatttgattaatttcctgtcgattattactaagttgtatttctagtaaatacaacttaaaagtagttttgtactcggtcttaaaactagttttgtacatagtttttgagtaagatactttgttttttttgggacaaagagtaagttagtaatatcaaattttatcatagtgattgttaatttatgtcaactacgaaattaagaagttatcaaatctgatttgagttatgataacaatgtcattgatagactcggtcaattatggcattaagaaaatctaaggatttaagtaaccaggtatcaattattaccgccgttggtattgacttttaaataagacttgccagttgtcacacacatgtcataaacaattgtttttttcttcttcttttcattcaaatgataaaattaaacttgcactatacagtttctatagaatcatccatcactagatctggtctggcgatccccaaaagatcaagtcaaaaatgaataacagagaaatgaaacatggtaaaaaaaaagacgagaagatgccggttttagtgatgccaggtttcatagccggagcaacatttctggttatttggatcatacgacgtgagttccttttatcttacttttggtgtaacatagatttccttgcttctgtttatcttttgaataatccatatataggctatagaaagggctccaccaaaactaactcgccgccaccatccgcgcttccaaaggctcgagaatgtggtcctgtggcgtccactaaacctaacttaacacctgcgccgccgctaggtcagccacggctatacgctcaagaatctcaacagtacagtcttgtggcgtccaatgaacctgacttgacacctgcgctgctaggcccgccaccgctatacgctcaacagtctcaacagtttagtactattgtggtgtccagtgaaaccgacataccccagcttctggttcaatgttgtccgccagatggagaccgtggattaacaaatcaatactatgcgggacaagagttcgacttaggaggacacgacaaggacagcgattccgattaagagtagagtacttttttaaacaacttttgattatgaatttacctcatccaccatttttcttctctttatcttgtgtgcaccggcatctttagactataatatatgtcgtaagaagaagaagaagattataattggttgatttcagttattttattatcaaaaaggaaagagaggataatgtaatgttgtaatcttatatatatatatccgaatcagggcgtcatttcagtttactaaatcatttttatttatctaatttatgaaccatagatgcgttaaaacgtctacttaaccttttgtaaacttgagtgaattgatgaatggagtaaaatttcaagtttcatcgcattcgtttgtgttattaagttttgtgctgagagcaaatcttcttttagccaaacaatgggtgttgtggatttctagacttgattttattttctagcaaactaaataaagttttgggcccaatgggcctgactcattgaacaacaaactagccgttggtccgtgtttgtgcatagctcggagacgagaggttgtacgtgtacggaaagtaacagtacggagattagtcatgaaaaacaataaacatggtgcttttatgttttatatactccaaaaaggggtctgcgtgacagtgagatagacagagagagaagaaaaagaagcgagtgagcaaagtttctcaaaaatg

SEQ ID NO: 32131 - DNA, 3000 bp, Unknown; identical to SEQ ID NO: 18235
  misc_feature (1)..( 3000): 2750-1469P.txt file - cDNA_ID_3049200; gDNA_ID_1621115; Annot_ID_171845

SEQ ID NO: 32132 - DNA, 3000 bp, Unknown
  misc_feature (1)..( 3000): 2750-1469P.txt file - cDNA_ID_3049204; gDNA_ID_1621115; Annot_ID_171842
agatcaaagcagcctctttgaccaaaagaatccaacttttttcctcaactttcatggccgccaaaatcaatcactcactttccaccaccaaaaaacctcagattctccaaacccatatcttcgatttcaccataatccaacataaacatgcctaactcgattctctttcttcttctttcattcctgtatctcacaaactgcgttgctcaatctccatcacaaacttgtcctttagatttctctcatgtcctaacaatcccatggaacacaacagattgtcaaaagtccgacaaatcagccgatagcaagaacagttgttgccaatctcttttaactctaatcggaatccctctagctcatcgtctcaaacaaacttccaatttccgtctcccaaatctcgctacttcaatctcttgtctcaacaatctccaaacgaagcttagttcactctctctatcttcgaatctcacctctctctgtttcgatccgaatcagttcgtcatcaataacgaaacctgtgctggaatccaaacgactcaagattgggtatctcgtctcggtccatctacggcgcttgactccgcctgtagcagtggtctcactgatctaacgcgatgcgacgcttgcgtggcggctgggtttagggttcaaaaacagctcatcactttggacggtaatagctctcacggtgtttattgttaccattttgtggttacttacgctgctggtattgttaacaagaaaggacctgagagtgatgatgctttgtcttgtctcttctctttgagtttgagatctccattgaactcaaagaagaaaagacacacggtggctcttgctttagggataaccggagctattttcggggctctggttattgccggtttgatttgtttgtatttccggtttggtaaagctgttaaaggaggagaggttggttgggaggatcaagggtctagaccgaaatggagaccaaacactggctctatctggttcaaaatcgaggaactagagaaagctacgaataacttctcgcagaagaatttcatcggtcgaggcgggtttggttttgtttacaaaggggttttaccagatggatcggttatcgcggttaagaaggtgatagagtctgagtttcaaggggatgcagagtttcgtaatgaggttgagatcattagcaatttgaaacataggaatcttgttccgcttagaggttgtagtatggtggatgatgatagtgagagtcagagatatcttgtttatgattacatgtctaatggaaatctcgatgatcacttgtttcctcgaggtgagactacgaagatgccattgagctggcctcagagaaagagcatcattttggatgtggctaaagggttggcttatttgcattacggtgtgaaacccgctatttatcaccgggatattaaaggtacgaacatattgttagatgtcgatatgagagcgagagttgcggatttcggtttagctaaacagagtagagaaggagagtctcatctcactaccagagttgcgggaacacacggttacttggctccagagtatgccctctatggtcaattaaccgagaaaagcgatgtgtatagcttcggggttgttatattggagatcatgtgtggaaggaaagctcttgatctgtctacttctggatcaccaaacacttttctgatcacagattgggcttggtcattggtaaaagcagggaaaacagaggaagctcttgagcagtctttgttgagagaggaaggctcagggctctcgaatccgaaagggataatggagagattcttgcaagttgggatattgtgtgcccatgtattggttgctttaaggccaacaatattagatgcattgaaaatgcttgaaggagacatcgaggttcctcctattccggaccgaccagtcccgctcgcgcatccttcgtaccgtatggacggaaacggattcacaatatcgcctgcgcttagcggactacaaatacattccggagatatgctcagatgaaaaaactaggctcatgtgagattttattttgtaaatatttgaaagcaacgatcacgtcttttgattacatcatgtaaaacaatttcagaatgttgtagtatatcataagtagggaaaacatatagttcattgtaggattatattctaaatcaaagtagaggcgaaggctgagatgcgggggtgagggcggtagctggtggaagccttccggtacaagtgcaaaagttattaaggcactcacatttggtgcagtggttcacagtcctgcaccatcttgacactaatggtcctctcgcctcagccaccatgtaaaattctgcaaccattcaaatttgtgtttatttttgtccgttgcaaaatttatatgtatataaataagaagaaattacatattttttttttttgtcaacaagaaattacatagtttgatacataatgatttgtcaaagcattttcaacagaaaaaaatcagatacatattttactattaattttatatctggtaaattctatattttacagtatacagtacattacacaatttcctgaatcagttgaatataaaatgctcaaactagcataaatttaaaactttccagcattggtaatactcaaaaaaaaaaatcaataacaaataaatgtttagttgtaattcagacacaacttgaaaccccaaaaatcagactgtgaaaatttgtgtgctctttttaacttttaattgctaaagttagttagtaatttaaaacattctggttactcacttagtattagttattactgtggtaacaacaaaatttaatgataattgtaaaactaacggccaatcgcatttgctgctctcttcttcagctacgcagatcttacgagcacttttatatatttgtctttcttcccgaaatacccttgtttcgattttctcacctaaaactcttccccaaaaatttgcaaattcaacgactcgtctcggcgatgatg

SEQ ID NO: 32133 - DNA, 3003 bp, Unknown
  misc_feature (1)..( 3003): 2750-1469P.txt file - cDNA_ID_3049234; gDNA_ID_1621115; Annot_ID_171859
acctttggagggttcaagtatccggattaagttggttaatggaattttctttggtgtcagtcctatatctctaagctgatttcataaatgttgtaccccacaaactgcaggtgaggtccctctcattagatgtgaaagtgtgggagccaacgatcttggacttatttagaaatttgggtaatgtatactgtaattcactgtgggagggactacttcaccttgacgatgactggtatgatctctaaggataaaacatttgttttgtattttgaagtatagaccaattatcatacactctatcttccaacattctcctgtttcatatatcatgcatgtagctgatgaggtacatcgtgataaacagtgtggctttttgcagcgaagacggatcagcattgtcgcatgcttcagtttcaaaaccatgtccagaagattcctttagtgtgaaggagaaatacattctaggaaaggtatgacattagttgttactttctaatgtccaagttgtgaaatgtatcttcacggggatgattgatcattttactcatttattgaactagattatgctttgtgaaaaggcaaagatgtaaaaagcaactaatactaaaccttgattgatgttttgtgtttgggccagtacctggagaaagcattagtcatcaaggatgaaagtgaagcaaacctttctgctgcgagtagaatatgggaagctgttcaaagcagaaacatacgagaaatctatcgacttatagttactactggggatgtaaatatcatcaataccaagtttgatgatataactgatatcgatgcatatcaccatattgatgcagcagagaaagcagtaaagaaaagacatgatccaactgtatgtcagagaattaaagaatccaacgaaccaagaagctgtcttcaaggatgctccttgctccatgtggcttgtcacattggtgactctgtcttgcttgaattgttgttgcagtttggtgctgacctaaacataagagattatcacggaaggactccgttgcaccattgcatatcatcagggaaccacaaatttgcaaagattctactgcgaaggtatattttaactcttaagaaacgcactcttaatgaatgttaggactcaaactaaaacctcctagctccacttccccttgattccatgactctgtttctttggtagcttggctcttccattgcatttttcttgaattagtcgttggtagttttggctcataatgcggttgtatttatattttcttaaattgtttttgaaaacgcagaggagcacgtccgtcgatagaggacgatggagggctaagcgttctagaaagagcgatggaaatgggagcgataactgatgaagagctctttcttctcttagccgagtgcgcataaaccttcactgcacaccgacatgcacagcttctttagaaacacctttggaagaccctaaaacgcaaaacaaggaggtggtacaagctactagattccgtaaaggcatgatgaaacagccttttgagtcgttgtttgtcaatgtacaagggatatgattttactgacctacagtttatctctactcacttttcaagtttcggaagttttgatttttttttttaaacttcacttttgcatttacatttgagttttacatatgaaaaacaatttcaataaacatcattcttaaatatacaaaaaaaaaaaaattgttaaatatatttctactaactgaaggcagcatattttttttttttaatgcttttgaagagtaagtttacaacttaacaaatttgtttagtaacataaaatagctgtaattggaaaaaaatacatcataacatttttgtcatcgtaaattttattttaaaattggttaatgctaaacacacacaaagaaagaaaaaagaaaaaacgaatcaaaacgtttggttaataatgttcttgagcctgctcagaccgggaagagagctggaacataattgaattttaaacccgcatttaattgagaatccgatcaaaccaaattatatcggattttacccggttaatttgttaaaccgaaccaaaattgagttgaccgatgggcagagagagagccacgcggcccacgcgttattcggcaaaggccaaattgaagaaaaccaaaccctttggaaaaacctccgtctttcgggtcttcgtcgacattgatccgttttttactcaccgtcgccggtaagtcggtaaccgtcaatcttctttctttagatcatctttgttgtattgctctgtaattttggctcttgatcatattcttttgagacaagaatgagtctttagcgaaaaatagaacagaggaatcagatggtttatctgtgattgaaagagaaatattttcctgtggagaaatcgggattttttccaaggatttatcataagtttgagattcttagaaaggggagttctttagattcttcgtgatcatcaaatgaagaaaggaagtattttatgtttattgaaacgggacttttggattgttcccaataggcaaaagcaaagctttcttcttttgtgaagctcaactgcaatttgttgttttgagttcgatgcttgatacttgtgatttctactaagtgaaaccattcatagttacttacacacgtgggcagttgttcgtgtgtttggagggattttcagatgatgtgtacttgttgagtattatactagagctcatttttcttcacaacactcccttttgaggctctgcggtgaagctttgtagtacctcgaaaactaatttgttaagaacatgctctgattcattggttgccttttggcgagattcctggactatgcatttgttgattgtttactgtagatcccatatcttcttgtatcttcataataaatccttgacacactgcagtttagcatcacaatatcctgaaagctcatttcatttgttagaaacatgctctcatgtattggttgcctttttgcatatgaacagttgaaatg

SEQ ID NO: 32134 - DNA, 3000 bp, Unknown; identical to SEQ ID NO: 6909
  misc_feature (1)..( 3000): 2750-1469P.txt file - cDNA_ID_3049253; gDNA_ID_1621115; Annot_ID_171854

SEQ ID NO: 32135 - DNA, 3000 bp, Unknown; identical to SEQ ID NO: 6921
  misc_feature (1)..( 3000): 2750-1469P.txt file - cDNA_ID_3049283; gDNA_ID_1621116; Annot_ID_171878

SEQ ID NO: 32136 - DNA, 3003 bp, Unknown; identical to SEQ ID NO: 18244
  misc_feature (1)..( 3003): 2750-1469P.txt file - cDNA_ID_3049319; gDNA_ID_1621117; Annot_ID_171925

SEQ ID NO: 32137 - DNA, 3003 bp, Unknown; identical to SEQ ID NO: 18245
  misc_feature (1)..( 3003): 2750-1469P.txt file - cDNA_ID_3049323; gDNA_ID_1621117; Annot_ID_171921

SEQ ID NO: 32138 - DNA, 3000 bp, Unknown; identical to SEQ ID NO: 6936
  misc_feature (1)..( 3000): 2750-1469P.txt file - cDNA_ID_3049328; gDNA_ID_1621117; Annot_ID_171918

SEQ ID NO: 32139 - DNA, 3000 bp, Unknown; identical to SEQ ID NO: 6934
  misc_feature (1)..( 3000): 2750-1469P.txt file - cDNA_ID_3049332; gDNA_ID_1621117; Annot_ID_171916

SEQ ID NO: 32140 - DNA, 3003 bp, Unknown
  misc_feature (1)..( 3003): 2750-1469P.txt file - cDNA_ID_3049336; gDNA_ID_1621117; Annot_ID_171909
atcctaatatattaccttttcatacatcttgatggctggtgtgttggaagctcttacaaaaagatccacaaagtaggctttatcactgcaatcaataaccacaagtataataatcattagaagaccagaaattaccagataatatataaaatcaatgaggagaaattcaagattttcttcctttgaaacaatctaaatatatcggttttcaaataaataaatggtccactcgaaagccaatatcaatatattaaggctttcatattttatatcataacgatccatatcaaagagaacactaaaacttgagatgctttgtaattgttaagtcttacatcttatcacttatatcttccagaaggttcatcagtttctttgcaagttgctgcctgcggtattctggagagacagtgacggctgtcacatgaccatgccaagattcaccctgtccttcaactttacccataactgaaaccatgtagaatcttagttagacacatgcttttaaaattatatttataagaacaagttttacatatgtcacttacgttggattctcaagaatatcaaccataacatttcaactatacaaaagaacatttcagtgacactgcttaattttcaaatgtgttaatatccaaaagcttagttttactctcagttctttcaatggtttcactatacttccaaggtctctttccaaactataccacgaaaagggagaaaaacaggtatagtaatagggcaccacgagaacagaacgtcaataatgaagcatatatcgtacttgaagaaaataaagaaagataaagccttgtataaatcacatttcgaaccaatccaataaggtatagcatcattatactacaaacactgaaagacagaaaaatttgagccttgatataactcataactcattctctggacatttagaagttagcacaaacaatcttaagccatgcttcctatgcatcttctaccccatatcaagatttctaaaaccgctaactacagagactaggactaatacaagcagaatttgtttaaacacttatacatcctggtttgtgttaatcagttttcaaacagagtcactcttcctggttttaacaacattcaagctatctccatctgataaccaaaaaaaatcaatagtggcttttacactaacagtttatcatctaagtttcaaccctaaaagtaaacataatctccacgaatttcaaattcctaaaccaacgaagacataaagaaatcaaaacgaagagaacaagaggattacttactataacccatgacacgattgccgggaccttcagcaacatgaaaatagtcaggccatctcgctaaataggtcatgtagaaggacatattgaactgtttcacgaaacaaaattcgaacaaaaatcaacaaaatcgccatagcaaaacaaagcaataatcagacgaaaccagataataagaagaagaaacacgagattactgtttcagtgaggtggtccagattcacggaagtgaatcggagaaggtcattgcagctgaatctacgtatcgtcgtcatctcttctttttctcaaatcccttcgagcttcgtcagattctctggaaaaagaaagaggagacaacaacaaagcaatatacatggcccagttagaaaattaataaagcccatttatatttgggcctataacactgatgacgtcatgtaaaagatgatcaaatttcattatctcccgtcgtcgcgaccttctcagacaacagaaccaaatcctcggcggcgattgaagaaacctttccgatggatctgctcagggaagagattctgaagaaacgtaagagtctagctgaggaatctggtggtaagaagttcttcaagcggtctgagatcgagcagaagaaaatccagaagcttcgagaggaagaacgacgcgagcacgagcttaaggctcagcggagagccgccgccgccgcttccggtggagatggaaaatcatccggctctgctcctggttcttctaacgcagctacgtctgcgtcttccaaatcctctgcatcggacgctgctgctatcgccgattcaaaagccctaaccgacgaaaacctaattctcccgaggcaggaagtgattcgtcgtttgagattccttaagcagccgatgactctcttcggagaagatgatcaatcgcggctcgatcgactcaagtacgttttgaaggaaggattgttcgaggttgatagtgatatgactgaaggacagacgaatgatttcttgcgtgacatcgcagagcttaagaagaggcagaagagtggtatgatgggagataggaagaggaagagtagagatgagagaggaagagacgaaggtgatagaggtgaaacaagggaagatgaacttagtggtggtgaatcgagtgatgttgatgctgataaagatatgaaacgtttgaaagctaactttgaggatctatgcgatgaggataagatccttgtgttttataagaagctgttgattgaatggaaacaggagcttgatgcgatggagaacactgagaggagaactgcaaaagggaaacagatggtagccacttttaagcagtgtgctaggtatctagttcctctcttcaacttatgcaggaagaaggtaaagattcttgctttcgattgttaattaggtgtaaatcattgtttggcaagaaaattgttagggagattatctctgtttatgaaattggagatagattatctcagttctatctaataagcttagagaactatgtttattaagcatagtttgggtaggaagaccaatgtgcagtgtttaggttccattagtttgtgtacttttgattatatggcgacaaggacgagttttctaataagttctagtgctaggtagacaatgagaacgtagaatagcaagttggaatctgtatgcaccttgaatttgccattgaggcctctgttagttatctccatttagctgaagaaaaataggctggaatg

SEQ ID NO: 32141 - DNA, 3000 bp, Unknown
  misc_feature (1)..( 3000): 2750-1469P.txt file - cDNA_ID_3049369; gDNA_ID_1621118; Annot_ID_171949
ggctttaaagtcaagaaatacagaaaacgtaaaatcataaacatataaacaacacaatattaaatattcataaaatcataaatatgcactcgtgcgagcatcaccaacgcgtctcgatttcactttctcatataaatatattcatattttattaataaatattttaggtaaactaattatattaggacatgtgtgagaaacgtttattaaaatctttccctttctcctcattttcctattttttctttataaaacaaaagagagaacatggagttggaaatggcgtacgtacgtgttccgtacacgtgaggggcagttatatattgggtttgtattgccctcaattactttgttttcttcttatacgcttttttgttgtataatactataatttaaagtccacataatcccaaaatacattagaaaaactcaatttatttttgttttctttcttaaaaatcccatatttcatcaaaaaataacattaaatcactttcgttgactttaaaaaactaatcaaatgctttaacaaggttcattttgttaataaaatttggatcatttcgtatttaatattattgcccagataaatttaattcctaaatccgctactgatacatcaatcaaagaactcaataagaaactttggtaaaagcaaaaacactctaacaacaatgttggaatctttacacaaccacaggcctcaaaaatccctacagaaccaagaaatcaacaagaagaagactaaaattagcaggattcaaatggaacatacagaaccaaaagagctcagaaggatttgttataccttatgatgaggcaagcaagtgatgtgatactcgtgcataacccaaggagttctaactccatgaggactcttaccttcatggtacacaagcgtcttcttaatccctatcacaacaccatttcctcttttatccctaattttccgatcaacaccactaggtttccaaaacccagaacctgtcgtcctcttcattttcatcttattcgggttcgtgtactcaatcggagagaaaaagtaccactcaagatcttccgattggatcctagctaactctgcaacaacaacaacaacaacaacagcaaaaaagaacccaaatttagaaatgattgatgatgatacagagagagagaaagagagtgagaaagaaagtgagaaaaagggtgagaaattcagcacaatagcctactcatattaaatgttttcgattctcccttgtttttactttttttggcaaggaacaatcgtttgtattaagactcttgtagcttctacaagccttttcatttaatgaaaattcacatatttatcaaaaaaaaaaaaaaagagggtgagaaagagagtgagagagagaatgagagagagaaagagagagagacacacatagatcgagacagcgagagagaaagagtcacagagagagagagagagattactaggcaaatccttgctgggtttgtgattcaagatgttgatctcgctaatggcttcatcaacgagccaagtcttacccagaattttgttctttaggtaatggtttatcacttcctctcccgtcggactaaatctatacccagtcggatctttcatcatctttttaaaatagaaacagatcgaaaagaaacaaaatgatcaaaattcccgggttcccgggattagggtttgagtgaagttttttcggcttctctctctctgtgtttttctttctttttcaaatacaagtaggaagtgattgatgaaagagatagcgagcgacggtggtatttatagaaaatgattgacggtaatttttttttcagtaaaaccaatttgtagtaatttctcacattttgacggtggtatttgtagtaattgtcgaaaacaattctctctctctctctctctctctctctctctctctctctctctctctctctctctctctctctctttctctctctctctctctctctctctctccttataattattttttagtgtgcgtaagaaatcaacatggatcagcaaaatgcatttactctctttctctccaaagtcagcctcaaatatttttttggacgtttacgtttagtaattaaacaaataatgtaatgatttggaaagagttaatgtttctataaaagtctcttgtaaagcctccaaagtcagcctcaaatattatatgaccaaaaaatctcttgtaaagtactccctagtaattaaaatggaatctgcaactaatgtaatgatttggaaagagttaatgtttctataaaagtctccctattaaagtctccctagtaattaaaattaatttaatattgtttagccatgactcatacacgggccggccctggttgaaaatcaagcctctcctaagtaatatgactcatcactctcaatttcatctcttgcttgggtcttcttaatcaggtcaatttcgtttgttcatttgtggtttatgttagtttcatttccttttcatacctttttagggaaaaatagaaatcctaagtatattcaatggactcacgcactgacgcacatatttgtgattttttttataggagaataaggacttgcagatttgagattgttgaacgtaactactcactagaccaaacaatataaatagtaattggaccaatagaggcttctgggatacttcaacttctaaatttaaggtgattacctatgtaatttccagcattttaggaaattattttctagatcgtatttgttaatttgcttagaatttctataagagtttttactttttccttacaattcctttattcactttgtccatatattttgttttgatcaggtaagccagtggcacatctggagggttagttgaggttaactatatatcatacacattttcatcatatattttagcttcattctcggagcttcgaacgtaagcatacagctctttccatgcagctttattcctatttttgatctttcggaaatttattgcagcgacgatg

SEQ ID NO: 32142 - DNA, 3003 bp, Unknown
  misc_feature (1)..( 3003): 2750-1469P.txt file - cDNA_ID_3049369; gDNA_ID_2926161; Annot_ID_198764
attggctttaaagtcaagaaatacagaaaacgtaaaatcataaacatataaacaacacaatattaaatattcataaaatcataaatatgcactcgtgcgagcatcaccaacgcgtctcgatttcactttctcatataaatatattcatattttattaataaatattttaggtaaactaattatattaggacatgtgtgagaaacgtttattaaaatctttccctttctcctcattttcctattttttctttataaaacaaaagagagaacatggagttggaaatggcgtacgtacgtgttccgtacacgtgaggggcagttatatattgggtttgtattgccctcaattactttgttttcttcttatacgcttttttgttgtataatactataatttaaagtccacataatcccaaaatacattagaaaaactcaatttatttttgttttctttcttaaaaatcccatatttcatcaaaaaataacattaaatcactttcgttgactttaaaaaactaatcaaatgctttaacaaggttcattttgttaataaaatttggatcatttcgtatttaatattattgcccagataaatttaattcctaaatccgctactgatacatcaatcaaagaactcaataagaaactttggtaaaagcaaaaacactctaacaacaatgttggaatctttacacaaccacaggcctcaaaaatccctacagaaccaagaaatcaacaagaagaagactaaaattagcaggattcaaatggaacatacagaaccaaaagagctcagaaggatttgttataccttatgatgaggcaagcaagtgatgtgatactcgtgcataacccaaggagttctaactccatgaggactcttaccttcatggtacacaagcgtcttcttaatccctatcacaacaccatttcctcttttatccctaattttccgatcaacaccactaggtttccaaaacccagaacctgtcgtcctcttcattttcatcttattcgggttcgtgtactcaatcggagagaaaaagtaccactcaagatcttccgattggatcctagctaactctgcaacaacaacaacaacaacaacagcaaaaaagaacccaaatttagaaatgattgatgatgatacagagagagagaaagagagtgagaaagaaagtgagaaaaagggtgagaaattcagcacaatagcctactcatattaaatgttttcgattctcccttgtttttactttttttggcaaggaacaatcgtttgtattaagactcttgtagcttctacaagccttttcatttaatgaaaattcacatatttatcaaaaaaaaaaaaaaagagggtgagaaagagagtgagagagagaatgagagagagaaagagagagagacacacatagatcgagacagcgagagagaaagagtcacagagagagagagagagattactaggcaaatccttgctgggtttgtgattcaagatgttgatctcgctaatggcttcatcaacgagccaagtcttacccagaattttgttctttaggtaatggtttatcacttcctctcccgtcggactaaatctatacccagtcggatctttcatcatctttttaaaatagaaacagatcgaaaagaaacaaaatgatcaaaattcccgggttcccgggattagggtttgagtgaagttttttcggcttctctctctctgtgtttttctttctttttcaaatacaagtaggaagtgattgatgaaagagatagcgagcgacggtggtatttatagaaaatgattgacggtaatttttttttcagtaaaaccaatttgtagtaatttctcacattttgacggtggtatttgtagtaattgtcgaaaacaattctctctctctctctctctctctctctctctctctctctctctctctctctctctctctctctctttctctctctctctctctctctctctctccttataattattttttagtgtgcgtaagaaatcaacatggatcagcaaaatgcatttactctctttctctccaaagtcagcctcaaatatttttttggacgtttacgtttagtaattaaacaaataatgtaatgatttggaaagagttaatgtttctataaaagtctcttgtaaagcctccaaagtcagcctcaaatattatatgaccaaaaaatctcttgtaaagtactccctagtaattaaaatggaatctgcaactaatgtaatgatttggaaagagttaatgtttctataaaagtctccctattaaagtctccctagtaattaaaattaatttaatattgtttagccatgactcatacacgggccggccctggttgaaaatcaagcctctcctaagtaatatgactcatcactctcaatttcatctcttgcttgggtcttcttaatcaggtcaatttcgtttgttcatttgtggtttatgttagtttcatttccttttcatacctttttagggaaaaatagaaatcctaagtatattcaatggactcacgcactgacgcacatatttgtgattttttttataggagaataaggacttgcagatttgagattgttgaacgtaactactcactagaccaaacaatataaatagtaattggaccaatagaggcttctgggatacttcaacttctaaatttaaggtgattacctatgtaatttccagcattttaggaaattattttctagatcgtatttgttaatttgcttagaatttctataagagtttttactttttccttacaattcctttattcactttgtccatatattttgttttgatcaggtaagccagtggcacatctggagggttagttgaggttaactatatatcatacacattttcatcatatattttagcttcattctcggagcttcgaacgtaagcatacagctctttccatgcagctttattcctatttttgatctttcggaaatttattgcagcgacgatg

SEQ ID NO: 32143 - DNA, 3003 bp, Unknown
  misc_feature (1)..( 3003): 2750-1469P.txt file - cDNA_ID_3049423; gDNA_ID_1621119; Annot_ID_171999
tatgcaaataaacaaaaccggtggactgtcacacgtatattcctcaagtggtttgatcacttatcaaactctcaatccatctttaatatcactacccacaaaagttcaacaatagagtccactatctggataattgtagtattcttacccaaagatcatgatgttttcgttatctaacacctcgaaagagctctagaacatttaacaaaccaatttctctttaaatatacaaaagagaaacttttaccttttcatcatcaacactttccacggtcacaaggttaggaacaccagctgatcaaaccaaagaattaagaatagaactcaagtgtggagttttacacccaatttagtaactcaatacaaaaaaactaaagatgaggactttgaaatagcaaagtcaatttacatagcaaaggcttcactttgttgctctgcaaattcccaatgaaatgccactctatatcttctggaagctgcaaatttcaatgtatcaatataaattcagaacttttctaatccaaaagattcaatttttaaaggattcgtagaaatcatagcaagcagagagaacctgaggtgccttctcaatgatctcttgcacataattctctccaaaagacctctgaccagcgtcgtatacttggcgaatcagagaaactggtttcgtcttactcaccgctacgacccgtatctgatccgacccacgacccgctttctccgccgcctggtttacccgctgaaacaccgatctcagagccgccacaccatcaatcgccgccgccgacatagtagaatccgccacgtgttctttgtctggctcctcttcgttcatcgaacaatcactgatcttctggtcacagctttgtgggagagaaagagggaggacagagagacggataatacgctgcgtttcgatgttttaattttcaatgaaaaaaaaaacattcgccacgtttcgaaacagaggaacaatgttgatttttccccaaaaaaaaaaggaacaatgttgatacccgtgagaagttaaacgaatgtactgttgcagatgtattgctaaattatggatgtagattaattatatacgtagttgtaaatactaaatagttttgaaaataaataccagtgggaaatatttttttcataaaacaaaaactatatcctaaaaaaaaactagaacctaataaccccaagcatcatgtgtaaatttgtgtttttgtatataagcaaatggcaattttgatttttttttcttgacaaatgggcaaagtctataaaccatcaaaataagttctttattcgtaattgattccacaaacctttgatattcattttgtcttcataagttaaatttgtgtttttgtacatttattgtcacacatcctatttaccactagtttcaaccatggggactttcatatatttctaaattctaagtctggattttaatgagtgcatggttgaagttgttctctaaatctttcatgctttttaaatccaacgtacatttaacgatccatatgtctctccacttagaaacttcgacactttatcatccctcaacaatcataagaatttcattaaggagtttaaccagtgtgcctatagcgtcacagtccgaactttaaattgcagcaatgtccttcaagttgaagggactttttgtacttgtttaaaatacgcaaatatattagggtcccaaatttattattcattgaatttatcccaccaagttaagtgtcaacgccttacttgagtgctctcagaactgaatttagtcaagtttgaacaaatatgtatataccgtgtattacggaaagtcttgtattgtacatttgtactcgtacctttttctctcctatatatttttcttagttctaaatgtattatttgcttcatggatatgattgatactacaaaaaaactagttgaataataaatatgaacgcttcaaaaaatgtcaatgtctaaccttttgacaaaaaaaaagaatgcaagtttcgtaaacatggcacataaaggctaaagtgtgtacaacaaaaagacttggtttggttcggatagtggagttccattccatatggatacactattgaacaatatctccctaaatcagtaaatctctatatagtatatacttcgtaaaaacattataatttagttgattgtttgtaatcaacctaacaatattacgcaaaaacattatatttttaaagatatattatcataaatcgtattacgttacgtttataattaaatccttaaaaacaattagtagataaatcatttgagctttctgagttaactgatcgtgttgtcaggatcaggaagagaaaaaaaatcactaacggatgcgatcaagacgttactatactagttgcacttttagctaaaagattatttatttttactttgtctctagatattattaaacttggatatctcatggtgttattctttgcaaaatatctagatatttccccttttacttatttaaagtaattaatttccttattttgtctctggatattttggagaaatttttatctccaaatatcgatgatatataccaaatcacaaaaacatctatatatctagagctatatagctaaaaacaatttattgccaaatgatcaaatgaatttcatgtgtcccacttttgttctgcctaaatttagaaatttattgtttttttttctacgcgagcctaactcgttttactcttctgaaatctaaactcttcgaatttaattgaccactccactaaaagagtcttaaaaagtcaaatatttttcttattacgacctaattttgaaagaacttcttcgttgacctatgcatcattctctcgtctataaataccattcacgtcgttcgttactcttcatctaaaaacattcatacacatacaaacacacgaaaatacatcccaattctaaaaaaattgttttttcaatttttctcctttgatttcttaaaagaagatccacaacaacaagaatg

SEQ ID NO: 32144 - DNA, 3003 bp, Unknown
  misc_feature (1)..( 3003): 2750-1469P.txt file - cDNA_ID_3049427; gDNA_ID_1621119; Annot_ID_171997
ttgcactctagtggtttaatcgaggtatgagttgcattcttaacaaaatatgtggtggttgtttatatagatcaagaaccgcaagttcgatttttgttttggtgtgaatagagatgtatctatttgtcttgcagacatctaagagaaagctcgataaatacgaaagattttatcatcttcgcttcttgattgtggcgatgcttcctttcctgaaaaagttatgcaaagcacaagatcaagaaatcgaaaccgaggctaaggttcaaggtatatatggttctcccttttactactaagacaagattttttcttgctacaagataacatattgatatgtttatagattcaatggcttctcaagttgatatatccgagagtctatgctcaaatgaagagcgtgtcttctggtaagtatcatccttttgttgcatgtgtttgaagagttacatgacatctatcttatatatcactgaaatgtctttgttgctctagtaaccactgtgcaacatcaattgttgacttgcatcgaagctgtccaaagtgttcatatgaattgtgtctgaactgttgccaagagatccgtggaggttggctttctgaccgcccggaatgtcagctacaattcgagtacagagggacccggtatatacatggcgaagctgcagaaccgagctcttcttctgtttccgaggatgaaactaaaactccatccatcaagtggaatgctgatgaaaatggaagcatacggtgtgcgccaaaagagctaggaggttgcggggactctgtgctggagcttaagcgaatcttaccagtgacttggatgtcagatttggagcaaaaggcagaaacattcttagcctcttatagtatcaaaccgccaatgtcatattgtagatgttcttctgatatgagtagtatgaagaggaaggcagcttcgagggacggatctagtgacaattacctttattctcctgattctttggatgtcctgaagcaagaagaacttctgcatttccaagagcattggtccaaaggtgaaccagtgattgttcgaaatgctcttaacaacacagctggtttaagctgggagccaatggtgatgtggcgggctttatgtgagaatgttgattcagcaattagctctaatatgtctgatgtcaaagctatcgattgtttagctaattgtgaggtagaaactcattttcttataaagtttctatagctgtataagaggttataaagctcattttgtttcttgttatttcaggtgaagataaatactctatgtttctttgaaggatatagcaaaggaagaacatatgaaaacttctggcctgagatgctgaagctgaaggattggcctccttcagacaagtttgaaaaccttttacctcgtcactgcgatgagttcatttccgcattaccatttcaagaatacagcgatcctagatcaggaattctcaacattgctacaaaacttcctgaaggacttcttaaaccagatcttggtccaaaaacttatgttgcatatgggacttcagatgagctcggtagaggagattcagtcactaagcttcactgtgatatgtcagatgctgtaagtttcagaattgttacttagtactgttaaataataatacggtttctcaggtgtataacggttttttgtttttgtaggttaatattctgatgcatactgctgaagtaacactaagtgaggagcaaaggtctgcaattgcagatttgaaacagaaacataagcaacagaatgagaaagagcttcaggagcaaaatggtttagaggaagaagaggttgtgagtgatgagattgtggtttatgatgaaacaagtggtgcactttgggacatctttaaaagagaagatgttcctaagcttgaagagtatctaaggaagcattgcatagaattcagacatacttattgctctcgtgttacaaaggtaagaaataatccacaaaacgttttcagttccgagtcttagaggttattgtgctgataggattctttatgttaggtgtatcatccaatacatgatcagtcatatttcttaaccgtggagcataaaagaaaactcaaggcagaatttggtatggttacttgtaactgtagtaactgtcacttaccgacattgtattcttacgtttttgtgtttgtttgtttgaactaaagggattgagccatggacatttgtgcaaaagctaggagaagcagtgtttattccagcaggttgtcctcatcaagttcggaatctcaaggttattatttgaatggaagctgtcctattaactaaactttttctcattatctttaacttgtattatggattttgatacagtcgtgcacaaaggtagctgttgattttgtttcccctgaaaacatcgatgagtgtctccgtttgactgatgagtttcgacaactccctaagaaccataaagccagagaagacaaacttgaggtgattctttttctgatattttcaattttggattagcaacttctgtcaatggatacagttttgtttgtagttgaatcttgttttaatctttgccatgtgaacagataaaaaagatggtgatctatgcagttgaacaagctctgaaagaagtggagacattattgctagatcgcagctaaaagctctatagctttgttgttgtaggattaacagcagattttgtagaattgttaaagccatggctattgtagttggcttttgctgtgatatatgtatgtaaaagagacaagtgtctcttgaaaagaatgatttcctttttttcaaatgggattttgatgtaacttttccttttccggtctgttttggcatatgaatgaatatttgatgtaagcttcttttgtatagttttgtatctttacatcattttgagagcaaatgaaagtttatgatatgagagcatcatagattcatagtagcaaatacaattggttcagttgttgcttgcaaatttttactgcagtaaatatg

SEQ ID NO: 32145 - DNA, 3003 bp, Unknown; identical to SEQ ID NO: 18260
  misc_feature (1)..( 3003): 2750-1469P.txt file - cDNA_ID_3049431; gDNA_ID_1621119; Annot_ID_171996

SEQ ID NO: 32146 - DNA, 3000 bp, Unknown
  misc_feature (1)..( 3000): 2750-1469P.txt file - cDNA_ID_3049471; gDNA_ID_1621121; Annot_ID_56287
cagatgttgttgaatcccaccggagtattatcttctccgctgtctctaaatcggaatcaacgccacgagtctccggtgttgccataatcagaatctgaaactggaaagtgttttgacttcacagatcgatttaggtgttttctttttgtttgttcctttgaaatgagatttaggtgaagattatactgagagaactctgaagtctgctttgccaattttttaatgaagaaatcaaaattcgccttctttttttttcggggaaaagagtcaatagactattcaacgctcagctcgtggggtgtgtttttttgttttgttaaaaaaaaactatacaaatatttggattctcgccgacggcgtgaagttaccggaaaacatagattaccttaaaagttctattactactttcaccttggaggtagatttttcgttttcagtcacatgaatttggcaagaaaaaaagaagaagaaaaactaactactttaaccataaacctataatatattttttcacactaaactataaatatataatacctattttaccttttatacataagtaacaacatcatcacaactaccactttcactatcatcaccaccaccgttgtgaccatcatgttattaccatccctccatcatcactaccactgtcatcaacgccacacaaaaaaaaaaaactcatgaaaattattgataataatccataaaaagaatttatacttttaatatctaaattttactcaaatcaaattaccaattttcttcaatgcggatatactaacatcatgttatagcctccatgcagagtttaagatgaacatttttggactgcaagcccatatattttgtttagccgactttttaaagaataaattgaaaaacacgaaagattgacgttgagattcgaatcgagatgcatgattacttaaaaccagctaagtttcataaaaactagaccgattaatatcctctgaaaaccgcaaccaaatacttgttcgcttgttctcatggacgacactacctccatggtaaaaccttaatagagtcttgatgtaataattattagcaacaaccatcataactaagactatctacattggttacatgatgaatcaaatctataagaatgacatttgtgagtatttcgtttcattttttaaagtgtaattatcactatcactaattttggtttggataaatgatagatcataaatctactattctaagtaaaatctaaaatggattattggtatatgtagattttaaatattttattggtttattgattcttaaattccatccaaacttcattattgttggttcaagcttttttatatatttttattcatatattttgttattattgatattctaattttttttaaacctattgttgttacaattctctgtattttggctctctagttataattgatataaaataactttaaatacttaaaaatacaaatctagaataagaatggagaaataaatgttatttatatcaatgagagaagagaagaatgcacaaataaagaacattgatatgttcttttatccacgtgagaaaaaaagaattcattttggagttaaaacatttccatcaatacatgatttactttgaaaataaaatgttaggaaatggttgataaaattccatataaactcactagaaatcatcggtaataatatataagaaaaaattataaattgtacacaatcaacttaccaataagtaccatactgtgaatttgtgaagatatttgatcctttacaagaatcttgctgacgtacaaaacgaacgattaaatataagagataaaccaaacaataaattatataagaggataatttttataatatttaaataatctctcctatgcagtttcagcttaatcgcgttgtaatctcagcttaactagtatcttacacttgaagatcaacaaagacaaacctgcaagatggaaataatcccttgttaaagtgatgaacatatcaatatccgcaacaacatcaccttgaagcacattgcatatcgagctacaaacaagagtttggtctaggtgaggattttcatcatccagatgaatctttaaaaagaggttctttatactcgacttgattttccgattaaacaaacacttcacaaaatcaatgaattccttgatactatcatgttattgtatagcataatcaaggttaaaacgccgaaaaagaacaaacacattctttcactttctggagaatactgtcgttgaaacagtttttttgtggaaagaaaagataaaatgtatgcaaaaacatcgtcttgtaaaaaaaatcttttaaaatttaaaattttctaaatcgtacataatcaacttacaaacttgtgaaaaaatttggtaatatataacttgtttgtgaatatatttgatcaaatactctaaaaagtactaataagtttaaaaaaatcttgccgacaaacaaaacgaacaaacataagggataaaacaaacaatgaattatgtaagaagataatgttttttagtgcagtttcagtcaatcaaagaaaatcaaaatttctaagtatatattagtttgggctgggccgtcaacaattggtcagtcactgaaacgaatttgttcgggccttgggcttgatccgtcaacaacatcaaggttcagaacaaatgattggtcagtcactaaaacgaatatcacagctgccgtgagattagtatacagtctatctctctctcgaagaaatcgtcacactcctataaatggtcacttgtttcgtacggcctttctttactcctttagagagagcgtgccatttttatttttctctttcttctctcatttttattttcttttcttttttttcaccttttttttttcctttttttttctttcttcttcttcttacttgattttgaaccctagcttaaggggaattttctcgggaaacaaaagagatatttttatcgcagtgagaaagaaacacaaaaaatg

SEQ ID NO: 32147 - DNA, 3000 bp, Unknown; identical to SEQ ID NO: 32146
  misc_feature (1)..( 3000): 2750-1469P.txt file - cDNA_ID_3049471; gDNA_ID_1621121; Annot_ID_172081

SEQ ID NO: 32148 - DNA, 3000 bp, Unknown
  misc_feature (1)..( 3000): 2750-1469P.txt file - cDNA_ID_3049510; gDNA_ID_1621121; Annot_ID_56290
aattgggtgggtttatttgacccggaacccaaaagttgactcgttgtatgaaccaaagtcaaatggtcaagttttcttttttctttctttaaagttaacgtccaagggtctggtgagtggtgatacgagctatagatattagatattgtggcttaacaaattgtatgatatagagactgaaataatctttacatgtcgctaatttggtttacactaggaaccattttctatgtgactcggatcaacatgacaaccatgatgaacacacatgtcatggcgaggatcaagagccactggaagcaactcgtctttgagctttctgaataaatctttgtggctcttacggttgcgtgtcctgtgcttgctaagctttgctcaatggcttcctcggtagaatcaagtatctgttaatgtaccatcaacaacaaaaaaaaaacacagaaaatgttaagaacaatgaagccagtagaaacaatatatgaaccgatatagattcttctcttatcccattgttgatgataattcataatagtaagtataatgggttttgtaaggaaaaaggttagcatctcaccttttctgtattttgcacagattggcttatcatttgacttctctccttaagttgtctcgcaagtaccaccatttcatcggttagatcctcttgaagctttctgtcatcaaatgatcaccaatgtgacatgaagtggcattttcaactcgaattcaaaagcatacactcttcacgataattttgtttcattaaggaaagtgcatatacctctgcttgttaacttgcgcttgagctgcggtgtctagttttattggttttgagggatcagcgtcatagctttgctctttggaacttgcaggcctacctcaatcaagaaagcagctaagaaatgaaggcaatatttacaagttgagaagcatgtgaatagtattgcacgtacacgattcttcttctcagctgtggagaattgggggttcgtgtatcgtcttctactttgggagaactatcgttagtagaatcctttgcaaaagcttcatcagatacctctgtgtgaggctgtaaatttggcaggaatcaaaataatttggtattagttacagaagaaaagcttgaattcttgcaactaaaaatggttgtacaccaaaacgtgcatgcctgaaactaaactcatagggaagtaagaaagcaaacttcaaaccattctctcagatcaaatgcggctagtagtaaataggtaagcatcatacagctagagcagaaatatcatctaatatgttcctccaaatttcttagctgtagaatccaaatgaacaatctcgttctagttcaggtgacttaccacttgagcaactattcgtgaaacaacagcttcaatcttctcatagtactcattcaccttagcgtttgtaactctggttagagagatgagcataagtattttggtagcatcaaatagagacactctaattcgccatattaattgagagcatatttcataatattttagtctttcgacaatatctctacttggaactgaatagaataccaagctattcaattagaatctctaaacagttgatcctagtagcaatctttgtgatttcaactcattgaaatgtgaaagatttaaaattacacagctgaaacaaggaagagagtaagtaacctgggaagcccttcaagggtcttctcttccgagagttgttccaactgttccctcaaagtagcaacatactgcagatggttcacacatcaacatcaaaatcaaaattgtaacagttagagaggttataataagcacaaattctaatagtttatacatgaaaatatccaaaagaaggttacatgcataagcttagactggttttgctgattaggtgcagctgaaagtaatctcatgaaattgatttccgttttgccgattcccattttaagatatctgatcataggaatgccacattcagatggaagccagacaccagaacagaaacaaagttgaggtaatcaaagaagccatcttgagagcaaagtggttttgattccaagaactcatatttatcagcataacctctatgttcatgaaacccagaagagcacaatacataactatcaccactcaatctgttattaccagaactagcagtgttcaacttcactcaaatgtggacgaattacagtaaattggctaatcccactactgaattgaccttcaaggtaaaccccaatcatttgccactacgatcaaccaaaaatatagattcttcattcactcttatcaaaagctatacatgaaattcagagtgttctcattcctaaatatggaaagttgaattctatcaacacaatcagatcatgcgacaatgaactagaaaccacgaaccagaaattgttggtaatcgtttagtggacgagattgaatcaaaggttcaagtggtaatcgttttctcctgacgcaaaatcgaaagaaaaaagatcggtagcgtcgcatcctaatcgggtgacccggaaaccaatagttgattcgttttagtggcggtaaaacccggtttgatgaacaaatattaatgggcctggcccatacgaggatgatcgtggcaatgtcgatgataacaacaactcctctattcgggtttatgttgacccggaaaacgaaagcataggacacgtgacacatgtgatgtgagtgaagccaaaaataataatattgggaaaggatgaacacagcagctcagctttcgtcttctccgtcaatccaataaaaaaatcagcaaccgttgtttgtttttaagctttttttacaaaagacgtacacgtctctctctctcactccctctttaagatcagaagctcatttcttcgatacgatcaaccattaggtgatttttttctctgatcttcgagttctgataattgctcttttttctctggctttgttatcgataatttctctggattttctttctggggtgaatttttgcgcagagatg

SEQ ID NO: 32149 - DNA, 3000 bp, Unknown; identical to SEQ ID NO: 32148
  misc_feature (1)..( 3000): 2750-1469P.txt file - cDNA_ID_3049510; gDNA_ID_1621121; Annot_ID_172084

SEQ ID NO: 32150 - DNA, 3000 bp, Unknown; identical to SEQ ID NO: 6998
  misc_feature (1)..( 3000): 2750-1469P.txt file - cDNA_ID_3049514; gDNA_ID_1621121; Annot_ID_56284

SEQ ID NO: 32151 - DNA, 3000 bp, Unknown; identical to SEQ ID NO: 6998
  misc_feature (1)..( 3000): 2750-1469P.txt file - cDNA_ID_3049514; gDNA_ID_1621121; Annot_ID_172078

SEQ ID NO: 32152 - DNA, 3000 bp, Unknown; identical to SEQ ID NO: 6999
  misc_feature (1)..( 3000): 2750-1469P.txt file - cDNA_ID_3049518; gDNA_ID_1621121; Annot_ID_172076

SEQ ID NO: 32153 - DNA, 3000 bp, Unknown; identical to SEQ ID NO: 7001
  misc_feature (1)..( 3000): 2750-1469P.txt file - cDNA_ID_3049521; gDNA_ID_1621121; Annot_ID_172072

SEQ ID NO: 32154 - DNA, 3000 bp, Unknown
  misc_feature (1)..( 3000): 2750-1469P.txt file - cDNA_ID_3049525; gDNA_ID_1621121; Annot_ID_172071
gttgaacgaattggctagaacagctcctgcatcagctcctttccaattcaccgtctttgatttctacaacgcgattcttactaggacgcagaggaaccaaaacttccgtgagttggttaattatcatggtttaatttcatttttaaatttttttataacttctaataccatgtgtttaatatttgccattcttaggatttttcgttacgaacgcatcgtgctgcggagttgggacacatgatgcttatggttgcggttttcctaacgtacattcgaggctatgcgagtaccaacggtcttacctattcttcgacggacgtcacaacactgagaaggcgcaagagatgtttggtcatcttctttttggagccgatacaaatgttatccaaccgatgaacatccgtgagcttgtcgtttaccctgccgatgaacctatgcgtgagtcttgggtgcccccaacgtcagccaccgttcaactcagggagagccgcggttacgagtattactgagtctctaaaatcaatatttagggatcgatcggggtttctataagggttatgagtcaaattataactggatcaatatcggaatcttgagtagttttaatttccaatgttttcatgtttctctagtgagttttcctccataataaaagattgatctctgcaactcttaccccttgcaaatcttttatttaaaagaaacaaaacttttacataaatttatttcttttttttgtcaaccacatattaaaaggtaattccataattaaaaaaagaaggcacaagaagcgttttctcatcatcttatcttttggagcggacccaaatgttatccaacctatgaatgttcgtgagctcattgtgtatcctgttaatgagcctatgcgtgagttttgggaggatccaatggatgagaatatcatcgttagtccatgacgtcgacgtcgatgctagtgaatctatctaactcgtttagttcttgagctcactattttccatctctataccatgaacgagctcttggaatttgaaatgcgctgttattaatttgttgagatttaaaataataatgtaacctcaactctgttttttccataagaaaaatctcaatgagtaacgtgataaacctgacaatatgaaccaaagcgtgtccaatgacctgctttgtgctcagattagacaagtttcgggccacatgcactccattagaacaaaatgataaattttggtggaatcaatttaagaaggtagtggattcaatttgagaccttttttaccctctttttttgtttgcaattattcttgcaaggtaatattcgaaatgattggcaacaaagaaaataaaaagtagaaattataaagttccagaaaagataagtttatacatctggctttggggccggctatatttacagttaattttcatatgaaataaaaccaaaaatcatatatatagataatagatgaaccaaacaaatgaggcgttcttcatataaaacttcatcttcacgtaagcaaatgtgttttatttttatctagtttctgcactcttttagaaacaaaattgttcacctttctgtcgttctaatgattccaatcaaattgataattactagaacttacaaacgaataaggaccaactcttctgtatttgatatagacactctctcaaaacttaatcttctctaatcttcactgtaaatcttaaggaacaactctccacaagtttttataatttatatatacataactaagctattacctatactattaagattgtgtcaacgcaaaattgagttattctttcttatttaaatttgaactattaaaaatatgtaaataattaacgaaaatctttgtcaaaacactattaagaaaataatttcaaaaattaacatgatgataaaatatagattgttaattgttttttttaattgttttcaagtaatttaatcaataatatgatgaggatgattaaggaaattactataatttatcttttaaagaatatcttagcataggtatgagttgtttttgcaaaattttaataattgatttaagttatctaaacgttattaaaattattatccaaattatctataattatccgaacatattcgtctcttgtctattctggtagtgatattttatgtatctatattattcatatatcgtatcagtataatctgacttatttaaaaatatctatttgatatgtattttgatattaaaaatattttaattcgagttgtgtactcgtaaattatccaaaagttttagcagaaataaacatatctacgtatatgttggtgttgaaatttttttgttgaatttggctagtcagcaaaatttagttttatgcaaatggttactgcagaaattactgaatctggtttagtgttaccatttacaccctatatttccgtgaaatttgtatgtttaattctacttcttgcctctaaatgcacgatcttttcagcacttcgaagaggttaaagtgacttttacccgatgagaagggaattgtgtggcagatagaattgctagggaatctctttcttttctgaattatgatcccaaattgtattctatattgccggattgggttaaagcttatgtgtattcagactcttgtgtaattgtaagttgttgttgaaccaaaaaaaaaaaagcacgatctttcttggtactcgtagtaacaatagatattttgttgagaattaaaaataaagtagaagagaaaccagtaatgcgtcagacgtgattaagcgaactatataatataattgatcgataatcgtttgctagtgcgttaaataggtgtatagtaaaatgaacctcgcgctacacgttattatttgtatagtaaaatgaactattattttcattgccaaattgtagtacttgcaatataaatataacgaatcggtctacgagctaaggcacaaaagcaatcttcttctcttttcacagttctgtttctccctctctctaaatg

SEQ ID NO: 32155 - DNA, 3003 bp, Unknown
  misc_feature (1)..( 3003): 2750-1469P.txt file - cDNA_ID_3049532; gDNA_ID_1621122; Annot_ID_172118
aggatatatggtgagacggtttggatcaatattaatacggaatgatatactatggtaaaattctaaaattaaacaaaatttacaatattaatacaaaaaataacttaaaatttcagaaatttagttatataaatcatttcgagatgtatcatacataaaaaaaagcaatagcatatatctataaatcatctttaaaacaaaaaaataaaaatttttgagaaaaatataggctcgttgtgtacttcttaatatgtttatcatttataaatactattaactaaaataaaatctttaacttgttaacaaaaatataaatacgttgtgtacccggatgaatatctagttattaacaaaactgtaccatttgttttgtagaattttacttattattttattttttggaccaaaccaacttattatttattggcatgtctagttagggaaaatgtttcaattgaacatgtaccgtatgtgtgcatgtataaatagaaattttatgattggattttaataatgcaacgaatcgatgtgaaactattagtgtaaaaccacaatcgacgtcctttgagaatttactggtaagaagaacacagaaaaggatagaaaaggatctggatggatccaagagaaaccctcgcgtgagtaattaaccctcacttaaaccccaatcaccatttcaaggcgagaaagcaagttgtttcttgagtaatccaagttgtttctattttgcgattttaacgggtcaaagatttgctctaagggaaggaggtagaacagttggagccggtgtggtatcaaaagtgatgagctaagtcgctatagcagatttaaaagttcttcaaacgaaaaaacacaactgttctctagtatctaaagattcatctctcatgagatttctactactttgagagtttatatcaaataaacgagagattagtgttttaaaagaaaagcttctcccagtgtgatatcttcactttattctacaacctaacattgacaaattaacctttaagcaagccaaagaatggagttagaaactagactccaaatcatcagcattccaacattcaaccaaacctaagtgcaaccatggcaataactgtggcagctctgaagtaaacttctttgattcttctttccactttatttgagacttcttcttcgttgattgttttcctattgaaattaacaagggcttccctgagtctactcacagaccacgagagcaataccaaactcaaactcattgcaccctcgaagaattggtttgcgcaaaagggtacctgcctggaagcaacattacaaacgagaaagaagagcacagccataccagtgccagcaaagccaattgaacactgagtcaaaagctcgaagagttctccacgtgatttctttagagatagcattgtggtttttctatgttgttcattgcctatcatcagagagagaaggctctcacacgcatgaagacggtttcgttcgtagaggtcatattccttatctcttatcttcggattttgtttctttggtgaaggcttgagcctggttttcttcggactgttggaaatcgaaagaaacgttttttaaagatgcaaaagtaccaaaaactagttgatgatattagatacctctttggaggagctagtgtaactgcgtcctcgggtagctgcagagtgtctattggtacttcactgtcgaatctgcagaatgagaggagagcaaaaacttaatgttaaacccaaaaggatgagactcataggtatgaatcaaacttgcagtgaagaattaactaccgctgaaactgcgggacaagccgtgagagctttctccatcttgttgagttccttaatctatgaaactcagctgccgtagagaccaaatcattcaattcagctctgctacttgagaacagaatgttagcatccaccatgagatccaataacggctttgcatatggttgctgagaacttgatcttaaagcatctagacccatcaattcagataggagagacaaatcgaatccttcttctttgagttcttcttctgatctagacaaaaggaactctaacacctcctcttttcttgcatactgctgagtgatccccaagcttaaacacacagggtctggtccagtttctgttaaccacagttcatgtcagtcgaaaaaagggattacaatttggtgaattcaactgaaatttgatcaaagtcacataccatgaacatccatgagtctatgcttcatcatggttgaatcaaactccaaaaagtggttagacttactaaaagaagaaaaaggtttcaatggctccaagagttgtgatttcaggttaaaggagctctccggtaatatctcatattttcttcctccaggattcaccagataagcccggcttgtctgaatcattcatagacataagaaccaaacaaggagaagacagaaccaggacaagaattcaacgagagattctaaacccaagtgttttaaaacagagaaagtaaaaaactgaccttgatgatctcgttgcttcttagctcttgaaggagactaaacctaagtgttgaatagctatgagaagccattgagaaaaaactgacttcttatttttttttctcttcttcgtcacaaaaccatggaaacaaaacgaaaaagcttatcgtcagcaatctcgcctatatatgcgtcagatattataagatttgtgtaaatcttttctttattcagttttggctggtgaccaaaacacactttgagtttttaaatatttaccctttgaggcacttattacttaaattaccaagaacatacccaatcttttcaataattacataaatatacctttggtttcttatattctcgaaattaacccaaagatcattagggtacatacattctttactcgagagagagaagttctaaagtcctcaaatcccgcaaagctttttcagcttctttgttgaattgcgagcagaggtagaaatcagcaggaaacaaaaatg

SEQ ID NO: 32156 - DNA, 3000 bp, Unknown; identical to SEQ ID NO: 7017
  misc_feature (1)..( 3000): 2750-1469P.txt file - cDNA_ID_3049545; gDNA_ID_1621122; Annot_ID_172133

SEQ ID NO: 32157 - DNA, 3000 bp, Unknown; identical to SEQ ID NO: 7024
  misc_feature (1)..( 3000): 2750-1469P.txt file - cDNA_ID_3049549; gDNA_ID_1621122; Annot_ID_172131

SEQ ID NO: 32158 - DNA, 3000 bp, Unknown; identical to SEQ ID NO: 7020
  misc_feature (1)..( 3000): 2750-1469P.txt file - cDNA_ID_3049554; gDNA_ID_1621122; Annot_ID_172123

SEQ ID NO: 32159 - DNA, 3000 bp, Unknown; identical to SEQ ID NO: 7013
  misc_feature (1)..( 3000): 2750-1469P.txt file - cDNA_ID_3049558; gDNA_ID_1621122; Annot_ID_172122

SEQ ID NO: 32160 - DNA, 3000 bp, Unknown; identical to SEQ ID NO: 7010
  misc_feature (1)..( 3000): 2750-1469P.txt file - cDNA_ID_3049566; gDNA_ID_1621122; Annot_ID_172113

SEQ ID NO: 32161 - DNA, 3000 bp, Unknown; identical to SEQ ID NO: 7037
  misc_feature (1)..( 3000): 2750-1469P.txt file - cDNA_ID_3049604; gDNA_ID_1621124; Annot_ID_56347

SEQ ID NO: 32162 - DNA, 3000 bp, Unknown; identical to SEQ ID NO: 7037
  misc_feature (1)..( 3000): 2750-1469P.txt file - cDNA_ID_3049604; gDNA_ID_1621124; Annot_ID_172210

SEQ ID NO: 32163 - DNA, 3000 bp, Unknown; identical to SEQ ID NO: 7040
  misc_feature (1)..( 3000): 2750-1469P.txt file - cDNA_ID_3049617; gDNA_ID_1621124; Annot_ID_172196

SEQ ID NO: 32164 - DNA, 3000 bp, Unknown; identical to SEQ ID NO: 7041
  misc_feature (1)..( 3000): 2750-1469P.txt file - cDNA_ID_3049621; gDNA_ID_1621124; Annot_ID_172194

SEQ ID NO: 32165 - DNA, 3000 bp, Unknown; identical to SEQ ID NO: 7035
  misc_feature (1)..( 3000): 2750-1469P.txt file - cDNA_ID_3049625; gDNA_ID_1621124; Annot_ID_172192

SEQ ID NO: 32166 - DNA, 3000 bp, Unknown; identical to SEQ ID NO: 7033
  misc_feature (1)..( 3000): 2750-1469P.txt file - cDNA_ID_3049633; gDNA_ID_1621124; Annot_ID_172184

SEQ ID NO: 32167 - DNA, 3003 bp, Unknown
  misc_feature (1)..( 3003): 2750-1469P.txt file - cDNA_ID_3049650; gDNA_ID_1621124; Annot_ID_56326
ttttcaaactttataatagatatatttaaaatcgaaccgtgaacatgatattattgtagtgaatagaaaatttaggaaaacataaaattttgtcttatttcacttaaaataaataattgcatacagaaaaatatattttaaggattgttttgataatgttttgcaattcaagtgtaagaactggtggagcatgaatccaatagattccaatggagttatgtataaatcacaatgagattaactatatgaaatcatagttagggaaattaaagattaaggtttataaatgtattttggacaaaaagaggaataaaatacaagtaattaatatctttgcctagataacctcaatacaatttgaacttcaaatgaacttggatggtaagatatattatagaaaaagtttggagtagaaaattttgaattataattcctaatatttcaataatatttttttgcctatcattgtttcagtaatatctacaatatattctaaagataatttttggaaaaaatcttcattgatattatatataaatcacatcccatatttgaatgaacaaatatttttctacctatgaaaaattcaaaattttgactaataatatgcataacactactttatatacatttaaagtctcatgtttttctaaaataatatactatttatagtaattggaataaattcatttgaccctcgaggagatatattttaatataaattataaatattattattttggtactacaacaaggattaaaaccttattatgatattttgacatgtcgaaacatgttgatttagttaaaattgtgtggaaaaatttttgtttatgatatatcgtgggctaattaaatttcggtgtgttgcaatgtatcatactcatttcagctttcttagctaaatattacttgtacttcaatgactagtacaaaacacccaaataccatgaccttgcttgttttgatattctctaataaaacccaacttggtttaaacatctctaaaatctgacttagttccaagattgaccaatcatctaccttcttgagatgcagcctcgtgattatacttcttgactcttcatctagtttctttagatgtagtcccatgatctttcaatgacgtacgacttctctccacatatcatttagaatcttcattagatacctggagactcctcctctatgcaacatcgattgaactcccttgaagtaaagtctcctcctttatcggtacaaaaggttttaatagacaagccgacttgcttctctaaaactcttgaaaagcttttgaaccgatcaaaacttgaatgaatatgtcaacaaggaaccatcttgttcttgttgactgattcaaactcctcttcacatctttcctccattaaagcacatctttagcctcttggctcattacttgttgaaagttgacgtctcttacttttaacataagcttggtggaacaatccataagttgtttcggactgcataacatagtcttcaaggtaccgcgactgacttatttgtcgacccgaccttctcagttgtggtactccttgaactacttcaccaacctcattatggtattttttagtgatatcctccatgccatcatcttcttcatgtacttctccaacatcttctctgtgaatcaactccaatatgatataaccgagcatgtcatgtccttgtagcttcagtagaaagtccatcgacaagtgatgttggataattcctaacttgaagagcaagatatctccttttagtagatggtagaagagatacaagaaaataaaatacaaataacgtcaagttggacataatttgtaactcttccttttcaaatcatgactaaactctaaatttagatgtaatttagcttagtggtaggtcagagcaaatggatttggtttatacgtttgcaattatgtaattccatggatgtagtttgaaagaccaaacttcattacaattatgtgtatcaatttattttgcttactcgtatctattttatcactagaatacaaagattttgctaactccaaatctattattttcagacaagcatatcctgtaaatcttcaatcatccaaaaagtgatgttgagtttagatccaactccaaaatgtatttatcttatttttaagtaaaaaactgaagaaatgagtttgcgaatcttttaaatagttattttgtataatgcatattagagaaagaacaaagataaatttttgtatcaaatatttaaactgagttaatggtggtttatgaagggtgttatagtgcattcactcccttatataatcgatatctctaatcccttggtaaaattaaattgttgtattgaatttttttatgaaagagtaaggtgagttgcaaattttgcttggcctcaaaaattcttctctctattttttcatttacatgtttgaagtgttactttttactttgctaagatatttcagtgttactttttaatctacatatttcattgttattttttaatttacatatatcaatgttatttttccactcagataaggtgaaatatttcagctaacttaaagtgattatgatcatcaacacctatttcatgtcaattttttgctaaaaaataaacaaattggtcataatgttcaaaaacttgacctcaccatcataatacttagtacttactggtcaaacaaacatatgttcagaacttttgtattgatggggaaggttacttttgtcgtaatgttacaaaaaaaaaattgttactgttgagaccattataaataatcatgtcatgttctttaattatcaactttgattgtcatttaattgtaaatttcgttagttaatctgtcctcttcttgtaattaaataaaaatttgtttcaataccaataaagttgtcctaaaaaaaaccacccctctaaatagggagtgagtgagagagagagtgatagtgagaacaaaaaaaaaacatcatttcttctcgcactcttcacctgctccaatg

SEQ ID NO: 32168 - DNA, 3003 bp, Unknown; identical to SEQ ID NO: 32167
  misc_feature (1)..( 3003): 2750-1469P.txt file - cDNA_ID_3049650; gDNA_ID_1621124; Annot_ID_172167

SEQ ID NO: 32169 - DNA, 3000 bp, Unknown; identical to SEQ ID NO: 7071
  misc_feature (1)..( 3000): 2750-1469P.txt file - cDNA_ID_3049654; gDNA_ID_1621125; Annot_ID_172267

SEQ ID NO: 32170 - DNA, 3000 bp, Unknown
  misc_feature (1)..( 3000): 2750-1469P.txt file - cDNA_ID_3049664; gDNA_ID_1621125; Annot_ID_172251
acagatgtccaaagagtcggtttagtattagagcatctgcaacatcagttacctataataacagaaacagtagccgaaaaaatcaagatgtgttgatccaaagatgatcactttcaagaaaataaatatatgaaatagtgtacataccatgaactcatctagacatagtaagattgcatcatgagctatctcttgggcaacaacttcaagtggatctgataaacccttgtgcttctgcaaacattatgaaccgaaatcaaacaacgtatctcaaaaggctaaagcttttcctactaaaatcaatagagaaacaatggaaactcaattatccatacttgcaagcggctatgaacactcaacatgaaatcatggaaatgtatcctctgcttcttccaagtacaaggcctaatgaaacaagagaattgtcatgaaaccgcaatgctcgaaaaaaaaggataagaatttgatcatacaaacttacagttgatcaaagaataagtccatcaacatggtttttcctgtacctacacctccataaaggtataatcctttgacgggtgagtaagaagtctgtggcatgagccgagaccaaaaccaacgacttctgtattacacaaaaacacagttgtgtgagactcaagttctcaatcctaaacagagaaggaaaggtgtcaaggctaagagaacagaacaatcaccttgaggatttatcagaagtattataccgatctaaacgacatgtatctactgaatccacaagctcatcatatagtctctgaagctctctcaatgcactaatctacaacatttcaaacacaaccttaagccgcaagtaacacgaatcacatttaatcttatagctcaaaagcttcaatgaagtaaaaaagagtggctattatttttatcatacttggcagatatcaccagtcatgagttcaccattactgattcttctctcatactcaacaagaggacctgttctattcacatctgtcatcattcaacaaatatcagcaaaccaataaacacgaactctgagattgatagaatttctttgcaaagagaaacaaaacctgagacggtgaccctagtagtagcaggatcagctgcttctactgcttctgctgataagcctctaaagatacttgaccttgaatacaaacttgaattatcagtgtttgtattcagcagagcttgattttgattgacaccgatcaaaagtttgcggcttttggagtagaaagttgaagaataacgttcttgattgttccttagagcccatctaattctactgagagatgataacctaatgattggtctcatctacgatcaatgcaaattcaattcagcagctgaaactttgagatacggaaacagagcaagaacaataacccaagaagaaaaacagaatctttgtatgagagaaatcggatccggataagaattagagcacaagaggaaaaagtgaatgagaatattgaaaagttaagtttgatgtttatatgtaatgacgatgataaatctggataagagagatagagagagacccaagaataaacggagatgtagtcaaataaggaagatagagaagaagatctttaactgttaaactcttaaaacagagagatagaggcgtgattaatgagttatttatcaactaagacacgttttttatttttttatttttatatactttcaattttttaaccaaaattgattgtgttgtacttctaattacatttgttaatgttgattgcatagttgttttccaggtcattagaggattgtatttgtcccttatttaagagagttgactatttttattcctatgaaaaaagtaatttcttgatatatctttaccctaatgatgtctacaagtcaaattacaaattttataaacaatttttaacatttgtaattatagtatagaatattggaaacggaagcttctcgatgttgcgtttgcgtacaggatactggtggacctagcgaatgtgtcccatacataggctaagcatattccaagtgggagagagatacgtgaatcagacatggtccttaaagatgatccaacggtctataatttttctagttttgttctcaatgggtaagttgaacaatggaccttaatgatgacatgttgcattgcgtatgattccacgtgtccacgtcatttcttacactgcaaacatgtctttttctgaccaacccctaacgctacttttctttgatacatctttgtttttgctataatggtgcttgttgacaaaataatactatgttgaattgacctaaaaccatactcagattgggatatccgagaaccattgtgtaagacgtgatgtttgatccaaatatgggctacactcaaatattggatataggcccacaagatatgatatcttcatttttttttgtctatagaacaacataaaacagggaaaaaaatttacactacttttgttcttgttccgttataaatatcgttttaccgattgatcatagaaatggtatactttttagtttttggaacagcggtaaaaggttttatgttgatgtcttctccgagcgccggtgattttcacacagaccttgttattggaaaactgaaataatgcagttttctgttgataggccttaagatgtcagattttatgggccttttaggttgttctggcccatttagatagaactgtttcagttttccaacaacaactgataaggatagacgaaagcccaaattaagaatctttgtcctaaacccaaggaaaagcgtaattacgacacgcagccaaacaaaacatttcctgcgtgaaaaaagtatttgagaaaagaggacgacaaaaaggtacaggtgtcaatatataattggattaaacaagcttagacacctaaaagttttctctcacaccatttgtgaagatccaaagcaaaagaagaattacagaaactgaaaaaactatcttcctcgtctctttgatcattctcttttaactcatg

SEQ ID NO: 32171 - DNA, 3003 bp, Unknown; identical to SEQ ID NO: 28968
  misc_feature (1)..( 3003): 2750-1469P.txt file - cDNA_ID_3049664; gDNA_ID_2926198; Annot_ID_201600

SEQ ID NO: 32172 - DNA, 3003 bp, Unknown
  misc_feature (1)..( 3003): 2750-1469P.txt file - cDNA_ID_3049668; gDNA_ID_1621125; Annot_ID_172249
acgattttgtcataagttttatcaaaccatgtgtgcgaataacatattatgaaagttaattagggcatttatgtaatatatatgtgaaacaaagtacacagatgcatgcatgatgtaaatggatcattgatataatgtgacataaaaaaacaaggtaattggttacaaagcatctcgatgcttacctcatcttgctcaacctaattcggcattttttgccactttcaactccgtacttctttatggtttgtgacattttaatgttgtcattcactaacattttcggtgaacacaagattcattttctttataaaaagccatacaaaatttccaataacacttgttttttgtagtcaagacctttttcttttccttattgactacgagtttgagtgcaccgttacgcacgatgcaaatgggcaatgcatgattgattatttattagtaagtacattttaacaaaaacttaaattcattttctagcatatttaccgaaaactttatcaaaaaacatacattcgaaacgtgggggtcatgaatgttcttgcagtaaagtaagatgtgattgaaagggaaaaagatagaaaagtaataaaataagataaaaagacaaagatgtaattattagacccttcaattaaattaatacgaaagtaggaggaggtgggccaaaataatgacaaagaaattagaaaggcgaaaaaggaaagaaatcaaaagtatagggacttatcataaataatgtaacaacacaacctcatcagggcaagtgtgtggattcacctatttcaggcatttgttacttgttgcaagtttctcttcgtatcactatctcatgttgtttcgttttgacatatttatacaataatttctttatatgcgaatcattaaatatcattatcattaaagttcaaatttaggtagggagatatcaaatatcaaatttcatcttatggtgaaatactgttttcattaagatggatttctttagagaagaagacaaaagaggaaagaggatgaagctattttagagtgcatcagtcctctagcctgtcactggtagtcctactacattacatcaatgttctccaatttgttttataaaatataaattatttttttacacataataaaattagaaaattattgaatgtaaacccaagtcgattttggtcaattcatcgtccatgtacaatatgcagatgtttctttttaaaaatctttatatataacttctatgtaaatttttttttaccccttctgtaccatttgctcttatcatagtttagcttaccgtttaaccaatccattttaatagaaataatagatctatcatgccggtaaaaattaccaaaaaatattgggtttagttgttaactaaggccctgtttgtttgatcagttagcatttgcattctaatgatccatttacatgattcatttgaatggtttatttgaatatgtttgtttgattatttgatattttttctaaatgatgcatttaaatgaatatttttttatttgattattttgtaattcatccacattttcatttagataaaaataactaaaatactcatgctttcactttgacaaatgaaagtattttacggttttggcgggaaaaatgattctacggttttggcgggaaaacaaaattttgcggttttagcgggaaaacaaaattttgcagttttagcgggaaaacataattttgcggttttggcgggaaaacatgattttacggttttgacggaaaaacatgattttgcggttttgacgggaaaaataattttacggttttggcgggaaaacatgattttacggttttggcgggaaaacatgattttgcggttttggcggaaaaaataattttacggttttcgcgggaaaacaaaattttgcggttttggcgggaaagtatgaatttaacgttttggcgagaaaaatgattttatggtttttgcggagaaaatgaatttacaattttgacgtaaaataatagtccgcgatttcatgattcttagaatgtttttttggtttaatatgtaattaaaatttttatattaaattagaaagttatagaaaattaacattattaaaagagggtatatttgtcatttgttgtttttgagtaaaccatctccattcaaatggtcctatcaagtctatccaaatgagtttcataattttgcttaatttttaaaaatcattgagatggatcatccaactgattcatccaaatggtctcttaaattgtcaaaagcaaacatcatttttcatctccatctaaataatccatctggatgaagaaacaaacaggccctaagtatcgtaattatataccgctttttttttttttgcgttttacatctattaaattttttgtactgttttaaaacttagtctaatttagttttaaaatttatatgtaatttagtctaatttagttttatatctattaatcggacttattaagactaaattagaaaaacatatatggttccaaatatacaaaaaaattggcattaagaagaacaaaaaagacaaagaaaaagagtgagagagagactggagtagaccagcatccaccatcccgggtccgacagtccgtatcagcatcccctgattcactctctacaaatgtcactctcttgcctctctctccctctcatttaaacgtttttcggcttaaaccttttctcagcaacaaactcatctcctctgagagagactgtttgtttgagaagaagacgaacgtaaagacttgtttactaaacccgagatttctttctttcttgttttcaaaataaaaaagcagagatctcttctccttcttcttctttttgctttgtttgcttttgctttctcttctttttctatgtgtgtttgtggtcactaccccgaaaaaaaataaagtaatgctgtctctcttctcttcaaaattattgttaacctctcgtaactaaaatcttccatggtagtagtaacaaagaagaccatg

SEQ ID NO: 32173 - DNA, 3003 bp, Unknown
  misc_feature (1)..( 3003): 2750-1469P.txt file - cDNA_ID_3049718; gDNA_ID_1621126; Annot_ID_56367
gctaatatttttgtcgtccgacttaaaactatataagcatcaatgttttggtgattacgaattagcaaaaacacaattttcaagaaggaaaaaaaaaatatttcacagtaatacattagacactcaatgacagctaactgtaaacaaaaatacaaaacacaaaacagtgtaatacaaaagaatttttatgtataaaatatgtcggttattaaatatccaaaaatgaaaatgtacttggatgttacagctatgagacaactactaagataaagaagaaaaaaaaaagggaagcttcgaaggtgggctttggctttgatacagacgtgcacagatcctttcccatgtaaaaactttgataattctgacgtgtaatttttccattggtaaaacatgttttgactttttacttacgtaagtggaaacgcattttgcaaaaaaatatcatatccctcgaaacacttatccattcacagaaacattctgatcctcgtttttagttaattcgtgtcgaactctcattggttcatatttacgagtccccacacctttagccgacgttggtgtctgtctggataaagaaagaataaataaaacgtttattttctataaaaatgttttgtttactattttcacaattttacgaaaataagagaaaatggaatttttttttttcgtgtggcggaaagtattgtagtattattttttctcttttgggggaatattatcaaagattcaagaatgtatttatttatggaaataaagaaggtgtttgctttttttgtgtgttcttttaaaatctttatataaaagaaaggtatctattgtttggttggtataaatacgcatgcgcattggctttttcgagtagaggaagagactagatagagtcgtgattttttttttcttttttaaattatcaaatggacgtgaaattatttattgaaaaataaacaaaaaaaaaaaaaaaagaagaagaaagagtctatcggatacgtcggatccaatctcccaatccgcattggctgtcgagacaacgtggatgtaaaataaggctttaagttcaagatcatttacctcaaagccactgagcctttaggttaataacgtcctaaattggctaatgtcttcttatgacatactcaaaatctatttttcttggtcgtcaaaattcaatactaatgatgtatatagatgcatggttcattcacaatatagtgtacttggttttttatgcctttccagtttcctataagtatgtatctatatagtatttgattttctaatccttcatataatcttaataaataatattgagttcaaacataagatatttctttatatatggatagagtctctagttgatcgtgtgtaggtgtttcatctttgaccagtggataacgatcagattatttaatttgaaacgttgtttccactttgtagagcttagactctatgtcactatgaaacgacttgtcaacaaagcattttgagccaaataatttaacatataacttggttaaaagacgagtttacgattattactattcttaaagttaaattatgtaatattttcagatttagttttcagtagtcacatgcttaagaacattaacatcagaatacaaccataatgattaatgagagatgtatgcaaaatatatcaactaatcatgttaaaaagggttgtaccattaattagtgatgcttatctgcttcattaagataataattaattttcaggaaaataaaactattgatttgaaattcttttacaaaatatcgatgaaattaaatcggcaataataaccaaaaatatacttttaattataaatgtgaaaaagggggacctcattatatccataaaaaccccagacaaataggtaagatacaagttgctaaatttaattaaaatcccaacaacaacaacaagattatctttaaaatacaatccatcctaaaccaaaaacaaaatttggtccaccatataaaaaaaaacatcatatgctaatatatagtttccatctaccaaactcaaaataaaagataagaagataagaagataaaaggacattaacgtaattttaatcacagcgtcccaagaaactaatccaaaacattatcgcgataaaaccgtacagagcaaaaagctactaataatattattattgaaataaaaatagatagaaaaaatagatcgttagaaaacgtgtatatatatatatatctgtgtattttgcaatatatcgtttttttttcttcgttatcgcattaatctctctctctgtatcttctcttgagtggagcgaatatccaaaagagttccgagtttctttcatccttcacgagcttatactttttcttctccattcgtttgtttttaacgatcaaaaacaacggcgaaggttagtctccggcggtttcttcgttgagatgtgacgacttttttttttgaacgtttataaagattacatattcatgtatttagatttcttttgttatgttaactgtttcattgatgttcgagttaattttaatttgactcaaacacggtaatttttttttaatcttgatctgttttgttacgtaatttttgggttgattttagcctgaaatgatgattttttttctttctagcttatgtttttcgtgaatcaatctttttcaatataaagattagtattttgttgaaattcattttttatttgattggctatgaggaatcagtttcttgaaatggaaatggtgatttgatttgatatgttcacaatatgaatgaagaagattagggttaatttatatatatgaaacaagaaagtttgtttatttaaggtaattgatatatttgttttgttgttattgccatttttaaggtattggaaataagacagaagctgttagctctgtttctccatggtgtcaagatcttgtgctaattttctagacttatcatcttgggaccttttagattttcctcaaactccacgaactcttccacgcgtcatg

SEQ ID NO: 32174 - DNA, 3003 bp, Unknown
  misc_feature (1)..( 3003): 2750-1469P.txt file - cDNA_ID_3049718; gDNA_ID_1621126; Annot_ID_172319
tacaaatgtagtctggttggtataagccttgttatgtatgtacgattgatgtcgtagtcaatgtagttgataccgtacaattcgatctaagctaatatttttgtcgtccgacttaaaactatataagcatcaatgttttggtgattacgaattagcaaaaacacaattttcaagaaggaaaaaaaaaatatttcacagtaatacattagacactcaatgacagctaactgtaaacaaaaatacaaaacacaaaacagtgtaatacaaaagaatttttatgtataaaatatgtcggttattaaatatccaaaaatgaaaatgtacttggatgttacagctatgagacaactactaagataaagaagaaaaaaaaaagggaagcttcgaaggtgggctttggctttgatacagacgtgcacagatcctttcccatgtaaaaactttgataattctgacgtgtaatttttccattggtaaaacatgttttgactttttacttacgtaagtggaaacgcattttgcaaaaaaatatcatatccctcgaaacacttatccattcacagaaacattctgatcctcgtttttagttaattcgtgtcgaactctcattggttcatatttacgagtccccacacctttagccgacgttggtgtctgtctggataaagaaagaataaataaaacgtttattttctataaaaatgttttgtttactattttcacaattttacgaaaataagagaaaatggaatttttttttttcgtgtggcggaaagtattgtagtattattttttctcttttgggggaatattatcaaagattcaagaatgtatttatttatggaaataaagaaggtgtttgctttttttgtgtgttcttttaaaatctttatataaaagaaaggtatctattgtttggttggtataaatacgcatgcgcattggctttttcgagtagaggaagagactagatagagtcgtgattttttttttcttttttaaattatcaaatggacgtgaaattatttattgaaaaataaacaaaaaaaaaaaaaaaagaagaagaaagagtctatcggatacgtcggatccaatctcccaatccgcattggctgtcgagacaacgtggatgtaaaataaggctttaagttcaagatcatttacctcaaagccactgagcctttaggttaataacgtcctaaattggctaatgtcttcttatgacatactcaaaatctatttttcttggtcgtcaaaattcaatactaatgatgtatatagatgcatggttcattcacaatatagtgtacttggttttttatgcctttccagtttcctataagtatgtatctatatagtatttgattttctaatccttcatataatcttaataaataatattgagttcaaacataagatatttctttatatatggatagagtctctagttgatcgtgtgtaggtgtttcatctttgaccagtggataacgatcagattatttaatttgaaacgttgtttccactttgtagagcttagactctatgtcactatgaaacgacttgtcaacaaagcattttgagccaaataatttaacatataacttggttaaaagacgagtttacgattattactattcttaaagttaaattatgtaatattttcagatttagttttcagtagtcacatgcttaagaacattaacatcagaatacaaccataatgattaatgagagatgtatgcaaaatatatcaactaatcatgttaaaaagggttgtaccattaattagtgatgcttatctgcttcattaagataataattaattttcaggaaaataaaactattgatttgaaattcttttacaaaatatcgatgaaattaaatcggcaataataaccaaaaatatacttttaattataaatgtgaaaaagggggacctcattatatccataaaaaccccagacaaataggtaagatacaagttgctaaatttaattaaaatcccaacaacaacaacaagattatctttaaaatacaatccatcctaaaccaaaaacaaaatttggtccaccatataaaaaaaaacatcatatgctaatatatagtttccatctaccaaactcaaaataaaagataagaagataagaagataaaaggacattaacgtaattttaatcacagcgtcccaagaaactaatccaaaacattatcgcgataaaaccgtacagagcaaaaagctactaataatattattattgaaataaaaatagatagaaaaaatagatcgttagaaaacgtgtatatatatatatatctgtgtattttgcaatatatcgtttttttttcttcgttatcgcattaatctctctctctgtatcttctcttgagtggagcgaatatccaaaagagttccgagtttctttcatccttcacgagcttatactttttcttctccattcgtttgtttttaacgatcaaaaacaacggcgaaggttagtctccggcggtttcttcgttgagatgtgacgacttttttttttgaacgtttataaagattacatattcatgtatttagatttcttttgttatgttaactgtttcattgatgttcgagttaattttaatttgactcaaacacggtaatttttttttaatcttgatctgttttgttacgtaatttttgggttgattttagcctgaaatgatgattttttttctttctagcttatgtttttcgtgaatcaatctttttcaatataaagattagtattttgttgaaattcattttttatttgattggctatgaggaatcagtttcttgaaatggaaatggtgatttgatttgatatgttcacaatatgaatgaagaagattagggttaatttatatatatgaaacaagaaagtttgtttatttaaggtaattgatatatttgttttgttgttattgccatttttaaggtattggaaataagacagaagctgttagctctgtttctccatg

SEQ ID NO: 32175 - DNA, 3003 bp, Unknown; identical to SEQ ID NO: 18299
  misc_feature (1)..( 3003): 2750-1469P.txt file - cDNA_ID_3049724; gDNA_ID_1621126; Annot_ID_172314

SEQ ID NO: 32176 - DNA, 3003 bp, Unknown; identical to SEQ ID NO: 18300
  misc_feature (1)..( 3003): 2750-1469P.txt file - cDNA_ID_3049728; gDNA_ID_1621126; Annot_ID_172313

SEQ ID NO: 32177 - DNA, 3003 bp, Unknown
  misc_feature (1)..( 3003): 2750-1469P.txt file - cDNA_ID_3049743; gDNA_ID_1621126; Annot_ID_172303
ttcgcaagtgtaaacgcagataattcaccgataaccgcagatgaagcattcgaagacggtcagatccgaccggtttatcctctgtttaaccggaatattttcttcgatgatccagaggaaaaaactttacgttcacctctcaagaaactcttcgttgaatccacaaccacagaagaagaagaagaagagtcagatacggtgggtccatattgttcatggacaaatcgtacggtggagcaagcatcaccagagacttgtcggaaaagtaactcaacagggttctcaaagctatggagatttagagatcttgttttgagaagtaacagtgatggaaaagatgcgtttgtgtttttaagcaacggctcttcatctacatcgtcgacgtcgtctacggcggcgagattgagtggtgtggtgaagtcgtcggagaaagggaaagagaaaacgaagacggataagaagaaggataagatgagaacgaaatcggcacatgagaaattgtatatgagaaacagagcaatgagagaagaagggaaacgaagatcgtatcttccgtataaacatgttgggttcttcactaatgttaatggtttaaccagaaatgttcatccctattgattaaaccgatctgtcgtaccaaaatctctaccgacaaatctttgccttttgtatatatctaaccttttttttggtttctgtgtattataaaaccttctttttgtaagtaaaagtgaaactttacttattaacttttcgtttgtatcatttgattagttttttttcttctttgatgtaaagtattttttgattttgaaagtagtagagaaaagattcatcgatcttttttggaatttaagtttgtcaataatatattttggtatatcaaaatttgtccgcacgttaatttttttattttttttattttgaaagtaggaattaattttttactggaataaagtaaaacttgttcttttaggcaatatattatctctatctaattgattaacgatggccgcagatatgtaaacacacatttttagagatggctataaatgatttcctgaggcatttatttttgatagcttagtttttacaacttctgtttaccgacactattaagttaggtatcaaattatttaaacatagtaaaagtacaaacctgtattggtagtgacaagtgacaacacattacacattatacatcacaccaaactcaatatgcctcctaatacaagagtacatacagctatagctttaaaagtgcttatattatatgtaagagggccagataaatatttgggccaaagtaagaatgataggcctataattcgggtccaggtgactaacaccattcagaaatagtcatgccccattcatcatcgaaaggtatttgaagtcaagtgagagtttatgctgatgaatggggcatgaattgaaacatcaagcccaagaaaaagtactggttgtgaaaattagcaattttggttgttttaaatctaatagcccattacatgaaaatttgtagtgtcgctaaagttatctttggtttgggttgttttaaatctaatagtccattacatgaatgagaggtgcaacttgcaagccctattaacggctagtcatgaaattacaacattaccataaatttatgctatcctgatctgaatttatatagtctaattttcgaagcgaaacagatttcaggtcttggataataatttcatcactacttcgttcatacattagtttagatccaaaagatatacaaaatttatataattagtagaactgttgacaaataattattaaaagtaataaatggtctgttatagaaatttgattttaacttttgttatattagtgaatttactttaaatagtagaacaagttataataaatatgaaagcatataaaaagaataaaatctcatgagattatcttctagcatagttttagtgttttctcataatgtcaataaatatttacaggtcttattatgatttttactaaataaacagcagaaacaaataaaaagaaaaaacatggaagaagaagaagaagaagaagtccagcttcactcacctttcgctttctctatcccataacagaaacccccacattgctcgaacggtcgtcataattccttgaaacctcgaaaatccaaaaacccatatccaatcttcttcccatataaattaagatttttatttatttatttgtttacttatttcaattcccaaaatcctctgcctcatcatcttcaaactgttaccacgtccatagggttgtcgaagagctaggaagagccttaccaagagcttcttcttcccctaacatttaggtatttcattcgtaatttatcttctttttaatttaattattgtcgattaccaaaacccttttttatactaaaaaactgaatccatttttccacactaaaaggagaacacaaaaacttcatttcaagttcatgtttgaaaaactaagaagtgtatggtttgtttgttgacaattaatgagcatttttttcccaaaatacgttagaacttaatatgatagaataaaacttgaattattcatggcaatgagtatagtcatatacaataatggttgatggaaatgaaccttacggtccaatgaaaagccagcttgcgttacttgagcatttttaagccccaaaaaagtttgaaaatatgtataaaggaatattttatatatggaactaaagagtcagagaaccattccggatttagatcatccatctattttaatttgttgtgattcagccatcgcattattagtcttcagaatataataaaattataattcagttatgaatttaataaattgaatgccgacgtgagtagttaataatgtagtcgattgtaagtaacaatgagaaaactcctatactttatttttagatgtatttgtaataataagattacgggtttggactggacaggttggtaggagaagcaaaggaagagatcatttataatg

SEQ ID NO: 32178 - DNA, 3000 bp, Unknown; identical to SEQ ID NO: 7101
  misc_feature (1)..( 3000): 2750-1469P.txt file - cDNA_ID_3049760; gDNA_ID_1621127; Annot_ID_172360

SEQ ID NO: 32179 - DNA, 3000 bp, Unknown; identical to SEQ ID NO: 7103
  misc_feature (1)..( 3000): 2750-1469P.txt file - cDNA_ID_3049763; gDNA_ID_1621127; Annot_ID_172356

SEQ ID NO: 32180 - DNA, 3000 bp, Unknown; identical to SEQ ID NO: 7098
  misc_feature (1)..( 3000): 2750-1469P.txt file - cDNA_ID_3049777; gDNA_ID_1621127; Annot_ID_56380

SEQ ID NO: 32181 - DNA, 3000 bp, Unknown; identical to SEQ ID NO: 7098
  misc_feature (1)..( 3000): 2750-1469P.txt file - cDNA_ID_3049777; gDNA_ID_1621127; Annot_ID_172341

SEQ ID NO: 32182 - DNA, 3000 bp, Unknown
  misc_feature (1)..( 3000): 2750-1469P.txt file - cDNA_ID_3049834; gDNA_ID_1621128; Annot_ID_172382
cacacgcctaaaaacacttagtcatagacacacgcctaaaaacacttagtcacacgccaaaaaaaaaaaacacttagtcataaagaactcacgcctaagaaaaacatacttggtaaaacactatatatattcaaccaaatcactttagtaacaattagtcattaccttgcgtctaaaaacgcactttacaatttacactaaatcaattgaacaaattcactttagttaacaattagtcgaaccacttagtaaacacttagtcaatatccatttaggggcgacacatttaaaatttttttaactcaggcacttattctttttactcgtaacatttgaatacctaatcgtaccacttggtaaacacaaaatcaatattcatttaggggaaaacattattttcctactaaacgaaacttagtggaaggcttagaaatatgataaacaccctttggaagaaatgtaacgctagtcacttccaagtccactttcataacatgttatagtacttaataaggcaacaaattattagtccgaccactttaatcaaaacacgagtgatttaaactcaagtagtcaaacaaattagtccgaacattttagtcaaaacacaagtcgaaacattttaactgaagtacatttcagcattaagatcgtaactgtagcaaagaaaataaacaccttaatcgtaataacaagttgcaactgcaaacaataaacacattcgtcaaaatactattgtcgtaccacttttaaatcatttcatttgattatcagtcgaagcgctttgctcaatgtagtcgaaatgggagcatgcgttcaagcagtcaaaattcactccaaatcgtagcactccagtcgtaacacctccgtcgaaagaaagtgaagggtcgaaaaagggaagctatttttagaaacactttgaagtaaatatgtaatgtcgttgtttcttctttcatttccgttgtagactttcgttctcctcctttactgttttgttatgttatggcctgtctttctgtagatttttgttaagaaacctttcaataaattcgatttcttgtgttttaggttacaactctcgacccttatatatggctgatgagcttcaaaatagagtaggaccctaatacacgttttagaccgttattaacttaccagccaatttagcttgatctttttccgtttttgtattctttgtaatttttgacgcaacttcaatatttcactctttgaattatgttgttcattagttgaactattttacatagataaaattaataatattttaagatagaaaaatttatagcaaataatttatgtgtccaaacctagaaacattagataaaatgaaatagaatgagtaataaacaaaaacccaaaacaagaaaactatgttagttttagaattgaactaacacgttaacaaactttattttaaaatcaagaaactttttttttaaaatcactgtctttaaaaatcaacagattttatttgaacttatcactgtctttgtcaaaaaaaattgatgtaaactttattttaaagtcaacaaacttttttgtaactttaaaaacaaaatatatttttcttttaaccaaacagtgtattcgcatggaaaattattctaattatacaaaatactatataggaacggaggagaacacaatttaatggtcagatctagatctcgtcggtcatccacctttcagttttcacgagtgtgtcgaacgaacgatattaattaaaaactaatcaataaactgaataagtacaagttgcatggttaatgaagtaaatcaccgatttgaagtcattaaaccgaccgacacaatgaataaaaacgcgttcacggattttattccgtgttgatgggcagtgacactgacttctcccattaggcaactgtaattttttctcgtcactatttttcatagcaaatctaaaataagttgcaagaaattaatttgatatacaaaaaaaaagaaagataaacaccatgtgggggttgttgttaatggtggaattgaaaacgcattaagtggaaatctaaatacaaagatcatgaaaaatctaataaaatatttgtaagttgtaacaatctatatgtatatctttgctccaaatattaattactagacaaataaaaataagggaaacaaaaagatttaacagcaagtcgacagtgtggacatggaaagagacctttacaacgaaaacaatgtacttatcttccaattataggaataaacatttcgccagtgaaaaaaggtctcattccttccttacttgtggagatggagatctgaatctctaaagtttcgatttttatttattcacttttatgcccaaaaagaaaaatcgttactttaaagccaaaaagaagaatacacaaacttcattcactctctcccattctcggatctctctcagtgcacagtggttgtcactcttctcctttggtcggtgagttttcaatcttttttcctttcttctgcgattttcattcgttgagattcgtattttgcttccttctcattctctgagatattcgttaatcaatgagcggtttttttacttttcctgggaaattgagtgagacttttcattaaaagctctcccgataaaatggaaactctactctcagatctactactactttctatttaattgcataaagatccaatctttgacaaaaaaaataattgtcggtggccatttttataacacttgtgttacttacttggtttacacttaacttgggttctgaatcaagagtgagtggtttctgacccaataaacacggatctgactctaccaagtctgaatttatcatgttctgtttattttaagtgccagtggctttttaccaaactctatgcttaaagtcatattctttataagtgttctgttcttgatttctgcagaaactctttcttggaaagagcattttgttatcaagactctgaagagctcttttgggaggatagtaaggttggatg

SEQ ID NO: 32183 - DNA, 3003 bp, Unknown
  misc_feature (1)..( 3003): 2750-1469P.txt file - cDNA_ID_3049838; gDNA_ID_1621128; Annot_ID_172374
cattagttaaactatgtatgttcgttcattctttctgtctgagaaaagaaactcgaaagtataattcttacccttttttttgtcattcttttcttttattttttctgattacaaattcttttaaagtataaggtaggacaacgatgtacgggccattctatttgcacgtacgatagatgtgttctttatgaacaaaaattagtcatagccgaaaagtagtattctcataaaaagcatatttagtattctcatttctcaacaattaacatagccgaaaaaagaaccttatatgaacaaatcattggtcatactatattttcattttttattaaaaaaaattagacttccgatttatataatattgtctgagagtttggtattataatatatttgtgatagctctgcaaaacttaaatcatctcgtttggaaaatgcgtgtgtgtaacactgcactcaaaggccaaagcttttgccgaagatgctcatatatatctccaaagtatcgattcatcaaatcagctttgatctcaagctgtttctttttccttttgccaccaagttgctatttttttctttctcttcattctgttctcgttaaatgatttcttgcaacctcattaatttccaattcttaaacgtatgaccatgtttattttatcacatactgtatataagtttaaaaaattgcctgagtggtgatatgtattttatataatacatatagtatatgtacatattgttaaacaatttgaatgaaataaaattttggataaatatcaggagaaaaaaaacttagatagtcatgctaatgatttcaaataatgcttcatagagttggggaccaaatagaatgttgataagtgatgtgatgatgtcccgttcccaaccatgaccaaaacaaataaactaaaaaaagctagaggagaacgaaaaaaaaatcgtcgtaattacaatagtaattaattaatgcgtatagtcaatgaaagttgtttttagaagttttgaagtgaagggatattttgaacttagctgagtaatagtccatgaaagttagattattcacctagctgacattttttcatagtttgggaattctttatacgaaaaaaaaagataaaataaaggtaagaccatgttcgtaaaaaattgtagtttcatatatggtgtttttttgttaaagtttcatatatggtgttgatgactatataatctataaatcacattggtgtacctttatttacgttatctaagtcgatatatattccgatctataaaagtatcttttcatttgtatgatcagttcattatttggttatggttgtaaggaaaacaacatatatagaaaacgacaactcgaagcatggtatgctaaaactatcactgtaacgaatttttatcgagagaaaccatcttgatatgaaatttgtagtttccgaatttaactaagcatcacgtaacattttttttcccctcgaaatttccataaaataaatacatttgacttagtacgatctttatctcttattttcaaaattttcactgacctggtctctttttctccttctcttcttttccacttcttaccagcatttaaaaaacccaaccaagtaaataaatagaaaatgaaaaattaaattgctaaaaataaaatagaaaagccaaattctataaatagaaggcttaatttagcacaagtttcagtcagaaagtcaaaaatcatcgcgacaaaaagaattgggtcaaactcctttaccggtcaaccaagtcatcacttaggtgggactattttctccacgtcaactaattattccaatcgttacacgccacgtcacgagaataagaaactccaggaccagcgcgtttaacgtcaattgccacgctggcatttttcttattacattttgcatacatacacatatagatacacatttaaaccataagtataaataaattggttacgataacttccataaccttcattagtttctccagaagaaacctgtaagaaatttctttctcttctctgtctttaaacagatttttattctgttctgtttgattaattattatctcttttgttccagtattttaattctttagattttcttgttcagacatcactagctccactaccacattcaagaagcctccttcaataatctttcccttttcctggggaattttctctctggattcattcccggaaaatcattcacaatttggagaccataaagaacacataaacatgtcgcaggacgtaatttcgtctcatgagcagctctccatggtacgtaataatccgtgcaatgtttattgtttgtcctcgaatctgtttttatgcccttgaatggtttctcttctttgggtttcctcttttctatcatacattgcttaaatgattaaaagcatgaacctttttttcctgaaaattttgcatgtatatatctatgatttattcgcaaggaataaaattattttctgaaatctttgtattttgtaggtaacatcgttttcttaattttcttagttattcgattttatcttttgtcaaattgcttcattccttttactttcttttctgtttctggttattctagatacaattcagttcatattccaaaagtctgaaacgataattagtaaagcaaactttttagtgctaactcttttgtacggtgttcatacgtagttacgtaccttctcgctagccaaccacaaatcgtcacaatacttaatcagatagaatagaacagtttatcagaattcataagatgctacatctcttcttttagtaattccagtaattaaaatttgaacttttatttatactttcgaatagaatcacacgaatttttattagaaatatataatgagtgtatcaaaagcaatgattcttgctcttacctcggcctttatttgttgttaaaaaatcagatgttagtttaaattagggaacgttttggttctaaagaaacgcaagaatccaaaaactttcctgttatg

SEQ ID NO: 32184 - DNA, 3000 bp, Unknown; identical to SEQ ID NO: 7110
  misc_feature (1)..( 3000): 2750-1469P.txt file - cDNA_ID_3049843; gDNA_ID_1621128; Annot_ID_172372

SEQ ID NO: 32185 - DNA, 3000 bp, Unknown; identical to SEQ ID NO: 5042
  misc_feature (1)..( 3000): 2750-1469P.txt file - cDNA_ID_3049857; gDNA_ID_1621129; Annot_ID_172437

SEQ ID NO: 32186 - DNA, 3003 bp, Unknown
  misc_feature (1)..( 3003): 2750-1469P.txt file - cDNA_ID_3049861; gDNA_ID_1621129; Annot_ID_172434
ggagaagaagaagaagaagaagcttcgagttctttggagggagagggacagataccggttatttcctctcgttaaccgaataccggtttaatactattgtcccggtttgatctcaatagctatcatgagcctcgattgtgtgtatatgagagagtattatgggcccaaatttaacacacatgagatttttttttttaaagtgaaatttctgagtcgaataataaattccagtgacagtgagactgagacaccggagtctaaaggaaaggtgagagcgggggacaatgtaagaaaaaggtcggtgagaaataaaacgacaagtgatagaacttttcttagtaccatagttgaatttaaggtggtgggccattcaatgggcctaacttggcccgtacaatctgtaacatcatttagtattgaattcacattcaccaatcaccaatcaccttaccaaaatagtgcgataggaattaaattgtgtttggcttggtatttgttaaatcatcaatagacaataatagtttgataagacttacaacaactgaatatttataactcgcaattagccctgttaacattccaggcagtgcctgcgtttaagcaacaatacagaggcttcttttaggtcatatgtcaacacctaaaacaaatagataacatgtgagagaaatgtgttaggtatattacactatgattagttcttttgttaaaggaccacgcaccactatcattatccacgttacacacggtttgaacttaaagaagatcgcatgttccactatcttttttgttgttgtttgtcctcctcaattgaacaatttgcatacgtaagcgacatttggttcatatacagtgttcatgaactgagcaacatatatactgtttttttttcatctaagaaaagctacctttttgaaatttgtatttatgcaaacgaaagataatggaaagtgagctggcatggaccgaaagtggtacaaaaaaagtttgaacaaagccattactataccaaacaaacgcaaatgacaaaaactacgcagcattaacaactatattacaattgtcattatttatgtataacattataatacactatcaaggcttctagattgttacatcatctccttaattcttccaagttacatcatcatatatagttgaaattaatttctattattcgtgagaatataagttgattggaagaaggaagattcagtctatatatatatttgaaatactatatgtggaagaacgtagaattccctattgcgaactagaaatgtgttgacgtaccgtgtataaccaaatgtaatatattaatcaaaggacatattaacgtacacattttttactgcatagtcagcaataattgacatttaatcatacatgtattagaaaatggtatgccacgtaagacgcattaccttgcatgaatggcatgtgtagtaagtcgtcatccgcatattgtccaaacaaacaaacaaataaacacatacgggcaagaattaaaaaaaaatcatcttttgttggtcttatatagttgcttatctgaatagtctcacactctctcacttgagagcaagagtgcatgtaattatactatagtattagtacatacgaacaatttggtggtgagtataagtttggatctttggactatatataaagtcattaatttcatactcttacgctattcttttatatcttttaatcaagttgacacatttgtctcattgttttggtgcagagatgatagattggttttctttcttttatatatatgtattgaaacgataacgtgtatgtctccactttctacaaatgaattttaaaaagctcaatgtgtatacataggaattgataaaccagtgattatatagtattttgtaatatactgacacctatacagttttattttagtaatatttgtagccttgtagacaatacataatactcatcacgtcacgtgtagaatattccatggaccgtataaggttcctcctccattgtatcccacaattaattagacacagcttagattagcaaaatggtaatttctttcgtttgagttatgattggcgatttcgtataaaacgaatcgagagaataaaaacgtaaaagaatcggaatatgattcattgcttaccatggttaagtttaatgataagtgcttttattgataacatatatggtcaaataatacaataatttgatcataaagagtaaagacaattgaaaaatgaaatcaccaaaaaagtcagatcacatacagacacattgacgcatcgacgtcaagcatcgtgagcgcacaaagagcttacggctttattattaacacacacactaagcaaaacagtaagtccacgagaaagcatccaaaaagcccaaaggaaccacctttattttttattttattttaggcaaaggaagctcctttattaaattcccaatcttcttccactactttgcacaatctttaatcgatccaaccaataaattttgcattttttttcgttggcgaatgaaggattagagagaaacagaagaaattgttaatttttttcttgttgattttaattaaagagaagagagatctctcttctcgattgctctcaagaacccaagtgacgtctggtttcagctgatttgtttcttctcattctctatcttcttctctgggaaatatcgattttgatctattaagagctggtgagagccaaagtttcctttttgtttgtttgtttgtttgtttgttgtttgtatttttgtatctctgtgatcgcttctacgtgttgggtcatgcagagaaactcattttgttttgatttgcaatgtgtcaattccactttgaaatataagattcatcgcctctctctcctttgttttttttcttcttctgcagctacgagctttgggatgtggtgagatgcttgttctatctcgaacaatccgccggttgttgattttaaacaaactctctatcacaaatctttcccgatcatg

SEQ ID NO: 32187 - DNA, 3000 bp, Unknown; identical to SEQ ID NO: 7147
  misc_feature (1)..( 3000): 2750-1469P.txt file - cDNA_ID_3049865; gDNA_ID_1621129; Annot_ID_172433

SEQ ID NO: 32188 - DNA, 3003 bp, Unknown; identical to SEQ ID NO: 17129
  misc_feature (1)..( 3003): 2750-1469P.txt file - cDNA_ID_3049869; gDNA_ID_1621129; Annot_ID_172432

SEQ ID NO: 32189 - DNA, 3000 bp, Unknown; identical to SEQ ID NO: 7144
  misc_feature (1)..( 3000): 2750-1469P.txt file - cDNA_ID_3049877; gDNA_ID_1621129; Annot_ID_172424

SEQ ID NO: 32190 - DNA, 3000 bp, Unknown; identical to SEQ ID NO: 7162
  misc_feature (1)..( 3000): 2750-1469P.txt file - cDNA_ID_3049885; gDNA_ID_1621130; Annot_ID_172449

SEQ ID NO: 32191 - DNA, 2838 bp, Unknown; identical to SEQ ID NO: 9511
  misc_feature (1)..( 2838): 2750-1469P.txt file - cDNA_ID_3049893; gDNA_ID_1972139; Annot_ID_179206

SEQ ID NO: 32192 - DNA, 3003 bp, Unknown; identical to SEQ ID NO: 17091
  misc_feature (1)..( 3003): 2750-1469P.txt file - cDNA_ID_3049893; gDNA_ID_1621130; Annot_ID_172480

SEQ ID NO: 32193 - DNA, 3003 bp, Unknown; identical to SEQ ID NO: 18333
  misc_feature (1)..( 3003): 2750-1469P.txt file - cDNA_ID_3049897; gDNA_ID_1621130; Annot_ID_172478

SEQ ID NO: 32194 - DNA, 3003 bp, Unknown; identical to SEQ ID NO: 18334
  misc_feature (1)..( 3003): 2750-1469P.txt file - cDNA_ID_3049917; gDNA_ID_1621130; Annot_ID_172467

SEQ ID NO: 32195 - DNA, 3000 bp, Unknown; identical to SEQ ID NO: 7198
  misc_feature (1)..( 3000): 2750-1469P.txt file - cDNA_ID_3049956; gDNA_ID_1621131; Annot_ID_172508

SEQ ID NO: 32196 - DNA, 3000 bp, Unknown; identical to SEQ ID NO: 7191
  misc_feature (1)..( 3000): 2750-1469P.txt file - cDNA_ID_3049964; gDNA_ID_1621131; Annot_ID_172501

SEQ ID NO: 32197 - DNA, 3003 bp, Unknown; identical to SEQ ID NO: 18341
  misc_feature (1)..( 3003): 2750-1469P.txt file - cDNA_ID_3049968; gDNA_ID_1621131; Annot_ID_172497

SEQ ID NO: 32198 - DNA, 3000 bp, Unknown; identical to SEQ ID NO: 7229
  misc_feature (1)..( 3000): 2750-1469P.txt file - cDNA_ID_3050027; gDNA_ID_1621133; Annot_ID_172570

SEQ ID NO: 32199 - DNA, 3000 bp, Unknown; identical to SEQ ID NO: 7218
  misc_feature (1)..( 3000): 2750-1469P.txt file - cDNA_ID_3050035; gDNA_ID_1621133; Annot_ID_172566

SEQ ID NO: 32200 - DNA, 3000 bp, Unknown; identical to SEQ ID NO: 7219
  misc_feature (1)..( 3000): 2750-1469P.txt file - cDNA_ID_3050039; gDNA_ID_1621133; Annot_ID_172564

SEQ ID NO: 32201 - DNA, 3003 bp, Unknown
  misc_feature (1)..( 3003): 2750-1469P.txt file - cDNA_ID_3050047; gDNA_ID_1621133; Annot_ID_172560
ttgtagctccctgttcttgtagcgtttgtcttgtagaaccttcttgatggcaacaacctccccagtttccctacatttagcctaccaaaaggaaacataaatgtgcaggggaatggagccaaatcaatagaacgaacatcatgggtcttatgttaaattagctcacttggaaaaccatgccaaaggaaccagtaccaacaacatgttctgatatgtaactgactgtctgccaatccaaaaaaaatctatatgagaaacagttagataaactacattaccaactaacacatacaattatccataaccatccaacctgtcttgattgaccatttcgaccacggagtgtggttctaatcacatgaccaggctcagcaccagccccatcaataatatctggttcactatcctgcaacgtaacgaaaacctcagacactgtaaccaactccataacatatataagctcaggataaagaagtgaagctaaaaaacagttgaataaacatgaaaaaaagaagaagcaatgcaagacttactctctcatcatcggtctctactttgtcccttatcctcgtctcagccaaatctctggtcaaccaatcgacagaactagaagagctctttaaacctttggcagatctcgaagtgcctactccatttcccagtccagaggatgccatgatatatattcagaagataacacgtactactagtaattgatagcatcataaacccatggtgatttcttggtgtcccatcccatcaaagagccgatcttcctagtagaatttgtaggcccatttgcattaaataaggtgtgttattatatctcaagtatcttgatcattagctaaatcatgaacacatacaaaaaaaagtaaacttgtgtaagcactgatgaactttgaactagtggtgaattgatacactgtaaaacctagcccaatagagacagatcagatctactgccgactagaattgatttgaaatcgacaaggtttggtttgaaaactgaaattctatagccaaaagcagctcagaaaatcagcaaaacagttactagtacccagaagaaccctagttcaacaacaactcagaaaaaaagcacattgagagaataaagagcgaaactttggaaaagattcgcagtgatatgattaggtagaagagtaaaataaaaatgatcatcaccttgagctgtcgtgaagaagaactgaaaccaaagtcaagcatttgacgattgtcttttcttcttctttcttcaattgaagagcttcacataaatatataaaatagaatatttctcggtgaatgatcggattgagaaaaaagctaaacctttagattcttcaagcgttaattttgttttcccaacttcttcacaccttctttgtcgatttctatcgttttgaatcaaacgagaatatgagacgacagctcatcattataagcatcatatattaatctttttcttatatttatgtttctataagatttttatttatgcttagttatatattttttccttcaaaaaattaattagaccttgttaaaatttcatactatactttttaatggatgtccccaaatatcataacaactggaactcaattttcaaacctcagcctacctaatttttgtaaccggatattcaaactttttggtgtacaacttatttcaactatagtggaaaatttacaaaagaaaacaacattttgtgattactagaaatcgcttcaaatgtatgtttttgtcaacacattcgagcctccactccaaaatgcatctatatgggatttatattctaatatgtgccttttgatttttgagatacgataaaacaacaatatattcttggaattttctagtgaattaaaatactgttgtagggcaaaaaataatttcaaaaaaataaagccactttcgtatttgctggttattatatagtaaaagtcgcctttacttgtcgacagttaggtaaggcttaacacatcacacttctttttgtgtgtgtggcgatggagattttgtatcgggttttattagtgatattaaagcttaaggatgtattttttttatctgcaattggttttatcataatataagccttctaaatacgaaaagattgatcaaatacattcccgttttcacaaaagtgaagttaattatttttgctttggtgagctctctcgaaaatacacgttaggcatgcacattgctttggttactactactctctggtctccgcgtgatcttatttactaattagaataagcaaaaaagggctaaatgcaataaagtcgtaagtaggtccaaagtgtactgctcatcagcctacacaaatagggagtggtggtcttataacctaaaaaggctaaagttgctttcttttgcttaataaagtatcgtagatatattacccatttaacaatgattttagtgttgaccaaacaacaacaaaacaatgatttacgatagtactgtgtgtatgtagttggattggaagctaaatgtgttaggcttttgattgccattggcctctccggcccggtcctgagcccgtgaatgatgaggataatactgacaagtccgcattttttttattaaacaaacattcaaattttgataatgatcgtttttttatgttaaaaggctttcatgataatgaacgtacttattaacattacattatgtttgtaatgcatatttcacaatatgtataattaaatttagcaatttaaaattttctggtggcaaagttgtggataattctagctacatccctcctatttacacacgtggttcacttcttctgcctcaatcattttgttcggcaatttttcaacgccaaacgctttttgtttaaaacgccaacgcaaaaccagcgttttgtaatcttattggctaaatctcaaaagaaatgggaaaaaacaaatctccaggctattccttatttctaggccaaaactatctccacgattctaacaaacaaaaattacagaaatg

SEQ ID NO: 32202 - DNA, 3000 bp, Unknown; identical to SEQ ID NO: 7222
  misc_feature (1)..( 3000): 2750-1469P.txt file - cDNA_ID_3050051; gDNA_ID_1621133; Annot_ID_172554

SEQ ID NO: 32203 - DNA, 3000 bp, Unknown; identical to SEQ ID NO: 7223
  misc_feature (1)..( 3000): 2750-1469P.txt file - cDNA_ID_3050054; gDNA_ID_1621133; Annot_ID_172553

SEQ ID NO: 32204 - DNA, 3000 bp, Unknown; identical to SEQ ID NO: 7212
  misc_feature (1)..( 3000): 2750-1469P.txt file - cDNA_ID_3050058; gDNA_ID_1621133; Annot_ID_172551

SEQ ID NO: 32205 - DNA, 3000 bp, Unknown; identical to SEQ ID NO: 7233
  misc_feature (1)..( 3000): 2750-1469P.txt file - cDNA_ID_3050062; gDNA_ID_1621133; Annot_ID_172545

SEQ ID NO: 32206 - DNA, 3003 bp, Unknown; identical to SEQ ID NO: 18365
  misc_feature (1)..( 3003): 2750-1469P.txt file - cDNA_ID_3050066; gDNA_ID_1621133; Annot_ID_172543

SEQ ID NO: 32207 - DNA, 3003 bp, Unknown
  misc_feature (1)..( 3003): 2750-1469P.txt file - cDNA_ID_3050073; gDNA_ID_1621133; Annot_ID_56485
tcctttcaatctttcatcaacaccacacaacatgtttagttagttatgataagataaagaaaccatacatagataacatctttcaaactctttagattctcaagagtctaacctttgttaaaaataagaaaactatatgataaaaacaagggatgcaaaacaaatatattgaaaattttcttcaaacgagattattatttggcttagcttgtgccttctcgttcgtcttgctcttaccatcttctttcactggatccttcttctccaaagttacagaagacgacgctttaccatcttcttctatctcaagaggtttcgagcaccacctatcgagcaaattgcataaaaccgtcaccattattattcctgcgacgataatacaccatccccagattgggatctccatcttttttatgtatttgttttcagtgacaaagaaacaaagtaaattgtttgttgatgattacaagttgcttaaaagttgttgatattataggaggcgggaactactcgaaagacttggaaatttaccattttgacaaaaaacttgctagaaaataactaaaataaaagtaaatcattcttctaatttttttcaatttatcaactttaaaagtatatttccttttcttcataaatctcataaactagcaaaaagataatgtcataaactaatactataaaatatatattttgttttttttgttccgtcaaatatatatttttggttttgcctgtattcttgttgacttccgttttttttttcccccttttttttaattaacttcctttctttgcttttccatttcttcttgattgaaaaatgtatattgtgtgattttgtctactttatttaaattatctttgaaatcgaagaatttctgctctattaaaaattcaaactatagtctacgttggtatttgtttatttcattttatactctgcttatttttctgatactacattacaactaccactcaaaactacaattaattccctaaaaatatttttcgtttccaaaatttgttttgtgtgaacgattccgaactccacaattgatataaaaaattatctttgagttatattatcaacaacagaaaaaagaaagaaaacaaatacaacgcaagccttgaaataaagtctcatagatatttggctttttttaagtgcaacacaaacaaagcctttcaagacgatgagcaacaaggcttcttagcgtttgattcagaagtagcagccacatcaattgtttggccttccttgatgttggcatttgcagttgtctggtctgaagatatcgacttcttgctgatgatcctataaacctccgagagaatcgtctgaaaagccttttctacgtttaatgcctcgagagccgatgtctcgatgaaagataagccttctttctctgcatagctctgagcatcctctgtggcaactgctctgagatgcttcagatctgtcttgttcccaatcaacatgatcactatattggaatctgcatggtctcttagttcttttaaccacctgcttacattctcaaacgttgttggcttggtgacatcatagaccaaaagagctccaagtgcacctctgtaataggcgctagttatggctctgtatcgttcttgcccagccgtgtcccatatctgagctttcacagtccttccttccaccttagaacaaagatcataggttttttaataggttaattcagatctaatgagcagcagactctatgattagtgtgtctgcaacaacaaaattagtaacttcgcagctaaattccacaaacaacccagtaagaaaactagaaactgtgaaacaacaaccatgattcatacttcaaaagaaaatcatgttcgagatcaatttcagatgaagagattcttagatctgccttaaacaaggttttagatctgacatgtgagggagccttacactaccacgtaccagagtatcgacaaatttgggaacattatcaataaaacgcttaaattaagagataccaaagcaaaaatctcgaccaaatgaaaaaaacaggcaccacacatgtaaacatcaaaattcaaaaccaagcccaaatgttcctacacacaatgactgcttccgagtattcatacgaacacagatacggatcgaatcgaaaagcaccggatgctgcttaacttagaactaaacctagatccagcaacatttcgattacactatatactatatatatagagagagatgtgtgcgtacttggagagtacgagtagcgaattcgacaccaatggtggatttggattctaagcagaactcgttgcgagtgaatctagagaggagattagacttgccgacaccggagtctccgatcaaaaccactttaaacaagtagtcgtattcttcgtccggtcttctcgccattgttacacttttctcgaggagtgctttagatttgggattttgaaatagaaaaggagaagatgacagaaataaataaataatttaatttctctttccccttggatcttctctattcaaccttctcggcttgttattgcccaacgacgaagaccttttcttgtcaagttgggcttactaaaaaagcctacatatatgtaattcatttatacatgctaataaaagggaaagtaattagagcttaaccggaaaataaacaaaaatcagaaataaaaccaaacaaaaccgagccaaaccagaggaatacactcaatacagattttaaaaaccctacttcttcatcatcatcccttcaacactcctttatagcttttctccgcctcaactttttgcttcttctctctcgatttgctctcacggaagattcttcagaatatctggtaagatccatcgatcgaacaatctttttttctccagttagctcatattcatatttatgatcatgtcaattgcgagctcactgcttgattttttttccttggaaccagatccgatatcagaagccccaagttcgcttgaattccgtctgagcaatg

SEQ ID NO: 32208 - DNA, 3003 bp, Unknown; identical to SEQ ID NO: 32207
  misc_feature (1)..( 3003): 2750-1469P.txt file - cDNA_ID_3050073; gDNA_ID_1621133; Annot_ID_172533

SEQ ID NO: 32209 - DNA, 2300 bp, Unknown; identical to SEQ ID NO: 18370
  misc_feature (1)..( 2300): 2750-1469P.txt file - cDNA_ID_3050080; gDNA_ID_1621134; Annot_ID_172612

SEQ ID NO: 32210 - DNA, 3000 bp, Unknown
  misc_feature (1)..( 3000): 2750-1469P.txt file - cDNA_ID_3050090; gDNA_ID_1621134; Annot_ID_172595
ttgggatctgtgtaaataatgacattaatcaataaattaataagataataatttttttgaaagtcctatgtaaatctatggtctcatcaatatcataaattaataattatataaatatatcaactatatatatatattatatgtaaaaaaattctttataatatatttataattttttttgcttaaattcatatttgttttttgtttgactatagttttcatattttactgtatcaaaactattggtgttgttttctagacattattattatgttttacttgtaactggttctagaaagatataatctataatgaaggaaatcttattgaaatttttaaaaagttaccaaattagtaaaatctctctataaattgataaatattatttattgataaattaatacctctctaaaataataaaattttgtagtcccaacattattaatttatagaggttttactgtatactctatgttccttattatttgattttctataaaaataattgcttttaaaaaattgatttttttaggttttttatgcaatattaattggttgtaattgatgaatatgaaacttcaagataaataattaaatatcattggtttagaattataaaaatatgtaaatcaaaaaaatattacatttataatcagtttttaatacgttttattaatatgtgtattttttctagaaaatcaagaattaagaaacaaagagagtaataaactataggtgaactacttcaaaattgcaaagtaacatacttttactcatgaaaaaactactcttgttttttcttttgttactataattaaaaaaatcacactatagtttttatgatggatgagaagaaaatagtccaaaccacaaagtgtttaccactatattattttttcttgtttttctttaatcttcataattgctccacttttactagaattaaaaaaaaaactaactaagattaaaaacataatcaaataagttcttcaacatttcaacacttttatttaatattttaaatttttatatacttgtatattttaccaaaaaaatttcatatttttttcatacttaattcatcaagtgatatagaaacaaaattaaacgtcaaatttgagttaatttaaaaattctacttttggtaaatacaaataattttactttgcaatgttaaagtataataattttgttttaagtaaataagtggcaaaacaaattttgtaaatgaagaatctatttctttactcaaatccatactattgatttagaaataaaagcaattcatacaactgaatagaaattatgtcatcaaaaattattttgtccttacaaaacaggaatataatactagtattttataaatttacattagtaagcaccacttttcttcctcgaactcaataatccaaatgagacactttcaaaacttcatctattcctttgtaaattaacttttaacactgtttctaaacttgcgtgtcatcttctcgatattgtcaagaaaagttatcatgttagattcactatacccaaaaagtttccattattcttctaagaaaatcatctcttcaatatttttttcttcctctttcatgggtatcaatagtttcatttctacatagttttactcctatctttatcttgtcagtcatgattaaaatataataaaaataaatttcatgttggtttttgtcgaaaatagtatttatccaagcattatcgccatcacttgtcaacataaattttttacatggatcgttaatttataaaataaataaaaaaaaatataataatctcttgttaaaaaattagacatcacgtttcttagttttctctattgctcatttttgatctattacatggatgataatcaacatttagtctaacaagaggatcttattcattgccatttattcctaatttaccatcaattacaattctattaccaccaatcatctatccagaaatcgaaacattcgtataaaaataactaaaaaaccttaaaaatctaatatttaaagcaaaacaaatgtcaattgagaaaactccaaaacggatgggaaaacagattttaataacaaacaattccattttaatacaactaaaaccatattatatacactacaatcttatctcattctttattatgaaaacctgttttaaaacaaaataaatataatacacaattttacccaactaaaaaacaatatttgaacataatatgacattttcaactttatactataatattcttttacttcaaaaaacaaaaacattacatctgtaatgtaacacagattataatctagtttatgtgtaaaattttaaatataactaaaaacaattaaaaaaataataatattaaatgtatatatagagtagaacatatattcacattctaaaattataattcttctgtttcatattagttgtagtttaagatttttacacacatattaagaaattataaaactatcatttaatctacatcttttatataaaaacattatttattataatcaattcaaccaataaaaaaatatataattaaaatagaattaattagaaaatattaaatatatttatttatttgtatagaaagttaaaaacaatagaaatagagggagtagtatttatgattcgctccgtttttatcgaataattagtattgctatttagaattaggattatctagatttttcaaactgaaatggataaaagaattcaagtacaatctgattattattttcaaatcccagatgcactctttcgacaattaagtttttttttattattattgtgtaaaatctaaaattaagttaaacgaagattttttaaaattctctcgtagttcataatggagacgctcatttaaaattgtcaactttgacgactaattacaatatctaagagtaattaattaaagagaaaaagagtcttcattgataacagaagagagagagaagaagaagaagaagcttcacaatcgtaacaatg

SEQ ID NO: 32211 - DNA, 3000 bp, Unknown; identical to SEQ ID NO: 7243
  misc_feature (1)..( 3000): 2750-1469P.txt file - cDNA_ID_3050096; gDNA_ID_1621134; Annot_ID_172589

SEQ ID NO: 32212 - DNA, 3000 bp, Unknown; identical to SEQ ID NO: 7260
  misc_feature (1)..( 3000): 2750-1469P.txt file - cDNA_ID_3050109; gDNA_ID_1621135; Annot_ID_172644

SEQ ID NO: 32213 - DNA, 3000 bp, Unknown
  misc_feature (1)..( 3000): 2750-1469P.txt file - cDNA_ID_3050117; gDNA_ID_1621135; Annot_ID_172634
gtaaaactatgctaaaagccttaaattatactatccctcgaaaccaatttcggttaatccttaaccggtcctctagttgggtatttaagcccttttgtctttttaaccgtttttctctctgccgccgtcgccgtcaccagagttactcatcgtggtttgtcaaacgctagcgaggctcatgtatcggacgatcatgccttcgaattctacgtttaaagacctctgtctagatttaggggttttgcttctagggtttatcgttatctgaggtttttctgtgtaccgtatgttcggtcacgttttctccagaagaacgagcttcctggtacgttgctttcacgttgctaagaaattctcgaatcctgagccggaagatattctctttagtgctctctgtttgaatttaagacagagaagatggaacactcttcatcaattctcctcgagtctcacaaatccgttgataagtcgagttcttcgcgagtttcgaagctcgccgaagttagctctagagttctacaattgggttttaaggagtaacactgtggctaagtctgagaatcgattcgaagcctcttgtgtgatgattcatttgctggttggttcgagaagatttgatgatgctttatcaataatggcgaatttgatgtctgtagaaggtgaaaagttgagtcctttacatgttttgtcgggtttgattcgaagttaccaagcttgtggttcgagtcctgatgtgtttgattcattggttagagcttgtacacagaatggtgatgcgcaaggagcttatgaagtgattgagcagacgagagcagaaggtttttgtgtttctgttcatgcgttgaataattttatgggttgtttattgaatgtgaatgagattgataggttttggaaggtttacaaggaaatggattctttagggtatgttgagaatgtgaatacatttaatctggttatatattcgttttgtaaggagagtaagttgtttgaagcgttatctgtgttttaccggatgttgaaatgtggggtttggcctaatgttgttagctttaatatgatgattgatggagcttgtaagacgggtgatatgagatttgccttgcagcttttagggaagatgggaatgatgtctggaaactttgtttcacctaatgctgtgacgtacaattctgttatcaacgggttttgcaaggccgggagattggatttggcggaaagaatccgtggtgacatggtcaaatcaggtgttgattgcaatgaaagaacctatggagctttggtggatgcgtatggtagagctggaagctcagatgaagccttaaggttgtgtgatgagatgacgagtaagggacttgtggtaaatacagttatctataactctattgtttattggctgtttatggaaggtgacatagaaggagctatgtctgtgttgcgtgatatgaatagtaaaaatatgcaaattgatcgatttactcaagccattgttgtcagaggtctatgcagaaacggatatgtaaaggaagctgttgagtttcagagacagatttcagagaagaagctcgtggaagatatagtttgtcacaacacgcttatgcaccattttgtaagggataaaaagctggcgtgtgctgatcagattctagggagtatgttggttcaaggtttgagtctcgatgcgatttcgtttggtactttgattgatggatacctaaaggaaggtaagttggaaagagctctcgagatatatgatggtatgatcaagatgaataaaacatcgaatcttgtgatttacaattcaattgtgaatggattaagtaaaagaggaatggctggtgcagctgaagcagttgtgaacgctatggaaatcaaggacattgtaacttacaacacgctgttgaacgagtctctcaaaaccgggaatgtcgaagaagctgacgatatcttatctaaaatgcagaaacaggacggtgagaaatcggttagtcttgtgactttcaacattatgatcaatcacttatgcaagtttggttcttatgagaaagcgaaggaagttttgaagtttatggttgaaagaggtgttgttccggattctataacatatggaactttgattacatcgtttagtaagcatcgcagtcaagaaaaagtcgttgagcttcatgattacttgattcttcaaggagttacacctcatgaacatatatatctatctatagttcgtcctcttcttgatagagaaaatggaaggccttagtcaacaaagccaatgaaagcttgtttcagttttaggaagaaactactgaactgtccagagggtttgttttggaggtacggtacggatcagattcgtatcctgttcgtacacgtggacccttggacgattctttgtaatcaacggtcagtgttggaaacaggatcgcttgacgtggacctgtaaagcggggattgtctgacacgtggcgctaatgcaccggccaaacaatttggttgtcacgagctattacgatactttccacgtgatttgtttaagattagccgtccagattatgtaatgttggtagacaccgtaaggaatataatctgagaagcagacgaatattattttccacattatacaaacaaatggctgcgtgtgagagactgcgattgtaaaatctggtgttgttattttgctagatgtcaacaaatcagagcaccattggtttaatttcatgaataaaagccactgttatgataaatataataatattaatcaacacatgtattctctgaataaattggaataaaataatgaatgagatgagtttcagacttcggtgattgagaagtgtggtgtggtgaggcagtggagtcagggggctgcttcaacaacaaacattctctctctcttgtctaagcaaagcaacccatataagatatatacctgaagtacacgaccactttctttctccatctcgtctctctttctgtcttcttctttcttcggcagctatg

SEQ ID NO: 32214 - DNA, 3003 bp, Unknown; identical to SEQ ID NO: 21624
  misc_feature (1)..( 3003): 2750-1469P.txt file - cDNA_ID_3050138; gDNA_ID_1621136; Annot_ID_172667

SEQ ID NO: 32215 - DNA, 3003 bp, Unknown
  misc_feature (1)..( 3003): 2750-1469P.txt file - cDNA_ID_3050197; gDNA_ID_1621137; Annot_ID_172718
agacctccgcctggtggcaattgtctttcaggaatttaatatccttgtacgacttcgtcttgcagggttaatctctcaagcagcaaagctaggtgcacaaggtgtgccctcattccggtcattttcttttgaagagttaaaggaagccacagacgatttcgattcatcacgtttcttagctttggaattatgcaggaaaatggctaaaacagagggcgatgtgtacaactttggattcatacttctggaatctctgataggaccagtacctactacaaaaaggagaggcctatcttctcaacgaaatggtatcatatagggtaaagaaaagaagcaaatcttcatcattgttaatagctgttgctgcaatgttgtatttgcagacgtcatttgggagccaagactgtcgacagaaaataggaagtccaacggtcctaacaacaagctcgcaggagtctttacccaattgccatctcaatcgccaataaatgtgttttgcttgaaccttctgcaagacttcctttaaagatgttctctggaacttaccatatgcagctcaaatgcagtctgccgcagacgctgaacgcaaatctgataagtcgtcgtgaatccaaaggctaacctgatgattgatagttgttttcggatttataaatgttatgttttataagtttggtttttcagtagaaaaatgtaatactctagcggctaaaaaacatagtttcttgtctctcttgaaactttattcgtttaacaaatattgattgaagaagatgttgagttttgtagttggcgagaacttctcaatcttcaagaacaaggtactgaggcaggagacttgtcaaatgttcttggagaattttgtctttgaattgcagaatcgatcccaaatattttattattataaaagctacaagaatacagtttctaatacatgtattagcaaaaaagtaacagtaaaaccaagggctacacacttttcttaaacaggaactttggagtccactgatttgagaacctcctcacccatttccttgcatcccaccagtttctgcattttcaaaacacaaaaagacttctttaagtatattgtcattaacttatacaaaacaaaagacagaaatcatcatacacatacatttccgggggagtagatgtctccggttctgaaacctttgttcagagcatccacgaccgcgtcttcaatcatctttgcagccttttcttctccaagtccatacttgagaagcatcgccgcactgagaatggtggccaatgggtttgccttgtcttgtccagctatatctggtgctgaaccatgtataggttcaaagagtccaggtccctagttttcatcacaagtttaacaatcaatatatgataataataaacagaggaaccttgaaatattagatttagtcttacttaccgattcaccaagacttgcagatggaagcatcccaatgctaccagtgatcattgaagcttcatcagacaatatatcaccaaaaatgttattggtgacgattgtgtcaaactgcaataatgtttttaaaaatgccgtgagtactacaagttccacttctgtgttagcttaatcaacggctaagctttatatatgcgcgaagatcacctgtttcgggtcacggacaagctgcatcgcagcattatcgacatacatatgtgatagttcaacatctggatattcagaggctaaagctgttactcttttcctccacaatattgatgcctatacgaaacaaaacaaaaaaataattgtataacgaaaaacacacaagagtggagtggaaaaacaattcaaaacatacatccaagacattggctttgtcaacagaacacagcttgccacgccttttcctagcagtctcgaatgcaacacgagcaattctgtcaatctgaagaagataaagcaatgcattaatacacatacattgtcacagagcagcagattgtgaagagtaagtagtacctcgtgagcagcgtagatctctgtattaaaaccgacttcttcgccattttcgttgatcgtaatgcctcttggctctccaaagtaaatacctccagtgagctcccttacaatcatcatatcaacaccttgtgctacttctttcttcagtgtggaagcatcaactagctgaacaagcaaaaacagaaaaatttgagtatatttacaactagaaagcaaagtgataagcaaatcaatacctgtggtaaaactgtagcaggtctcaaattagcaaagacattgagatctcttcgaatgttaagcagacccatctcaggtctcagatgtttctcattcttgtcccatttgtacctgaacaaaaaatcatcataaagagaataaatttgctgaagaaacaacacacacacgcattacacataccctccgatagctccaagaagaatggcatcagactgtttagcagcagtggaagtttcctccggcaatggaactccgaccaaatccaaagctgctccgccgaaaggcatctcctggaaatcaaactctagtccttggagaaatccagctttctgaagcacattcttagcaacagatataacttctggaccgataccatcgccgggaagcagagtgatgttataccgttttttcaccggtgaagcggcggcgcacctaattcgatacggcgcacgaaacttatgatcggtgagagaactgtatcttcccggtatgatctccagacggatgttagtttgcaaaaacgccgccatctttttttcgagtttagggcaccaccatcggcaaaaactaaccatttgagtatactacagagaccggttatctctggttatttgttaacctgattttggttcaatgttctcattaatttcaattttaagttctatcagctttttggactctctcatgtccaccatccgttcacttggccgcgttcatataaaccaaaaaccgaacaacaacaaaaattcgaaaattctccggcgacaccaacaatg

SEQ ID NO: 32216 - DNA, 3003 bp, Unknown
  misc_feature (1)..( 3003): 2750-1469P.txt file - cDNA_ID_3050201; gDNA_ID_1621137; Annot_ID_172716
tagaagctgaagctgccagcatgatctggtaatcgctacatacgacatacacacatcactaaacttctttataatttatgcacacacatacagctcttaatggccacaactcaaagttataattagtgcatgatctctagttatttgactgcttttaatatatgtttatggattcacgcatgtgtgtgtatgtacataatttacatgcatgcactttgtgtatggtacacatcaatttgaacccgttcaaaattctgtttttattagtatatatatagatgtatgtggtgtgtgtgtcagtgtgtgtgtgtgtttatagatagtagtactaggtcatcctgcagcttcagtcactaaatcaccaacaatgcaaaaaagatataaacacttcatttcatgagaaaggcgtttccgccttaacttttacgatccctctatcaccattggagaggtaacgatacatttacttgtcattttcttaattttacttcctatagtaaatccaatccaattatgtgttattttcaaagtatcacatcttcattctccgaaatatacgcatatatgtcttagttactgtgtataatcaatatgtccacaagttcatgtttgttggtagctagcgacgcgtttacatgtgcctatgtgtttctttctcttgacctattatacttagatctattattaaataaacatatatcttgtgacaaagaaaaaaaagaagcgtattagtttagtgacaagacccatgatattaacaacaatttatcttatattggagacttaggaaatatttcaataaaatatatataagttattaatgaacttaaatacaattggcttgttacacatcactctaatccatgtgatagatgttctacaaaatatacgtttttattttaacatggaatcttatgattgctttattgtacatacaatgagagctaatagatcaaacttgtttgaatgtaaataatttggaatcttttttgtggggatatagagttgggttttataatctcctcgagttagaaacaagcattattggttttagatacatctaagattaatcttgcatactattgccatttttttggctgattgttactcatatatagttcgaccagagaaaaatcaacgtctacacttttcatgtacaactgactacggctcaagccttctctaatatagattgtgccatatgcaaatgtaaccaatcatcgacattgagattctctgctttgatcagcaacttctgtttgttttaaagattcttaattgaaggattcataatggaatttttttttaagatcgtgaagattatacttccttatagtttggttttaaagatgtaaaatttatttcatatggtttctgatgtcttttgatcatttgtaagtatattagttgtttgtgcaaacaatattactagttccatgcatcgatacatatttgattaagaacattcgccaaatggtcaatacaatggggtatcagatcaaagatacaaaccaaattaagacccttggaatctgtaacaaatatggtgctggagatagatatcacaattcataataattaattataggatttataatcaccattttaatattgatgtatcaattaatggaaacaattgcacggacctacttgcagtatatgcaaaatgaaattggtttgagctatgttttggtattaacttgctttgtaacgtttgaatctttttttctaaatatattcacattttaatataacattgtacaattacagatgtatgagaactataatatctaaacaaagccatgattaatgacaaataataaattttcgaaagtgaatatattattatagaacttaattatttatttaaaaagtaaaaactaatcataactcatgaagtaaaaaaatagttggtctagccaattgcaaagtagtcacatataaccacttcggttaagacattggcaaagatcaaaaagtcacaaacatacttttttctctggttgactaaatcgtcgaaccaccacatgtaattaatttgacttaaactaacaattaaaaagtaaaaataaaaagaatagtggtattttactgatgggaggacatttttccaacgattattttgtttcacgagaaaatgactatgtacgaaatcttcatatatgtgagaaatcggttttagtcaactcacgacttgggccagatttggaagtttaattctttagaacattttcaacgggagttctcttgaataattagatggattctcttgaattagtagaataaaaataaatataaacggattaaaaaacagagaactagctctctcaaaagagtttcgacttttgagtaagtgatagaaccggacatgtgtcaaatagataaaataatacatgacgtaaaaaacaaaaacaaaaaatgtattaggaaaatagttaccttacttttaatttacttatctatatgtcgtgatttctggttggttgccttcagagacgaggacatgagaaatgagacctctgtaaatactgctactagtttgtataaaaccaaaacactaaagattgtagcatcaagttgtattgtaagcgtcactctgaatttgttattgtaaagaaaacattctacgcagacaatatcagatcaaataacatcattgtctaagcaaatcacttatttttattttttttaattggaaattaagaatcatctcttttaattttagtgtctcaaattttaaactacattttctaccggttgtcattatttcttatgttttgcatatatttttcttatgttttgctcatttatgtatattttgctagttgaattttttgttcaaaatttccagtatttataacatattcaattttaaatttagcattaattttttaataaatttaatttgatattttgaatttgtttaattattttgtttttatataatgatataatgtgtgttaaaaaagtgggtttgactctattaacaaagagataaatatg

SEQ ID NO: 32217 - DNA, 3000 bp, Unknown; identical to SEQ ID NO: 7283
  misc_feature (1)..( 3000): 2750-1469P.txt file - cDNA_ID_3050205; gDNA_ID_1621137; Annot_ID_172708

SEQ ID NO: 32218 - DNA, 3003 bp, Unknown
  misc_feature (1)..( 3003): 2750-1469P.txt file - cDNA_ID_3050221; gDNA_ID_1621139; Annot_ID_172775
acttctaatgtgtttattcatttattccatgttattattattttctatatagctagagatcaatgttattaactataaccacaaatacatctgatcacttgtttaaaattaaacagttgcatttagattatacgatactcgtgagactggattcattgaaccggaggaggtacgtatgtaaactttgtctcaaaaaaaagaaaaagtcatgattaattatatttgacggttttcctcgacttggagaaatctataggtgaaagagatgataatagacgttctagaggaatcagaacttatgctatccgagagtatcattgattctatcgtgtctaaggtgtgtataacgcttaagtttatgagcttgatttaacattatagtgattttacttactatttttgtttacttatatttggcaaagacatttgaagaggccgattggaaaaaagatgggataatagatttggaagaatgggagaattttgttgccacctatcctttgacactaaagaacatgactatccctttcttgaagtaattcgtttgtttgtttttcctaaccattttcttaatattcgctgataaattgcatgttttagatacatctttcgttttacaaaaaaagtaatatatatacatctttcaaaaacagcttttatatatgtgtgtttatgcatatattactattatcttcttttattttatttttcttgttttataaatcgagataattattctaaaattaacttttattgtacagggacattccgaggattttcccaacctttctccggtaaaatcagatgaggtgtttgctagaggtttttgtttaaaaatatttttatccgaaaatcacataggtaatttgttataagaaatatagaaggttaattattatataaacatattaactatcgaaagaaatctttaatatttaacgaggatagaaagtaattgtttttaaccacaaagctaaagctgtgatatgaaaacttaaaagcaaagatcggttcgtgaagacaaaatggggttttggaaaaggaaaagaggaaaaagaaaaagaacaaacgtgtgaaaattcgagaaaaatggtaacacaaaaagaaattggacatgatataagttgccaaaaccaaagagaaaaaattgacatgatataccaatcaaatttttgaatcaggtcaactaatcaaattcacaacaatcatccacaatattatttagatttgacgctttcactgtttcacatgaaaattttacatttgacgcgatgacttgtggagtcacgatcattttagtcactcgttttaaacggatgcttcattcaaaaaatgtaacttatattcagaagactcctaacgtccgattcagatttacaaaaaaacaatatcattgaatcggaaaacagaaaagcatagtaatattctaagtatttaattataatcgtgaggaaatagttccgtaataatgggggaaaaatatatatatgataaaaccaaaatgagatttgcctgaagatgccatatgtctgatcaaacactctgagctgttgtgtcgatgaactcaccatatgccaagatacgctattagcgacaacacatttgtattgtcaaatgtcattaattaacatccacaggtccaacaacagagaaacaaaataattatcacaagtaaaatataaaattagtaatatacttgtacttataatttttggcttatgccttttaatttattttaacactagactcgacgaaactcatcactaacatgaccacaaaaaaaaaagattacaattctaaaacacaaagattaaaaaagaaaacataacgaagtaaaattaagactagacatcaactttacaagttgaaggagcgagaagaggaacttgtccgttagaagatggattaaatctcaaccacacatcacatctggcgtaaaatccataccgtccagtcttaatcgcaccagctttccaacgtagcctcccaaaaatcaccactctcatcaaaacgacgccgtaagcttcatcattttttaaaccattagctacttccggcgagactggtataccgttgcctcccatcaccggagctatcacaaccgtagatttatgtcctaaacgaagcggtggtagtggaagcggcggtgttatgatctgatctttgtacgttacgtacatagagagcttgtcgtagtgaatggagactctccggttagggtttcttgctaaaacgctgaactgaacggaggttgagattaacggcggcgctgtgaaattcaggtcgtagatggcggctccgacgacggtgagacgtggtttatgtggacggtagacgagccaaaggattaaggctatgatacctagtatgacaaggatggtgaagatcgcgccgcagattgcgcggcgagcatctccaccgcctcctccgccttctttagagtaagattctggcgttgaagaagcggagggagcgttcttgtgatctgctttggctgcgtgctctgcttttgcttctccttctcccatggctatactctacagatataagtgttaaagtgtgtatgtataggtatgtgtgtgtctatacgagaatcagagggttcggtgaagagtgaagactctaaagaaggaggaggagaagaaagaagataagtagatgcaaggttttgtctcttttctagttaataagagtaaacagtcttctagagtacagttttattaattgtttattaacttagaaagcttgtagttgtaattatgtgttaaagctaatctttttataaagtagccgtaaattactactgtttttacattgtgattttattttgttataatacttaatgtaataatataagatagagaagtactttcgaaagactccaaatctcggtgcaaccgttcacgtgacggatctgatgagtgatgaattttttaaaaatgaaaaatccaatgtaacgtgtatacatatggctatacataatcaaatactttgttgtcaatg

SEQ ID NO: 32219 - DNA, 3000 bp, Unknown; identical to SEQ ID NO: 7318
  misc_feature (1)..( 3000): 2750-1469P.txt file - cDNA_ID_3050248; gDNA_ID_1621140; Annot_ID_172800

SEQ ID NO: 32220 - DNA, 3003 bp, Unknown
  misc_feature (1)..( 3003): 2750-1469P.txt file - cDNA_ID_3050256; gDNA_ID_1621140; Annot_ID_56607
ctgagaaaaagatcttcctttattatgcttaggcacatcaagattattgatacttgatatgagaagcatggattcctccttcaatggtacgcttgtaggacttttttttttgcaccacgcttgtagaacgtaactccactgtcagatgcagtctcgattaagtatcatgttggaatgtatgctaccaatgaggttttggatcttgatatgccaagagcttaagacgtaactgatatgcatcttaaaaagctcagacgttatctcactagtgtattgttagttttgcaggactttgtttcagaacgtgccaaccttttcccttttgtcagaatattgtcatgattctgcatattttcatagactgacatattcaataacaaaatcaagctttgtctggatccctattgatcgtgattttttttcaattttattgtttttgtgtgagttttttcagcggctctcagcactatgcttcagacatccctttactatattttatcatgtgtactaatgcagaactaagcctttataagtgcgagacaagaaggaaagaggcccgccggttcaagacacaaacattataaaacagagcggctactaatcttaaccataatcagaagaacctgtacgttgttacctttctctctctctttttcttggtactttaaccaaaaaaatgagagaattaggacccagtatttacattttctgtttcaaaacttttagatgagaaataagagatgatggttctagttttgcttgcttgaatatgaaaaaagattacttgcttccttgtgtcagtttcctttaacacaagaatcctacttaaacttctcaccaagtaatcatctctctcatttggaaacactcaaaattttctctcttcattgctttcacttaactcttttctcctttagttgtacttcaatgtctcaccaccactatgaaaccaaccctcatttcgttcaattttccttgcaggatcaacatcaaggtggtccttctagctcatggaactctccgcaccatcaccagatcccacaggctcactcagttgctccacccagggtgaaaataaagactcggggacgccaccagactgagccacctgaaacaatccatgaatcgccttcctcaagacccttgccactgagaccggaggaaccattaccaccacgccataatccaaactctgccaggccattgcaattgagccctgaggagcaacgacctccacaccgtggctatggatctgaaccaactccatggagaagagctccaacacgaccagcttatcagcaaggcccaaagaggaccaaacccatgacattgccagccacaatctgctgtgcaattctcctgatcgtcctaattttatcaggtctcattctcctcttagtctacctcgccaaccgtccacgctcaccatacttcgacatctcagcagcaaccctaaacaccgccaatctggacatgggatatgttctaaatggagatctcgcggttgtggtaaacttcacaaatccaagcaagaaaagcagtgtggacttcagctacgtgatgttcgagctctacttctacaacacactcatagcgactgaacacatcgagccattcattgtaccaaagggaatgtcaatgttcacaagcttccatctcgtcagcagtcaggtacaaattcagatgattcagagtcaggacttgcagctgcagctcggaactggtccagtgttgttgaatttgagaggaacgtttcacgctcgctcgaaccttgggtcgttgatgagatactcttattggttgcacacacagtgcagcatctctttaaatacccctcctgcagggaccatgcgagcaagaagatgcaatacaaaacgctagcgatttgcagcatttctgactgaatacattgcttcttttcttgatgcgtttgatgataatataggcaaatagatagtttttgtatttttctgctacttttagaaataacaaaatgacaaaggggaaaatgcatttgattttgtatttcgaattatagaattgatcttaaattgtatgtaatttgattataatattagagatgaagatatattatctaaaaatccataattattcattttgattataatgttctagctagctttaataatgtagaaataagatcttatattacttttgtaaaagtgaaatatgtgcgaataaagtgtttaactttgtgcatgttacacgaaaagaaaaaggatatatcccctaaaacagtcattactgagaaatatcataagaacaaaaatttcttgaaaattattgcaatcctagattaacatttgtcaacaatcaacatgcaacttgtatattacatgttttaaaactaaattacgaatacataacactaaaccatataattttattttatttcaaactactaaaatttactatgtttaaaaaaaaaacttaaagacaatatttctatgaaattaataaaaatgtatcataatattgatttattatcatgtttatttcagtacaaaccacagataagaaaaagtgatcggcccattaaattgatagcccaatatgattttacagtttatggcccatatttgtggtttgcccggagctcaagaaacgatctctttcttcttcttctcgtcgtcgtttgtcactttagagctacttcttcttcttctctgctaagcctttcctctcgacttgatacttttctccagtaaggtacgtttccgatccttaatcgagctctagtatcattgatttggctatgttaatgaagatgagggtttagggttcttatacagacaccaatgtatctcgtgctagatctgatttgaagttatgagagaaaaactctttgattgacatctgattttggtttatctccttctggatcagcttatttttattgtagcttctctgattttcgatgggtacttatattttttttttcaatttgggatttttcatgattctgtagggtttgcaaagatg

SEQ ID NO: 32221 - DNA, 3003 bp, Unknown; identical to SEQ ID NO: 32220
  misc_feature (1)..( 3003): 2750-1469P.txt file - cDNA_ID_3050256; gDNA_ID_1621140; Annot_ID_172788

SEQ ID NO: 32222 - DNA, 3003 bp, Unknown; identical to SEQ ID NO: 18434
  misc_feature (1)..( 3003): 2750-1469P.txt file - cDNA_ID_3050285; gDNA_ID_1621141; Annot_ID_172834

SEQ ID NO: 32223 - DNA, 3003 bp, Unknown; identical to SEQ ID NO: 27664
  misc_feature (1)..( 3003): 2750-1469P.txt file - cDNA_ID_3050325; gDNA_ID_1621142; Annot_ID_172885

SEQ ID NO: 32224 - DNA, 3000 bp, Unknown; identical to SEQ ID NO: 7368
  misc_feature (1)..( 3000): 2750-1469P.txt file - cDNA_ID_3050341; gDNA_ID_1621142; Annot_ID_172871

SEQ ID NO: 32225 - DNA, 3003 bp, Unknown; identical to SEQ ID NO: 18445
  misc_feature (1)..( 3003): 2750-1469P.txt file - cDNA_ID_3050343; gDNA_ID_1621142; Annot_ID_172865

SEQ ID NO: 32226 - DNA, 3000 bp, Unknown
  misc_feature (1)..( 3000): 2750-1469P.txt file - cDNA_ID_3050347; gDNA_ID_1621142; Annot_ID_172864
aaagcaaagaataagattaaaaaaaacacatagttgagtctcgaaaattcagtaatatacagtgacatataacaagagggcacaaggatcaaatacctgtggtcgcgtggactgttgtcatcaagccttcaagaataccaaattcctcatgcaccacctgccagatacaagtgcttaagggccatagacaactttatttgactttaatgaagctcttcataatgagctatatacaggacaaaaatgcaatgctacaaaccttggcaagaggtgcaagacaattggtggtacaacttgcattggagactatatccatgttaggcaggtatgtcttttcatttactccaacaacaaacatgggcgcgtccgctgaaggtgcagaaatgatgaccttcttagcaccaccctgcacagacaatgaaaggtcaagaaaatcatagaccattttaggagttgaatgtttggaattattaataatataaggcttggtattaaatgttagcatcaatgaaactagtagatcaacaagcgtgttcaaatgaaagtgcataccttcaaatgtgatgaagcttgtccaacggtggtgaatacccctgaagactcaacaacatactcagctccaagatcagcccacgggatttcagctgggtctctgaggaagaacaattaagatgttagactctaaaaaaggataagcataaaaccctaccaataggatattagtggaaattgattcataatttgaccatactagacagatacacatgagtcaacattttgaggcaatacctcttgctgacaactttgacttgttttccattgatctccaaagttgaatcatcaattacattgatagttcctttgtaatttccatgagtagaatcatacttgaacatgtaagcctgcataagaggaggagagaagatttggtttaagtttgatatattatcccatgcctttaagtatgattaatattacgtgttcaagcacgtggatcagttactatgagtaaggaaaactaaatgggaaaagagtatgagcaacagttataagatattcctggcgaaaaatacattagaaactagtaagagcaaaaacggcattgtaagttgcatctactacttaccatgtacttggcatctatgaatggatcgttgactgctacaacctcgatatcatccctaaaggttgcgatgcggaggaccaatcttccaattcgaccaaaacctgtctcgcacatataaaatacagtcatcaataagaaatgaaaaggtagaggactagaagcaagtcagacggaataaactatctgatgatgttgaatttcaaaatgaatccagcaatggaaacaaaaaataccgttgatcccaacctttgtctttccactgctccttgaccctatacaagtcaatcaaatcgaagttactgtcagaatgcagcaacaaacacaagtaagaacatcaattaaatttgtcttcttactatgaacagcaggaggtgcttccgtagctgtggccttgatgggttgaaccctcttcgcattgtattttctgtacatttgaacattaaaacattgttgagaaccaaaagaaagcatcgtaaaagatttacatgtactacagagtttgtcacataactgtaaagttgaagattacccggttgaaactgcagcaccagaaaatctagacgaggtcaggctatgactgaatccaagacttgacgtgacctgatcatttgagacaaaacatataataaactcactgaaactttaatgctgcctatcatcgattcagatgctcatcagttaactcaggccaaacgactaggaattcaatatttcaactacatgtgaggactcaagtagagaagatagcgatactatagaaacaccaagttgactttacactgagaaattgaaaccagaaccaaagacaaaacatcacctcctactatctagtatctaccaaaactccaagcgagctaaaacatattaaatggaacacaaacgcaagagtgagaaacgaaaacgtttaatacctgagaatgattgtacgatgacgatggataaagctcgacacgaggagctgcggcggaagtggcggcagatctgaggagagaagataaggccattgctaagctaccagaaacagagagatctcgccgccaaaaatcctaaccccttccgctgaatggcttttgagtgtagctctggagccacgaaaatgttcgtttgagtaaaaaaatgagacaaatgcaaattgcaattgcaatttctcatgtaaaatatgcttacgattctgcaaagacgatgactgtgttctgatgcgtcgcggcccatcgtaactacttttgcgatgagatctaagggttgagatttcacggaggaaaactacaaagccgcgtgtaccggatcggcgtcaaggcccatgatttggtgggcctttggtcatatttgaataacgttgacgtatcttttgttgtttattgagttttgccacgcgaaaataaaatgggcctgatttagtttgacacgtgtcaagtccagctggctctccctctaaaaatggcttctgtactgttaaaacttaaacgacgacgaggctgagccagctccgatatgccaggtggcattttcttcgaaagaatcgtgctgtttctgcagttggctcgtctcacagtcccctctgtgtgattaatttgcttttttggctctcccgtcaaaaatggcgaaccgtcgaattctctgtatctcttgaatttcccagagattaatttgaatcttcatcatcttcttctctctggattcgccgagaaaccttcttcctctgcttctctcgtcgatattctcttccttcccgcttaagccttcggctaggtctgatatttcgattttcttctttacatttggcaaacatgttacttatggatgttgttaacgatgtgttctaaataagcttctgtttcctcttgtttttcgtttgtttctgatagatatcaatg

SEQ ID NO: 32227 - DNA, 3000 bp, Unknown; identical to SEQ ID NO: 7355
  misc_feature (1)..( 3000): 2750-1469P.txt file - cDNA_ID_3050355; gDNA_ID_1621142; Annot_ID_56647

SEQ ID NO: 32228 - DNA, 3000 bp, Unknown; identical to SEQ ID NO: 7355
  misc_feature (1)..( 3000): 2750-1469P.txt file - cDNA_ID_3050355; gDNA_ID_1621142; Annot_ID_172859

SEQ ID NO: 32229 - DNA, 3000 bp, Unknown; identical to SEQ ID NO: 7405
  misc_feature (1)..( 3000): 2750-1469P.txt file - cDNA_ID_3050385; gDNA_ID_1621143; Annot_ID_172924

SEQ ID NO: 32230 - DNA, 3000 bp, Unknown; identical to SEQ ID NO: 7416
  misc_feature (1)..( 3000): 2750-1469P.txt file - cDNA_ID_3050424; gDNA_ID_1621144; Annot_ID_172964

SEQ ID NO: 32231 - DNA, 3000 bp, Unknown; identical to SEQ ID NO: 7424
  misc_feature (1)..( 3000): 2750-1469P.txt file - cDNA_ID_3050428; gDNA_ID_1621144; Annot_ID_172961

SEQ ID NO: 32232 - DNA, 3000 bp, Unknown; identical to SEQ ID NO: 7425
  misc_feature (1)..( 3000): 2750-1469P.txt file - cDNA_ID_3050432; gDNA_ID_1621144; Annot_ID_172959

SEQ ID NO: 32233 - DNA, 3003 bp, Unknown
  misc_feature (1)..( 3003): 2750-1469P.txt file - cDNA_ID_3050452; gDNA_ID_1621145; Annot_ID_173020
cctgtaaggaccaatttcaaactgctattgagtcttaagatcgcatgaagcgtaatagaccttggttccaaatattaatatcctcgtaaaagtgaaggagcacaaaattaaaaatgaccaaattgaggaaataaatattttgatgatctcttgaagagagtgaatgatctctaaaagagacataaacatgacacatgaaacattcaagtacttgacaatgaagagatctatctagctatgtcatgtcaaaatataatggaatcaaaagcaaatcgacgtcataatatatttgcatgctatgagcagttgatattatagacaaaaaagaggatcatgaaagaaagtctattgaaaagtgtacacaaagtaatgattagccaaaaaaaaaatggaaaagaagaaatagacatataattataatctctagtagagatatttggactagtactctatgcacatgatgtgtaaaaccagtggaaaataaatgagtctttatgtgaaagaatagtgaaattaatgagattttcacaaagataagaaatgtattatgaagagatatattctcttgtggtggatgtaatattttttaagtatctaaagtctggcaataagagacggaacactggatatgacatttatatgaaattcttgaaagatataatctctgaaggattaatgatatgagaattatgttctctagaactctactcgatcgaataaaaagaaatatgtaacatgacatataatcatataaatatatatttacgttgagtttgtcaaaatatattgatcaaactaatatttgttttgaaaatcattaaaactcctatagagttatcataagtaatacgatgacaataatctatgataaaatatcactagataatgatatttataagtctatatgaaaaccatataattttgatcattaagattatggttattcattccaacgagatattgtatttgattgaaaatcatctcctgaagaagatgtttccgagggggagattgaatgatatgcgtggatgtaccctttttccttatcatagtttttatcccacatgatttttctatgacaaggtttttaacgagacattaaagaacacgcaaataatacacttgatgaatattaggaaattctatcaatcatccaaatgaatattatacactaatgatatttagagaaataaataagatggtcaagatgaatcatctaaaagatgatatgtatatttttcataagaaactattccaaatcaaaatcgtatacttactataattctacatatacatcccatctacgagattttatatgtatatgtgaatataatataattaagtagatattatatatcaattgattaatactgaaacatgttgacctgaataaattaatcaaatacacagcaaaacaactatggttaaaaaatacccattatcatcaatgaaggcgtgaacgtgtaacgaaataaaagtcatcgatttcgtttgtggataaccatatcaattatttatttgtactcgtactcaaataaccattaacaaaagcgaatagagacatatatgttctctatcatatcaatttaattagtatttatttgtatctaatgtacagaaacgagttctagtcatcaattaagaaattcactaaatcttaacatcgtaatctaattatgataaacgaacaagttcaagtgaattgtataattttgtttttctatgctttactaattagatttcataaatttaaacaagttaaaaacaaattacaattattcatctatatcaaaatatggatttaactagagtcaaattcagtattaaaaacatagactttgatactattgaaaggaatttgtactgttttataacgatttataaatactaacaacaaattcaattgcaaggaactgtgtaaataaagaattaaatctagatcataggatttgaatatacctggatattatgcagcggaaatatgaatcatgttaattcgagattggtttagcactccaagaattgtgcctctactggtatccacacgcatacaaactggatcaaacccagaatgctagttcctttgagatctaatctcaaaacttagaaaaacaatatttctctttgtttttatgagttgaagataatttatcaaattttcagagaacataaccgtaataacggtaaccgtggtcatgcctacatttaaaacatattaatcatgccaaaatagacataccatcatcagtcgttaaaacaatttgataaattatcttcgactttctttctcttctctctcttaatccttcagagagagaatgtctccgatggttgtttttggtggcaacgacatgtttcttcacttgcgttggctctcatatgcccaacacagttggttacctcaacgacggtgactggttttctcgtccgatttcggtggattcatctccgccgttggtcggctcccgtccggaattgtctggctcacatagtagaggtgtccggctttcgtccagcaccgtcgcgtttccacggtggcatgtggctagctttctcctatgcatcctctttcctttgtttatctgtgtttttacttttgtttgcttttaataatctcacatacatgggttggtaatgacagtgtaagtaatctagctttctactgttatgttccgatctatttcatgttgagacttaattgcagaaatcaaataagagatctgagaatgatgatgaagataagaagtggaatccgtcgcttattaatcattgccaatctgctgatgtatctttaattggagcctctttactatctaccggtgagaaacccttaagaatccatgttagatagtcctatcatcagtgattctgtcaccggaactgaagctccaacggtggaggttgaagtcggtttgcttaagattgctcatctgacacgtggttatgtcgacgtgtgtttcaggattgagtcaaatccagttttcttcttctgtgagcaagatg

SEQ ID NO: 32234 - DNA, 3000 bp, Unknown
  misc_feature (1)..( 3000): 2750-1469P.txt file - cDNA_ID_3050466; gDNA_ID_2926138; Annot_ID_197321
taagagtttctcattacaactatagagtatagtcctttgacctgagttcgtcatgatttcttattcatggattagttcgctttgactctgtcaaacgtcagccgtaaaaggtgattataaagacagtgattgggcgcgttatgaattgtttaaggaacatggatggaacaagatgggatttgttcctcccatataacgggagataaatatctttgggcctatcaaaaatttgatactgaaaaatgcgtggctgcactcaaacgaggtgaatgtcagtcgtttgttttatcagtataaatcgaagttcgataaacatgatctagccgaataaggatgacaatttttttccttatgctgagatcgagatatagagacaaagggattatgggaataaatgattccagtacaagtgggagattgttgggaaagtcctgaaatcgtttgtactttattctaggtaaagttgtaatgtcgaggtttgacaatcacataatattaggtggttataatgttttgctagagagcgcttataatctatgagtttataattcattgctaatattatacgaacctacaggatcacacacctaaacaaattgaatcaaatataaaattgagtttaattttgattaactaatattgggttaaaagatttattatatatatatatatgatatataaattaaagtaaaagtatataatatatatatgatatatagatatacttatatttgtatttgagcacttaaataaataatgttatatatatataagatatacatatgtgcactaatactaatatgttgtttattctcgtagacaaagtcacgttgcatggattgggcttcgcccattgactttatatgcgttacgttacgtgaagctattataaaagtgatgcattatgacttttgagatcagccgttttgataaaaccctaaaaacaaagaggcaaattgtttttctaagttttgagattagatttcaaaggaactagcattccaggtttgatccagtttgtatgcatgtggataccagtagaggcacaacacttggggtgctaaaataacctcgaattaacatggttcatatttctgttgtaccatattcaggtatatacaaactttatgatctagatttaattctttgtttacatagttcctggcaattaaattcgttgttagtatttataaatcgttataaaacggtacgagttcctttcaaataatcttgcaaatgattcggccagctgaggaagaaagtatgtttggtgggtttagaaatcaattgatctgtgtttttgatgatataatgagatgtaaatttaaagagtatatataggttctacacgattaggtcaatcatatcttgatggccaagggaaatttattggtactttaactaattaggaattaatcattaatgaattttgtcaagatttaaggaagtgattatgcaatagtttttagtactacttaataatatccattttagtaagaaattaatgcaatatttgaattgttgatgaaaaatttgttcattgtcctaatgagaactaggttttaacacgcggtttaccgcgggcaatcggtttatttggttcttatactaaatatttgaataaatttgatatcctaaacttataaatataaatttctagtgattagtgaagaatcgtaatatatgatttagatattattaattattgattttgtgattgaatatagtgtttttagggatggaatgtgattatattttgatttcaaaaacgacatagattccttatttttgttgaacggtttagattgaagggaattaattttattgaatggtttagattgaatcggatcatataaagtttaggagattgttaagaccaaattacccttaatgattttgaatagcaaagaataaaatccaaatttgaaatcaaaattgaggccaaattagacaaaatttcaatttgtacttcccttttaataataaagggatatcttgtttcattaaatttgtaaggactaaacatataattaggaagttgactaaggatttttcaacccagaatacttactaaaaatgtatatatggataactaaatttaaatacatctttcttcaatatattttcttattttacatttttataaaaaaaaattaatataagaatcgtaaattttaaaaatatcattcaatgagataggtattgtgattaaatggctatcgtacttaaagatgaagtactaataaatttggagagattaataatcaattattttatttttttacaaatttaataaaatagaaatttatatgtagatactttttatattatttagtgacaaaatatttagaaaactttctatattttcaaatcttctttaattttcatatattgttttttccattttacaaaaaatctaaaaaatagaagataataataatttcataaatgaagtcattatcctaataaagttttcgatctactaattctctattgagaatctctaaaatccagtattttggtgtcccttgacactaggggtggtgtcgattgacacctacgcaaatttacgtctccaaattgcttttgcatcataagttctctgttttgatccagaatgttccataatctcaaaatgcatcccaaacatgtaaagacctgaaaaagactataaaagagtctagaaataacaaaaaaactctaaaaaccagtatttttatgcccggtccgaccggttgaaccgtgacccgaacatttttttggtttgggtttagtgctaaaacctgacaagttcaaaaccgtaaaaacccacaaaaactcaccattaacccgtgactcggttaaaccggacgggtgtgggttttaaaaattctcttgattttggaataaaatatgagatttaagactttattcaatcatttgtagaaatgttttcagttcttaaactcatttgatgttttagattttgatgaagacttcacaatgccgccttaaaaaatg

SEQ ID NO: 32235 - DNA, 3000 bp, Unknown; identical to SEQ ID NO: 32234
  misc_feature (1)..( 3000): 2750-1469P.txt file - cDNA_ID_3050466; gDNA_ID_1621145; Annot_ID_173008

SEQ ID NO: 32236 - DNA, 3000 bp, Unknown
  misc_feature (1)..( 3000): 2750-1469P.txt file - cDNA_ID_3050498; gDNA_ID_1621146; Annot_ID_56739
gtacctagcgccggaatatgcatcaagtggaaaattgactgatagatccgatgtattctcattcggggttgttctcttagagcttgtaactggacggaaaccagttgaccagactcagcctctaggagaagagagtttggttgaatgggtaagaatccaactttcaaacattcttcaataatagtaagattggccctagtatacttatatagtacttataaatgaactcacaggcgcgcccgctgcttctcaaagccattgagaccggagatttaagcgaactgattgatacacggcttgaaaagcgttatgtggagcatgaagtcttcagaatgatcgagacagccgctgcatgtgttagacattctggtccaaaacgcccacgcatggttcaggtaattctgactaaccaaaagtccaaagctcccatatatagtaacaagtgatttctcacatctgaaaacttatctactcttcgaaataaggttgtgagagcattggactgcgacggagactcgggagatattagcaacggaatcaaaattgggcaaagcacaacttatgactcagggcaatacaatgaagacattatgaaattcaggaaaatggcgtttggtggtgataacagcgtagagtcaggattgtacagtggaaactactctgccaaaagctcttcagatttctcagggaatgaatctgagactcggcctttcaacaaccgacggttctgatcatacaataggtgaaagtaacagatacctctgcctcctcgttctaaagccattcttttcgtatattacatttattggtaggtgcctttagtttttgccctctaatggcgaagttccctcagaaaaaagaaagaaatagaacctagataagttgtgaaagagttatttgtatctccgttctgtgttcttaatttttgtttgagtgaagaggatagtgaagaactctgtattctgataaaaaacgttcttcttataaatttgttgattctttaaccatgattcttacaaaatatactcagaaatattatggattttatttagtacctttgatatgtagagagacgactttatacatcacaccaagagactaataagaagtttgatagcttcagcactaagttccatacccataagaagaatcaaccagaaaagaaaaaaagcacaaaagaaatgaaagtgaggaagtaataaagacatatcaagtgatttgttcttaaacaaattaagatcattagtgtcctggtcggaactcgaaggaaggacctccacgtctgatctctcctttagaatgatgatctccattttccggtagcttgaacctcactgcatgtttgatattcggtggaggtggtcctcctccgcctccgccttcgcggcctctttcacctctcttgttatcaaacccgaattctatgtcctctcctccgtctcttccagaaggtttctcaattggttcaggccgtttcatatcgaaaccaaaatccatatcacctctctccctcggctcacgctccacaggccgaatctcacggctcttcttggaagaagctttctcatgcttcggatgcttgctatgttgctgcttagccgcgcggctttcacggttacatagccttccaaagacacaagcaagagccgacaagacaaagatcacggctaggactatgaagaccgtcccaaagtttccgcttgagccagaggaagaagaaggttttgtagaagggtctggatactgtttattgtaagcgtttggatacacaacaataggctgttgcatttgttgtactccttgatctcccattttctcttctaggttttggttttttgtttggttcttaaagataaatcaagacgtgttataagaagatgttggagttgtgagattttaatttttgtggagttccttgagtagagatcaaggagggttactcagaaggtacttgtgaaacaagaaatgtgaatatgcttcattccatgtgagattaggggtaatgcattattagtagaatttttggtttgaagaagttactatttaatattgtatcatacaaaagcgacaggtaatgcaaggaataaaagactaatgcgtctgaaaccaagatttttaaaattgagagaacattctttgttgtttttctttcttttctttttataaagaaagaacactaaagatattctttgtgatgtgtaagtgcaaggaagagagttgaactttggaacaaaaatctggaataaagtgggattttgtacaatttactctttcccaataaaattcaaaagatttatggagtgggctttaccaatcattgactcctttatattcccattactcactgttttacacacaatacgttctaattatatggtttaaagttcattgacaaaaaataaaaaaattggtttaaagttttaaacaacgtagggatagggattagtaaatagtaacgcacatttttgtgttcttttcatgccatttttgttttctttcactaaactgtgtctctttaaatagttgaatgttacctgtggttgattttgatttatcttttttttcccttcactaaattgtgccttctatctacagtatctatatcaacgctagccgcaaaggattttttttcttttaagaaaatctttcattccctcactaatcctagtgggcttataggtccattaacattcctcatgtagctcttgcttgtacgtcaagaaagaagtcacaagaattgagcttcctagttttttttttctctgccgtaagtaaacgtaccctacacacttcaccttcgcttattatttcagtttcttactatattttgtctaaatcttaatccaacttttatctacggtccctgaaaccatctctttgtcttttggcatatttccctccttaagtcaactatctctttgtctctatatcatctttctctcggacactctctttggatcgtcattttctctctatcgactaaattttaagagtggaatg

SEQ ID NO: 32237 - DNA, 3000 bp, Unknown
  misc_feature (1)..( 3000): 2750-1469P.txt file - cDNA_ID_3050502; gDNA_ID_1621146; Annot_ID_173048
gtttcgttggtcgtaaacagagaatttaacgtcgttgctgtgtttctcgagggttggacctaaatctggaaaacagaagaggtttgcggcggagcagaagtcggggaggcgatccggaagagcgttttcggaggcgagtttggcgaaggtggcggaggcgacggcggtaagtggtgaagccttggagaggagaaaggctgagccgggtgattggtgatggatctgtttgttccagtaacgtactaaagacgctttgggtgtgaacggatttatctccggtgaaaaaccgccgttagttaaccgttctcctccggctataactacctgcattgttggaagttacaaaaatttcaaaaatgatcaaaagaataaacggaaacaaatccaataaaatctgaagtgaatcgattatagagaaatgaaacaaacggattcaaatgaacgatttaggtttgacttacatggtagagacgtgacaagaaaggcagaagaaaaacaaattgtttgcgcatttttgttgagagttagaggaaacattcgatggagacagagagagtgttggtgagttattatcgatgcaaatgtgtgtatatacacatttctaagttggaagttggaagttggaaccaaggcttatatagtttttaatctatgaatcaatcaataccgaaatgtcacattttactctattaaaatctctgaataaatcgtattagaaaattttgattaagaggaagagataaggaaacagctctaaagactaaaaaggactaaacgcactaaacattgcccacttaacactcatgaaaagatacattactttttgttggtagaaactgtttcttcactaactattttagtattcatacctattattcgtttattatatcaagtttgaagtttcattaccgatacgtgacaaggacaaacatataaaaatgtaagaagataaacatattaaaagacaaaggaaaccaagaagccatcagtcatgacgcaatgatgacacacatttgaagtcccatcacttcacacgacaacatttcttctccacaatcattaacaaagtgattcaagcccatctcgagttgcattttggttaaacttctatttttatatataaccccaaaatagaaagataatcattatggtcgttgatcaacagaggcttgcagttactgtttacttcactaagaatatggattttttgaaacgaggcaaagacaaagagagtaataatgtagcacaaaagccttagcgtgtatgatgacattacaaaagaaaaggtatcacgaagtcataacctaagccaaaagctctgcattcaacttttagagccatcatcactcttacatagcttagtgcaagacatcagctgatcagggtttaactcttttcttgacgctaacataaacggttacggatttgacttgtttattcttgagggcgtttctcctagtggtatttcgaggaatttgtcactcattcaacgacgtttacgagctcatactcgataagggacatgttggtgtcttctttcactttgaagctcgcaggctctgtgacttcaacacgaccccacttgtctacagctagcctcattgatcctttatacatgtcgattttcgcattgcgtagagttacagttgatccctctttcattaagtccactacacacaaaaccaaatcaagatattactagctaccctgtaacattactagaatcaagtacacaaaccgttatatgaacgttttgtttttcaaatgatttattgactgaagtaaagtaccttggtcatttcttgcggtaaagacgatcactcctgtctcgtcaccaacaatgcattcagaaatccgcaactggcgagcttgaggaccatcagcacgacctttctgtaacaccattttcgtgctgacaatcttcacattgacattgtgtccgctagtcccaggacgcagctgatcaaccttagtgaaagctggcttcttcaaccctgctttggtggaatctgccattttcaataacaagagcctgcattgacaatcaatcatttcacttcttaaccaatttaaaatagatcaaatcttctaatgcaaatgctgatttataagatttagataagattgacacaagaattagaaagcagaacaatgaaggacattccatataatcttaacaacagaaatttcatgtaaaggagatgactttcgaccgagttataacaatgaggcaaaacccgaaacaaagggaaatcgaactcaagcattaaacatagtgcatgcatcattattacaaaaagctgggcagatttgaaatcaagacaacaacacatgaacagcaatgtatgagtataagagattcaaaatcaaatatcagggatttagttttttttatcaatagcttacctttggataaatcgaaggcggagacgaacgagaaatatctgattgacgatttccaaaaacaatcgagctcggagaaagttttctcccttctcttttttctagttctggggaaatggacggtggatctttaatctctaccaaggacccaatcataatttaacacgtgtactgatcgtgcttcgttgtgcgcggtttctatggttaatctcatcgtgcctagatgatcgacttttagtactgcgttttctcaactgttgggcttattcataaagcccaatttaaagtttaggcccattaatgtcgattgtatcttcttacgtaaaaattgtacattgtaatgttcaaaaaccgaagtgttttgtgattgttctagacttctgtagttctaaaagaaatgaaacaaagatgaatcacaaaatcagcaccagatcaaaaacgattatgggccacaatttttgtgatataaacattaaaatgacaaccacaagaaaatatcaaccaatcaaagaaagccacgaaacagagtattttaaaaacagaggaaagcgaaagagataagccttttagacaaaactagtggcagactgaaaaatg

SEQ ID NO: 32238 - DNA, 3003 bp, Unknown
  misc_feature (1)..( 3003): 2750-1469P.txt file - cDNA_ID_3050534; gDNA_ID_1621146; Annot_ID_56735
tggacatggaatcggtatatcatcaaattcctagataatatccttttcaaaccaaattataattctctttttgcaaaatctttggaatgatcgcagcattgaaagtcttgggaaggataacacgacaggcattgtaacacaagttgtcttggacactgcgttgttgagagagacaactaatggactcagaatcaaaacataccaggtaaacaactaaaagcttgatcaaatctttaataaaacttcgatttggtttgatccgcatcaattttttctcttacgagcagggaggttctggttacgttcagggtattcgattcacaaacgtagagatgcaagatgttgcaaaccctatactcatcgatcagttctactgtgattcttcaactacatgttaaaaccaggtttccttataatatacaatacaaacttgtaattgtgattcttatatcgaaccaatactcagttatgttctcttcccttttttggtataaatgcagacctccgcggttaaaatcagccatataatgtaccggaacataaccaaaagtgcgaaagccatcaaatttgcgtgcagcgacacagtcccttgcagccacattgtcctcaacaatgtgaatcttgaaggcaaagacggtcaagtcgaagcgtactgtaattcagctgaaggatttgggtatggagtctactcgcacaacgacaaaggcttggaccagactcacaagtcagaggaagccgagactggccacgatgagctttgatggtgatgttcaaagtgttgttgtagtgagggatgataggtaaaatagtttaatgaagcatatggtacagtaaaatgatcttatgtttgtgttcataatcaaccataactaaggttgttgttaacagcatttgtccaccttttgtatcaaatatttttctttccccatacaaattcatgtgcaagtattttttcaacataaatttttgaacttggaagtttattgtttatgaaactgaaatacgtattgatatcggaaactaagttatatagtagatgtttagataagttagttaattgtcttagactttgggattagaggaacaagaacaacacatcacatggggactccaaaggtcgcaattgatatgaattgtttgatatgtctgtcacgtgtgaaaaactcttcctttcttcacaattatcattttctatatatatatatatatatatttgtcaaacaattattttctaattaatattcccaatttgtgtgtagctgtaaacatcaatgaccaatgccaacccattttatttactctttcaataacaactcaacaactacatcacctaagaataagatatagtcttggcttgcaatttgcctgtaatgtgaaatcaaatgatcgattatatggtataataatataatgataacatattaattccctcatatggtatgaatagtgaattggttttgtctatatccataagaatgaaaataaagaaataatttccttaaaacaaagaaataaccaaactatatgctataatggacccggagaatctaagtcgtgcgagaataatgattttgtttaccattaaaaacaaataattgttcatgctcattccatttccaaattattctgaacaaacaagatagagagagtgcaagttgtaagaagcagattttttttggtttttctctaaaaccaaactaaggagatctctaagttgtggcagagaagaaagcttctaaggtaaaatcacaaactctccactttttccaatatcttattgactcatattgcatttgctttcaagttctgataaatctctaaaaggtttatgacttttagaattactctttttgatatttaaacacattgttcatatgactatgcagatccagatcattgttttttttccagcttttgaaactaaacattcacaaatccaaccctacatcatattccttgtgacaacattgttgtttttttgttgtctatatgtttttcaagtaatacaagtatagaaaaagctttatctacaatattttcatcctgaaaagaagccaaaagcaaatttgttacaacattcttgataaaataacacgtcattagagaattaacaaagttttgaagcagagggaggaatgttcaatactagaaaattaagaccaaaaagtcaacatcacttttataagagaaaaaaacgagtacaactgtaacatttacttcgactttatctacgagagtattgaacaagtgggatgcaattgacaacctaaatcatggctcatagttacaaattatatatgactaatcattttccttttctcttaaagttgtttatagtttagacaataataataggagatgaagagaatgtgatgctactaactcttatttaaatgaggaatataaacaagatctggtcctgacattgttatgaatcttcaaactcaggacacaaaccaagatctcgtgtagaggaaaaaaaacctttcctccatgtttaagttttgagcttctggttggtttcaagtcctgtggagaaaaatgtcaccatttttgaagttctttctctttctctatgattatctttcaccttcctctttctttctggtaaatcatttcatctctctctgttttacatactcttgatgattcttgatttcacaatttatttaatcctttttttttcttggttttgtggggtttaaggtccaaagaaataccttaggagcatcattagatactacagatggggttgtgagaagtggcataattggagagattatatacatttggaagcagacaagaatctttgtctttataccaatcttgaaatgcttagtgacaatatgtttggtaatgtcccttttgttgttcatagaaagagtttatatgagcatagtagtagtgtttgtgaaattacttagacgaacacctgagaaagtacacaagtgggaacctataaacgatgatgaccttgagcttgccaatacaaactacccaatg

SEQ ID NO: 32239 - DNA, 3003 bp, Unknown; identical to SEQ ID NO: 23731
  misc_feature (1)..( 3003): 2750-1469P.txt file - cDNA_ID_3050534; gDNA_ID_1621146; Annot_ID_173026

SEQ ID NO: 32240 - DNA, 1588 bp, Unknown; identical to SEQ ID NO: 7435
  misc_feature (1)..( 1588): 2750-1469P.txt file - cDNA_ID_3050538; gDNA_ID_1621146; Annot_ID_173025

SEQ ID NO: 32241 - DNA, 3003 bp, Unknown
  misc_feature (1)..( 3003): 2750-1469P.txt file - cDNA_ID_3050542; gDNA_ID_1621147; Annot_ID_173082
ttctcatagcccatattgttacacagctgtagaagttgctgtgcagagccaaaaaaacacactcaatgaagatgataagataaatttataatgttttgtctgctcttgcgatattgacaaacatacctcgtatgtcatatgatcagtatccatccttaattcttggtagggatcagtatccatcctcaaaccctatatcaataccaaacatacagaaactcaggatcaaacaagcataaacccaattcaaatccagaaataagaaggaagatgctcttagtacgactgcaataaaaatttatatcatattaacaacaatttagctatggtttaattcacagcatataaaaatatgaaaaacctctcatttcttgtacataatttttagaatcaaacctataatatattaggaaaatttaaactaaaaatgtggatagtttggtcaacaagagaggagccaggcgaatatattaacaagtgcgcaatgtgcatacattccaaaagagttgggtatcagatcctttttctatgaataacttcattcatgtcccgttacttttcccttacccttgtttctttcgagagaggggaactacaagaagcaaagaaaaaatcgaattttcccggaaataaaaacaaaatttctgacgatagaatgaaaaggagattactttttctatgtgcttgacaaaataagaagctaagaaattaggtagtttaagaatcaacgaagaagaagtgaacaagccagtgaaatcttgttcccttatatcgatatccaaccttgagaaactcagaatcaaacaagcataaactcaagtcaaacccaaaaatatacaaaaaccctattctattcgagtaaacccttattagaaaacaaaaactaaatcgatatgaaaccctaatctattcggaaaaaaaactgaacaaaaactagcaaaaaaccctaaatacctttggtcgcttccggagctttttttttcgttttgtggcttgattacgtcgatggaggtggtctgtataaccttctgccgatttgacttctttgattgacatatcgaaaataaatggaaagtaattattacaatcatacatgcatgtcaaataaaaaaataaaataaaaattccatttatttaatataatgttcgtttgttttcgagatgtaatacgaacgtgaactagtcaatgggagctaattgagaaaaaataggaactaaaaattaatcactaacaaacttcattttaattatgcaaaaagaaaatttaaagtgtccatgatttattttcctagaaaaggcatagcttaatacaaaaaacaaatacctgcaaaatcttcatcgctactgttaacagtttcttctcttggtgggattttatttaaatcaaacaaaaattcatctccatcatcactataaacagttttttctggaatttcatttaaatcaaacaaaaattcattctcttcacttagaagtgacatactcaaataaaaatttggaattgtgaagaaaattagaaatcatttttttttaaaaacttacataaacatgaatgattcagaaaagttttagtttggctccgatgtaaaatttttgaaattttttgtttaaaattaattatgtaatggttgcacaaaaaaaataatcaattatgtaaaaagttgctccattttttcaagtaatttgggttgtttgagagtttaatgcgtaacgtttaatattactctttaattgttttaattactttacttgattgtttttattaaataatagttttgttaattactgtgctaaacctcaaaacatctgatatattgagtaatttatatatccaaataacctaggagaccaaaagtctattaggttaaatgaagacgagttctagaactctcataaaacctttgaaaaaagctattaaaaaaaatctttttttttttgagttatatatcttgatactgtctagcctaattatcaatgcttaattttcgtacttaaatactatcatcaattcatcatggatttcagagcggatactccaatcttctttgcattttatcttttttttaccgtttaaggttaacataaaaaaaaatatattctaaattttttttttactgaaaaaagattctattagaaatctaagtgcaaaaaaaaatgttgattgatggaggttaagatcaaaatatgaattttgtcttcttgcatattaaaaatctaacctatattttacatgaacgtaaatagatgattttatgagtggcaaaaacgaactcaccataaaaccattagtaacacatgtagtacaaacccaatattgaataggaaccgtactacttttctaattatttaaaattgcaggagtggtatgtcttggagaatcgaggagacacgcatcgagtttaaatgtgtggtcggagagaataaaagtgtgtgcagatttgcttaaagagtgaagggaaggtgctataaaaaaggatcttgttggccacgagcttcttccttttcgtcttctccgccgcaccctttgggtcaacagttaaaccctctccattacgcgtgtgaatatacacatataatattcacattatataagattatgtttcataacgtagatcctgcctgttctatatacaacaggttttggtatgagacgttagatactttaattcatctggtcaaatgcctagctagaataaatatctttaatcacgttcaaaattgattttatacgaatacacttataattaatttaattatgatatatggtacttgctttaccggccttcttgtaaccttccttcaaactctagctgctcatcaattgaattaacaaacaaaaacaaatccaagtcaagtgatcttaaatccagctcattcttattcacgtgccatgcaaaatgatgcatacagtatatataagggacacacacaaagacatgtaaatattataccatccaccgattaagctacatatcctctcagttaattctctaattcgccatg

SEQ ID NO: 32242 - DNA, 3000 bp, Unknown; identical to SEQ ID NO: 7495
  misc_feature (1)..( 3000): 2750-1469P.txt file - cDNA_ID_3050566; gDNA_ID_1621148; Annot_ID_173146

SEQ ID NO: 32243 - DNA, 3000 bp, Unknown
  misc_feature (1)..( 3000): 2750-1469P.txt file - cDNA_ID_3050570; gDNA_ID_1621148; Annot_ID_173145
attacgcccaaagcatttcgtggaggattctctttttccaatcaagtaagaatgaaacaaattatatcaaacagcttataatttcagaatatttaatttattattgttatcttgcgtttgaacttgcagcttctacaaagttttgggatatcgctcatgttcttcaccggaaacttttttcattggagaacattagctcttttaagtaactatattttttctctaaatgaactatatctcaaatcataaaaaattataatgtgtgtacttaattcacattatttaacttattcttgattttcaatctatgactaggtgcaatcccatgtggtatccaaatgatatgtttattttttattcctgaatcacctagatggctggtaattcacacacttaaagtttgttttttatttgtttaattggtaatattatatttaaaaggtacagtctacatattaatgttcatcttaggctatgtatggtagagaacgagagcttgaggttactttgaagaggctaagaggagaaaatggtgatattctcgaagaagcagctgaaatcagagtattattgtttgttccgaaaatactactactactttggctaacatatacgtattttggttaactattaattcggtttaaaatgtgaaacaggaaacagtggaaacctctagaagagaatctcgaagtggactaaaagatttgttcaatatgaaaaacgcacatccgttaatcgtaagtctcatcaaatacctatcatttatacaaataatttagaagagatcgagttcttatctagttttgtgacctattgatgatcaacttaataaacagatagacatgtatttatgcgtatgtagatctaacattctgcctatacgtatgaatgaaatactcccaagtcctaacggaaaaaaatgttttaacttgtttagtgaaataaataaagattaatttgtttttgtttgtttattaattcgttgaaaacgattagattggattgggcctaatgctcttgcaacaattttgtgggagttcggcgataagtgcttatgctgctcgtattttcgacacagccggtaaaccatgatttaaaaaaaaaaaaaaaaaaaaaaatcattggcatgtcatatcttgtttgattttgtatcgcatttcatctcacgatttttgaatatattgtcttgggtatttaggttttccaagcgacataggaacatccatccttgcagttattttggtaaatcaaaacattgtctttttagtatttaacattttataatcgaaaatatagtatttcacattttcactacaacttattcttgtttttaggtaccgcaatctattattgtcatgtttgccgtcgaccgatgtggacgccgaccacttttgatggtaatcatttcattaccttcgttatatataatttgcgtaattgatttccctagataaatattttatttgtggtttgaaactttttttgcagagctcttctatcggtctgtgcatatgttcatttttaattggcctctcttactatcttcaggtttagtcatcttaactattttattctttgtaacttcgtttgatttttggttattatagactaaatattatttatcccccacaagcagaaccatggtgattttcaagagttttgttcccctatcttaatcgtcggtttagtggtacgtgaatgccaatcttgtttcagtcaattactatttttggtttaattcatatattactttgttgaaaccacaacactaatcaaccaagtcatactatataccagggttatgtcttatcctttggcattggtctaggtggactaccatgggttattatgtctgaggtatttgtttttttttttattttaaactagaaatatttcataatgtaatcattatctttttttttttttggacaacaatttattcattatctatggcaggtgtttccggtgaatgtgaaaattaccgccggtagtcttgtaacagtgtcaaactggtttttcagttggattatcattttcagttttaatttcatgatgcaatggagtgctttcggtaaatttctatccattaatttgacatttttgtttcttcagaatattacacatctaacacaaaaatgctttatttcgacagtatttaataattattacaataaaatgaaaataaataaataaacaaacaaccagctcttaaaattgtttaaagagtatagggttatgtataatcaaatcatggtaaatatatcttttaaattattaaaaatactaaaacgggaagattagagaattttatgttaggaatgtcccctcgaattaatattttcattatataataacttagatatgaaattaaagagaatgattatatagttattttgttttattggaatttgcaggaacatatttcatatttgctggagtttctctgatgtcattcgtatttgtatggactttggtgcctgagacgaaaggccgaacacttgaagatattcaacaatcactaggccaactttcataaatccaaagttgattctttactccacaatgccagacattgttcttttatgttacatttataagtcatgtattatccgatttggaggggggggatatggatttccgaatttttttactttgataaattttgtcaatatattttgttgacagaaaaaagaataatcaatatactgtatgtggtattattctaacaatattttttaaacgtataatatgattatgtaccaatatttataaccatatcatatgattatgtacttttgtaaaaaaaattcacaccccacttaaaacttggttactactaattggatcttgcaactcaattttctaaatcgcattacaaaatactgaatgagcaaattaataaaagattagtcaaatgtgacaacgaccaatgaggcatggccaaataaaagcttgaagagactattcaaagttaaggataagaatcaaagaaagaagatg

SEQ ID NO: 32244 - DNA, 3000 bp, Unknown; identical to SEQ ID NO: 7497
  misc_feature (1)..( 3000): 2750-1469P.txt file - cDNA_ID_3050574; gDNA_ID_1621148; Annot_ID_173142

SEQ ID NO: 32245 - DNA, 3000 bp, Unknown; identical to SEQ ID NO: 7498
  misc_feature (1)..( 3000): 2750-1469P.txt file - cDNA_ID_3050578; gDNA_ID_1621148; Annot_ID_173141

SEQ ID NO: 32246 - DNA, 3003 bp, Unknown
  misc_feature (1)..( 3003): 2750-1469P.txt file - cDNA_ID_3050586; gDNA_ID_1621148; Annot_ID_173133
gcgaatattttaaggtaacaaccagtacaacccacatctgatgtacccattgcgaaggacaaagagaaagatgaagaggacaggtccatgtgaaatataatagcttattatgttgattttacttacaaccattaaggttgcagcatggaccaagaaatataatagctttatgatgattttaggcaagttgctgaacttgattcctatgaaaaatgagatgcacgcatgtcaaaagttcttcaagtgaaagaaaagtgctatttgataccatcttagttttctctcttcagttattaactatttgtagtagtggactattcgggaacaactcatttctaatgaaattttaaagcttggcattatgtaagaacacatatatatttcagattaggttttcgtttgactgacgagaaacaaaataaagaatgtgcaagaaaaattggtatacaaattatttaactatttttacaaaactgtgtaatcttccaaacctaatttcaatgatattatacttctggtgacgtgaacgttctcgtaaaacaaaaaacaaaaatcatcgaaattatacttacggacaaagagttatggactatctattttggaaggagaaaaagagaaccatcagaaattgcctacaagagaaccatcaatgataaactcagattttgacttttgtacccgaaagagaaagaaccatcaatgaaactgcttgcgcgttagtctcccaatatttttcccagctttgatgtttccttaaattcctttttgggcaaggttacaaagaactaggctatgctatattgtataatctaagcttttcactttgattgatttcatatcaaaaaaaaaaagaaagaaagaaggagcatatgtgatgtaattggagagttgtttagactaagagaaaaatgtattcagtggaggctaaagaaattcttctcgaaatctgatgcaaaacccataactgaaagaaaagaagaagaaagaactctttgaattagttcccgagccaaagatcatatacataaccagaattacgacgaaggagttacggatgtttaggacgagagccaaagatgttctaacaatatgtaaccaaatgaagactttccaaatattaaaaagagcccttatgagataaaaaaaaaaaactttgttggcctgtttttcaatgcccaaatatagcgatcaagattttgagatgaaagttatgaccattaaaggagtatatatatccaattgtccatactagccagcgaccgtgaatgctgcccaataaccaacaagccaaaatgaccattgtttacaaatgtctttctcatttgctgttttccgacagatagagtaagtgtatatatagaatagtactgaaagagagggccgggggacttatatacgttttgaggaaaaagataaacaacattagagtaagagcgagatatatacacttatataaagtcatgtctataagaaagttcaaatccaacttaaaaatatatactcacaacaaataaaagttacatcacttcgattatttagagtttataaaactaattagaaaccgaactctttttttcttcaaggtcgtgttttggttttaggcttttagccctaatttacaggtctttctaaggctaaatctactataaaatgtaattgcatgcctagggttcaaacatgaagtctcctctccctcaaataatgtcaacttggaagacaacacgattgtctccctgtattacatgtctaccgagaatagatgtacaatgtaatttcatggattatgtttaacccgataataaattggtgtgggatgtaatgatttattttctttaatttaagaaattataagagttgacacaataaaaattagagaaaaaaaaaacatggcttttctttttactttatttatttaccctgcttcaaaacacaagagaataagagaaaagtgtattttgaaacgtttttgaatgttagtttggttttgtttgatttatagtactgtttaacatcagaaaagacaaatgagtttaaaaaaataataccaaaaaaagaatttactagatacaattttaaagtggaaatatttttaataacttggatcctcgtctaatttattcataacatttatgtgatatattatatatataggaaatgatttattagatagttgactaaaactatatattagatgctattatttgcataattcatatagttatttattatgaaaaaagagaagaataatcagttatgtaaaagtagaattttttttttttttttaaatgttatcggaaaaactgtatacagtaataaaaaagagaaaaaaaaaaaaaaccatatctttgtcgatggattaaaaacaacattttcattacgcagcgcttcttcgccctcagattcttcttcaccttgaaagaccattaacatcattccttgcccagatccaaacaatgccatctccactctctctatttagggttctctccaacttttcaaatccctaattcttgctccctcccttcaatcaattccgatcatcatcgaggtctctctactccccgaatttaaagatcagagccgcgacttcctctgccttcttttcctcggaatttttcagctacgttttccaggtggtgtgtattgtcaatcagttgacctttgcttttgtagccagatcgttcgtgctttgagtttagggctcttttacaaggtttcgtgttggtggaatttctctacctaggtttgggggaagagttcagtaatttcgttgtagatcgtgatttgggcttttagggtttcggtttactggttgctggaatttatggtagcgttattgaattcggactctctgcatgtgtaagcgttgaagtttgaagtttcaccgggttttgtttcttctgctgaagagtcgagattattttacgcattaagaatcgattcagaaggtttttaggaattagtttctgtggattgtaactatataactactgggaggggatg

SEQ ID NO: 32247 - DNA, 3003 bp, Unknown; identical to SEQ ID NO: 18506
  misc_feature (1)..( 3003): 2750-1469P.txt file - cDNA_ID_3050615; gDNA_ID_1621149; Annot_ID_173179

SEQ ID NO: 32248 - DNA, 3003 bp, Unknown
  misc_feature (1)..( 3003): 2750-1469P.txt file - cDNA_ID_3050623; gDNA_ID_1621149; Annot_ID_173175
gattctcagatctccaccatcgttacggattatccacaattgcttgtagctgatgctgagaaatcacttgctcccaagcttcagtttttgcagtctagaggagcttcaagctctgagctcactgagattgtttctacagttcctaaaatcttgggaaagagaggccacaaaactatcagcgtattctatgatttcatcaaagaaactttacttgataagagttccaagtccgaaaagtcatgtcaaccttttccacagggtaatctggagaacaagatcagaaatttatctgttttgagagaattggggatgcctcacaagttgttattccccttgctcatctcttgtgacgtacctgtcttcggtaaagaaaaatttgaagaatccctcaagaaagttgttgagatgggttttgatccatccacctcaaagtttgtggaagctttgtgcgttgttcaaagattgagcgacaaaaacatagaagataaagtcaatgcgtataaaaggttaggctttgatgtggaatatgtatggacagtgttcaagaggtggccaaactttctgacacactcggagaagaagatattgaacaccattgaaacatttctaggcctagggttcagcagagatgagtttagcgtgttaattaagcgctttcctcagggcattggattatccgcggagatggttaaaaagaagactgagtttttggtaaagaagatgaattggccactaaaggctcttgtttcaaaccctgcggtgcttggatacagcctagagaagaggactgtcccaaggggtaacgtagttcaagctctcatctccaagggattgatcggaagtgaactcccttcgatatcgcgtgtcttcgtatgtaccgatcaggtgttcttaaacaggtatgtgaagaggcatgaggacaagcagctggagactgagttgatggctatctatcgtgcttcatagatcacaaggctgatcaaggattttggtttctatctttaaatatctgaaatcctcaatttagactttagttctcaatttcatatcgatccaaactgtttgtctctctctatagatgcttgaaattgtaagttttgaatccattttctgctatattactgaagttaaattccaaattctttgtgaccttgttcggatatagatttgaatgatgcaatgcagctcctgcattcttgaattggtcatgtaagccttttctatttctcagttagtgtttactttcacattattctttaaattttgggattggagtactgaaattacagctactgataccaaaatcctcttatggtacaataaagtctttgctttatatattctttgctcctgagatcctggagtcctcatgtaagctctgtctttgctttatatattctttgatcatatgattcatctgatttgtggaatgtttgtatttcagatttgtgatcttggtttttactcgtacacgttttttgtgagctttatattacattgtcttgaatatattgtcaggggcactggaaacctatcctacatcattaggacacatcaatcagataatcatccagtccaaggtggtaaaatctttatatctagcttctagctgaagaagcttgggacgttgaacgttgttttgagcttttgctatggctaacgacctctggagtgaatactcaagttttctctctttgactcgcaaggtaatatgcttattagcgttattataggtacattgagatagtataatgtgttggttgtttattaatgtgctcattcaatgcatttgctcgatatctctaggctatctatcagaactatcttttcctttacttgatcttattgagttttagacgtatgagatatggttcccttgaaagaatgcaatctacaagtttacaatggtacgtcaaaactgtgttaagtttctttcatcattgaagaattcagaatcttgtttcaacttggactcagcaaacacttttggcaattgaatctcttatttattctaggaaaattacattatcaactatttgttcgttcttgataggaacttgagggtgaatctcttggcgcagaaaaaatgtttcagagaactttttcttatagtttgtgattctcatatctttttttttcagtgatgaatccagaaactattgaagagagctattcatacagactatagagcagtcaccattgttacatcagagcagtcactaatgttgcatcagagcagtcaccaatgttgcatgttaattttgtaggatcacatttggttgacagtaaccagattacaaatgtactctggtatacatacagttggttcgtgatcaacaattgaatagtatctaaaccagaccaaaatgaatccggttctgcttggttaataataccaagtcttttaaattgatgcagaacgtgagatcctagtgaaccaaactgaaacaatatctgaagatgacaggaggcgtaatgaggctagagtatgcaatttgaggtcattcctaaatagataaagcaaatgacatttggtgaatgaagaagctctacaaccatatgttcgcaatttaaaacaaaccgatatcgtttgagatctcagaaatagtgtgatcaccttttttctcctccaatttttgaagatctcaaactttgttttgggcttgaaacataatgtccatatccgcctgccgtgatactatatgggccgagtcaggcctgtcaggcacctgactcttttgagaaaaaaaaagaatcataattgaaattcttcaaggtttactatcggtggagcaacacataaaccctaaattttgggatttagggtttcgcgatttggaagcggattcatggtgagtttcttgttattgttcgtaattccagagaaattttggtatctatgattcatgactgcgcgattcatcttctcgaattgaaacagagagtagttgggtcggaatagctttcaacactgtagcatttgtagcattgtcttttgtaatg

SEQ ID NO: 32249 - DNA, 3003 bp, Unknown
  misc_feature (1)..( 3003): 2750-1469P.txt file - cDNA_ID_3050626; gDNA_ID_1621149; Annot_ID_173174
gaaagggcacaaaactatcagcgtatactatgatttcatcaaagacactttgcttgagaagagttccaagaacgaaaagttatgtcattctttgccacagggtaatctggagaacaagatcagaaatgtatcggttttaagagaattgggaatgcctcacaagttgttattctccttgctcatctccgatagccaacctgtatgtggaaaagaaaaatttgaagaaaccctcaagaaagttgttgagatgggttttgatcctaccacctcaaagtttgtcgaagctctacaagttatttacaaaatgaacgagaaaacaatcgaagaaaaagtccatctctataaaagcttaggctttgatgtgggagatgtatggtcaagttttaaaaagtggccaatctcgctgagagtatcggagaagaagatgttggactccattgaaacatttcttggcctaggattcagcagagatgagtttgccaagatggtcaagcactttcctccgtgcattggattatctacagagacggtcaaaaagaaaactgagtttctggtgaagaagatgaattggccactaaaggctgttgtttcaaaccctgcggtatttggatatagcctggagaagaggattgttccaaggggtaacgtaatcaaagctctcatgtccaaaggattgatgagaaatgaactcccttcgatatcgtgtgtcctcatgtgtaccaagcaggtgtttttaaacaggtatgtggcgaatcacgtggacaagcagctggtgacggagttgatggctatctatcgtgcttcataaatttaaactctttctctctctttaaactgtaattttcccatatattactgaggtttctagccaaagagctgcaggggacatgtgaatccaaattctatgtttgttgatttcttctaaagcagagatagtttctgaattcactgtgacattgtttggatatggagttgaatgatgcaatgcagctcttgagttctacgattgatcacgtaagccttttccgttcctcaagtagtgtttgatctttattttcacttttttctttaacagttttgagataggagtacactgaatcacagctggtcataccaaaatcctcttatgataattaaaatcttgctctgtcgttgctttatatcattcatttgatttgtgagatgttttaattctcagattggtgatcttggtctttacttgctatggcgtttcatactcattttttctgagcttatggtacattgtcccacatcattaggactcataaatcatattatcatccaatccaggttggtaaaatctggaatctagctattactctagaaacttcaaagctctggatggtttgaagtttggtgagtttttgcgatggctgacgaccattggagtgaacacactcaagtttatttctctgtttgacctacaaggtaatatgctttttagtgtacacactcaagcttattactctaggtttattgaataaatcgaaggatatgatcatcgaaaccgtttcacactcaacgttgttatggggtatcattgagataatgtattgctttggttgttcattaatgtgctcactcaacgcatttgcccccaatatctctggaaactaattgtaacagaactctcttttccttttttttagtcttattgtgtttttagccatatgagatatggttcccttgtaaaaaaggcaatctacaagtttacaagggtacgttaaaagttaaaactatggtaagttcctttcatctttgaagaattcagaatctattttcataaaagtttgcacctttaacctgaatttagctatgggatgatcgaaggccatttactttacttcttagagctttgtttactcagcgatggacctgtgcaattgtgagttgctagaaatatttctcggaaaaccttattcgcagtcgtatttgtggctattcaggtcttgagaaggaaaggagaattaggaagtcagaagagatgagaaatgtttcaaaatagctctttgaaaagttgaaatatcggttgaaaatgcttggtggtttaaaggtggaggtgcaggtcctgtggctatatagagggtttaatattttggctgagggattatctattgttgagaagcttggtggttcgtatactgaaggtaaattatgatctttgtacagtttctgataccgtcatatactctcattgatgaacttattctggactgggtgctggtgatgtctaattctctgtattccggaagaggtaaaaggacttgcattttagcagaatcacggggaggaaccaaaaagcaaagctttctatggaaaaaatccaaggccttttacttttacttgttagagccagaaaaatggataagctttgtttgccctgcgtttgagggtttcttaaattgttttggatgatgaaatgaagaagtttctgttgttgcttgacattaagttctgttgtcttgttactttggtgttctaacaaaccgaccttaactcgtgcatgatatacttaacttcaatgttgtcacgacaagtccagctccggttccttggttattcaaagataactgtacacaacacacaacacacactcttcactagacataatttgtaagaaatcattactctaagaatctcctcaaatcaaaatatgactttgctctgtgatgcatttatagtctttggaaaactcagtaaaaatcttcacatctctacaatattcatggaatttataaaacactctctttgtagctgtagccaagtggtgagacctgggttcgaatcccagcagtaacattaaccttattaattttgttaaagagaataaattaaaggacgacgtataccaattggcaaatcattagggtttatgaaattttgagtgattttcagagaagtttgaggatgactgtgtgattctacttctcgaattgaaatagatagttgggtcataatcgcatatccttgtcttctgtcatg

SEQ ID NO: 32250 - DNA, 3003 bp, Unknown
  misc_feature (1)..( 3003): 2750-1469P.txt file - cDNA_ID_3050629; gDNA_ID_1621149; Annot_ID_173173
atgatcaaagagattatctcagaagttgatgctgataatgtaagtcgaatatctcaatttataaaataccaaacacaatttgtttagtttaatgatagttttaaaatgttctaattcatatttttgtttgtttttaaaaaaggatggaagtataaattatcaagagttttgcaatatgatgaagagctgctcacaatcacaccaatcaaaattggttcaaccgaattaaggaccataatctccgatttaattcatttttagttcagtacataaaatttcgaatgtaatttggataaataaactgtccataatattcctcatacaatttgtttttggtccatcattggtattgtactctccgtaaaccgatttcggtttaagaattaaccgaattattttttttggcgaaaaagggttgttcgtcgtctacaactagcgattcatttctcaaaattgagtcagatagttcggtagaatcttttcaagccgtgtcatttcttgttcggtaacagttttttctcttgtcatgtatgctctgatacaccatggaagaaggttggtccagttacagaaattgtctaatttcagagtttcagttcaaaacggatctgctttgtccaattccttctcttttgctagtgttgctgatgcgacccttatagatagccttaaaggtaacaactttacagtctcttacctagttgattcattgggtttaaccacaaagctcgcagaatcgatctccaagaaagtaagcttcgaggagaggagaaatccggattctgttctgagtcttcttacaagttatgggttcacaaagtctcagatttcaagtatcattactatctacccacgattgcttgcattagatgctgagaaatccattgctcccaagcttcagtctctgcagtccagaggagcttcaagctctgagctcactcagattgtttctactgttcctaaaatcttggggaagagagggcacaaatctataactgtatactatgatttcgtcaaagacattatagaagctgataagagttctagttacgaaaagttatgtcattcttttccacagggtaacaagaagaataagatcagaaatatctctgttttgagagaattgggtgtggctcagcgtttgttattccctttgctcatctcagatggccaacctgtctgtggtaaagaaagatttgaagaatctctcaagaaggttgttgagatgggttttgatccggagactacaaagttcgttgaagctctgcgagttatttaccgtatgagtgacaaaacaatagaagaaaaagtcaatgtctacaaaaggttaggctttggtgtggctgatgtatgggcaatcttcaagaagtggccttcttttttgtcatactcagagaagaagataactcatacttttgaaacccttaagagttgtggtctgcttaaacacgaggtcctgttattgttgaagaagcatccaaaatgcatttgttcttcagagcagaagattgtgaactccatagaaacattcttaggcctaggattcagcagagatgagtttgcgatgatggtcaagcgatatcctcagtgcattgactatactgctgagacagtgaagaagaaaactgagtttattgtgaagaatatgaattggccactagaggctttggtttcgatccctcaggtatttggatacagcctggagaagagaactgtcccaaggtgtaatgtaatcaaaactctcatctcaaaaggactgatgaaagacggaagtgaagcccctccaatgtcatctgttttaacaagtaccgatcaggcgtttttaaggaggtatgtgatgaagcacgacaagttggcacctgagttgatggctatcttcactggagaaaatgggaagtgaaaagaggagcttctatatatagtcagaacacctaccacacaacaagagcatcattaaggtttgtattgttgtgttagttttagattcttccatgaatctgttgacatcaggccatgagaagtgaaaagaggagtttcatttatatatctctgatacctatttagacttttgtaatctcaatttgactcattttaatatacaatccaacattgaaaataagtagcaatacttttcaatcttttttgagtcttgaactcttttagtggcctagaaacgtggagatatgttcttctttgcattcacatgaagcacatatcttggttagtcaggtaacttacaatatattgatcaatcctaagagcaagttttcgaagatagtggtttggttccagatttgatatcataaagaactctggttatatcattccattgaggttgcagccgaggagaagaagttgttacgctccatctttacatggttcttagcgaatgtgacctttgtccctttgtataaatagcaaaagtttcagcttaccatttgtgttcctggttttgcttttggctacttcttgtaagggaagatgattctcagttacagtttcaatagcataccatattaccgtaatcttaaacgaatgactttatccattaggtcagtgcaaccgtgcaactgcaggtacagatttgtctacagttaaaaaatgttatgccaagcaaagagagagagcaaaagcaattggaaccgttagattgatatgttttaaaaacaataattagaaccctccgatcattttatatttcgttatcttataagaaaatgctgacatcagcagatcctaaaatcaatttgcctatcataatcatcataaaccctaaaaaatcgttttttttttccttctcctcaaatttgaacccttgaaagatccatcactcatcaactctttaacggcacgagtcaccactgatcgatgattgagtcttttgtcttccctgctcaacataagtttgagatttgtgctcgaattgagttagattgattggtagaattgcttcaaaaattgttattttcgggatttgtagtaatcgcattgcctgttgtcatg

SEQ ID NO: 32251 - DNA, 3003 bp, Unknown
  misc_feature (1)..( 3003): 2750-1469P.txt file - cDNA_ID_3050633; gDNA_ID_1621149; Annot_ID_173172
gttttatatttttaaatttcaactttagccagaaaatagagatttctacaggtgaaaatacttgaattaagaaagaacaaaacgctctagaggtacttttgtagcaataatggaataacattaggtccatcaattcactattacattgtatacttgcatagttaagaaatgatatagtacatttttatagtcagatattttagtgtttgatatgattcttcataataacaatttacacgttcattgacttgatgctttatagttatcgattctcgaagaactatagttactttttaattttcaatggcttaaaaaatcagagaatatatatttgtttatctacttaatctgcatcttgtaggaaaaatttattctaaacatatactatacatccgacttaaacaataatgaaacattattctctagaatatctttacgaagagccaatggtggtcataatctaatatttgtcacctaaagtttcaacagagcttacgctacatattctatttcatttttttcaatattatttgtagaaaactttttaatattttttttcaacaaagttaatttattaaatgttgcaggtttggttgccatgacaaggcaaatatcaaagatattggtgttaagatgcgaagaacagaaatgagtttgtgcaagaatggattttacgagttcgggatttgtacctatgtctcgccggaattatatctaggaaactcaagatcaattgctctatacttgagcttttcttccggtttcagtggctaagaaaacagaagtagataacaaagttgtttataacaacgactcaaaaaacacttgcaccaactaggacaaataagacaatcaaattggaatcctcaaacatcatccaagagttcactaaatcaaaatccaagtccaactttaagactgaatgatcatagtagaagcacctacaagtgctaggtcagcaacatagacaatttgacatgtgctagttagccacgggcaatgcgagtaaatcttcttctcgagtgtaaccgcggagaacgaatttcttgaggattgcagagttttttgcaaagtacaatgcaagtttcaattcatacgatggtgtatgctttttatctctacaaactcgagcaatgacagcaaacactgaggtgcgaacgagaggaatccattcagcctcatactgctaccaagtacagtctgtaaaatacacaacacaaagatgattgaagttcagataccgttaaacacatttcacaagttttctaactaaactgaagagtttgtgcaagtttccgactttcgcaaactggaaaatgtcgttttcattctcaggttcgttctcaggagagctactagctgaaatttttttccggaagacacaatgtctctccacccattgaagtcgagacaccagctctgttcttccaatctaggcactttgctcttaagaacaagcactccttccttttgaccagaaggagacctgaatgacacgaaattatcgagttctgtctgagttgtagctgttcctccaggttttactgctgatgcagagatggcatccatgacgcaatgcgtcctctaaggccccgttattctggtttgacacaacaatgatcacaattagcaaaagccacaaaaagcaaaccatcttttactctctgtaactgtaaggaacgagataaatatcacctaaaaaccgaagaccaagattttgactttaagaatctcacgtgagatatgggctacaggatagtttccagattgacttattaggctcacttggttcagactgacaaaatatttttgcttcacctccaaggtatagatagaaagtttgattgctacggtttctcttaacatagcattgaacaagtgatcctcctggaccaggctataagaaatatcagagcaaagattattagtctgaagaagcacacaagtcagttataaagtaaaacatagaatgtgacctgtttcaaggagattggaaaagtgaatttgctagaaacctcaggaacgttaacgatctctttgaatatttgtcgccagttcttacacacacctacacaagaaacaacattcttcctagaaggccaagtgtcttcggatcgctctatcctcatcagaacatctctcagaagctcaggaggcatattagcccaacagctcagttcttaaaccattccttgagacttcccccatttttcccacaatacccaaatctcacatcgaatctctttcgagacgacatagctctaccacacttcaagcaatgctgacttttcaagaaccctaacaaggaaacaatagtaactatgagatctcaactgatccctacaacttatgaatattggaaatatggaaatgtgttcctcttctcaaggaacaagaccgattcttcggccttttaatagaaatatttggaccaaatttctccttcatattcatcctttggatttggttctatctagcatttaaggagctaattaaagacagccacttgaagttttatacaaacatatatttcgttaacctaagctcaaaaaaaaatcatgacattttttcttctgtaaatgtgtagttgtatataggattaaatataaatgaagatggagatattttttgttacttttatcaatcagccatttttttctatctatgaattcactacttataacatgcctgccacttaaagagccaatcacattgatatagttttgtataaactctttagtttcttgggtgtccatggaaaatttcaaagataccacacgaaaatttcaatttttaatatagagaaatataaaacaagaataaaatgttgctagttgttgaaatttatatttattcttggtgttatctcatatttgacttggaacatatttcactaacgtgcttaggtgtccttatgaaatccaataaatacattaaacacaccaaatctcttaactcttctaaggctatgtcctaagatttccttgttcagtacaaaaaatg

SEQ ID NO: 32252 - DNA, 3000 bp, Unknown
  misc_feature (1)..( 3000): 2750-1469P.txt file - cDNA_ID_3050644; gDNA_ID_1621149; Annot_ID_173167
atcgatcattcgccaaccataaaagtaaaacaaacaaatgtgtggattacatattacatgtatgcatgagaaacatacaaaataaataatagagatgaataatttgatttcctgataaagactaaagtgttaagtggactactccacgaattaataaaaagacatctttagagaagaaaagtagacatccaacaaagttggaacccgtgagactgatcggtgatttgctattttcttcgtctcaaattgacaacatacatccctagtttaaagtttaaacctgccccaaggatactcaggtcaatgatccatcacatttactagcatgtccattacttaactggtcgtttttaattgaatctgaaaaagttggaccttttatcggattatttaggtttgggccctttggggccgggtttttctctgccaaccatcagcccaataaatttttgttttatatttgtcaagaaaagatctataaaaaaaaaacagtttcgcaaatccaaaccacaaaaacgaatactagcagtacaattgttcaaaatttatttgacaactgtgggatttgaacccacgccctttcggaccagagcctaaatctggcgccttagaccactcggccaaattgtcaattgttaagagcatcataaactatttatataaagcaatccacattttaatgttattattaaagatcatccaatttttttttatgtgaaagcatgaaatattcagcgttacgttgatagttcaaatggtgtactagacttttattttttatcttactgaagaaaactttaaaaatcatgaattcggatactggctgcaatgaagaaaccagtttaacatgttatgtcctccagtgtgaggaataataagttttcaagtttcactatagaacatcttgatcatcttaaagcgtaagattatattcgatttttaaattctttattatgaaagtaaattgtttctcttgggtctttttataaaatttattcaaatatctcatgaaatatgaagatgaaacgaaaacatatgtcactgttaaagttaatctttataagccagaaaaagaatgacaagatcttcggtcactcacaagtcacaacctaggggataatgaatttgggtgatctcaaaactcaaaaaggaaaattaaggtggtgtgacaatataaggaaagaaaattggttgattttaatattagaacgtgggcctgtaaaggcccattaatagtccagcattatgatctggatccctctttaatcttatctccaaaagcagtaagcacggttccgctcacgtgaccataccctacgccttaagcatagtcacgtgccattagtgttccatttcttcagcacgacgaacctatcagaaagtaaaaaatcaataaataatatgaaagttaattattttgtattttcttgtttcacctatgaaagttaattatttgatttacagtttatgttttttttggtggtgaactgtaatttacctattattttagggggtctcttatttttatccgtaaaacgacatattgtagaaatttttctagttaaaaagttgacttagaataatcgtgtatgacttttgcccataactaataatatatacacgtatcctaaagagtctgaaattaatacgaacacaattcattcactaattcactttgtactttgtagaatgattgatttattatacttgttacatgctttaagattatggacaaaaaatataaaattatggacaaagaattgaaaattatgggcaagaaagtaaaaactttctaatgtaacaacatatttggttgaattaaatacgaccacaataatagccttacttattatatcacatatctttcatgtccccaagtcgcgaagttataaatgcgatccaatattctcaattttggaccggcttaaaccaacaggcgttataacagctccaacggtttggttctgttaatttatttcgcggtacgatgaacattcaatttagctgatgtactagctactagctttttttttggtcattgaggttaattttcaatgaagttatttttttttgtcaatttatagtcttgttttagagaatttactttcaagtacaatcgatttcacgataataaatttattataggctaaacaacgatcattagaataactccaaacttgtaatccaaaaataacatttacactaaaaaaaattcaacttattatacaaaactaaaaaatttggtatcacttcaaaagtttaacttcggataaaattgagacattctcatttttatataaaaatttattcgagatattcttttttttcatctccaactaaaataacaacaaaaccgattataaacaaaacaagcaaagtagcaaaaaaactattaaacatcattaagatttttaaaactaaataattacctaataatactaaattatatgatcctcaacaatcattcggttaatttggataaatcagaacccggtttaaatttgatatgatatgaaatccggttaagttccggtaccggtccgggttttggttttgtttaatttccactatggaaagagtgagagagagatagagaaaaaggtggggggaatttaatggaggagtaataaatgctctcaagcgctctctcttcccttctcttctcccacaacagactgtgttcattactcgtggggtcggtctctctcctctctatctctctctttctctgtgaagacgaagacagctgtttctgagtttcccttttgtttttgtgtctatcttctcaaccaagttttttggtgtccaaaattcgcaaagaaacgcctttctcttcttctccttagatttctcggactttctttcaatagtgggaaaaagacacagaatctcaaaaaagtcctctcttgtccaaagtccaaagcttttgaaagagaccataaaaacagagcttaatctctctctgtctctgtctctctctcttttggaggcttgaggatg

SEQ ID NO: 32253 - DNA, 3003 bp, Unknown; identical to SEQ ID NO: 21369
  misc_feature (1)..( 3003): 2750-1469P.txt file - cDNA_ID_3050688; gDNA_ID_1621150; Annot_ID_173215

SEQ ID NO: 32254 - DNA, 3003 bp, Unknown; identical to SEQ ID NO: 18515
  misc_feature (1)..( 3003): 2750-1469P.txt file - cDNA_ID_3050692; gDNA_ID_1621150; Annot_ID_173212

SEQ ID NO: 32255 - DNA, 3003 bp, Unknown; identical to SEQ ID NO: 18516
  misc_feature (1)..( 3003): 2750-1469P.txt file - cDNA_ID_3050696; gDNA_ID_1621150; Annot_ID_173209

SEQ ID NO: 32256 - DNA, 3003 bp, Unknown; identical to SEQ ID NO: 18519
  misc_feature (1)..( 3003): 2750-1469P.txt file - cDNA_ID_3050699; gDNA_ID_1621150; Annot_ID_173206

SEQ ID NO: 32257 - DNA, 3003 bp, Unknown
  misc_feature (1)..( 3003): 2750-1469P.txt file - cDNA_ID_3050703; gDNA_ID_1621150; Annot_ID_173205
attccttatttgcctcaaatcattactttcggattctactgtcttgaactgtgttcatgtgtgtattccctcatcaatcaccttcaattcatattttcctatttccaaaaataaaaagatacagtatctatgtatttaattatatatcatatcaattatatcataataatcataagatcctttttatcgaaataaaaaaggaaacaaatccaatcatagcaagctttttcttttatttaataaacaaaaataaaaagcttcccgaaatggttaaaatccagaaccactaaagtcaaccaaatttgtcaaattcatccacgtcatcagttccatctataaaacgctcacgccattcgtcaagtcccaaaacaagagtccaccatgaaactcacaaacgctctcttcttcttcttccttatctgtctcctctctttatcgtcagcttcatcgaacaagcctcagctttcaaatggctcgaccatcttattcacgacgatagggagacccactttcgaattcgacatctttactctccccacgagccaccgtccaccgtcacccgccgatgagcaccgtctcaccgatggcaaatctattaacttcaacggctatttcgcttctccttctacggcgttaatctcacttctacccaaaagaactcagattcaaccacaagacgtgcatctcatctacgtcactgagagagccggaactcctagcttaaactacgacgtcgttcacagcgataacgttggatctagaattcaggttccgttattttccggcgaggaacaacagagtggtatgaatgtaaattccatgaaagacacgcctgttttaacaaacggctatcttgtccacgtgtcgacacatgagaatccgggtaagcccatggcgagttgggccgctgtttactcgactgagttacgaactaagtcgactcggcggcttacaccactgggtatcgctgacttttctccggctgtgtctccgtctgggaagtggactgccgtggcttcgtttggagagaaaggctggacttggagcatggtagagaaagagattagttcagacgtctacgttttcctgactcaggatggaactcagcgagtcaaggtggtcgagcaaggcgggtggccgagatgggtcgatgactcgactctgtatttccaccggaaaagcgacgacggttggatcagcgtgtaccgagcgattttacccaaaaccggaccggttaccaccaaatcggttacgattcaaagagtcacaccaccgggtcttcacgctttcacacccgccacgtcaccaaacaataacaacttcatcgcggtggctacaaggaggcctggatcagaaatccgccacgtggagcttttcgatttaaagaagaacgagttcgtcgagttgactcgtttagtctcgccgaagagtcatcactttaacccgtttctttcccctgactcgtcccgagtcggataccatagctgcagaggtgacgcaactggacgtaaaactcctcggaatctcctccaaagcctcaaaacaacttcaaacgacctctctctcttcagattcgacggtgcgttcccgtctatctcgccggaaggtgacagattcgcgttcgtctctttcacaggcgttttcgtggtgaacccagatggttcaggtctacgtcaattgcttccacaaatgggatttggaacagtttgggatcctattcgacatggaatcgtctacacaagctcaggtccagctttagctccaggaaagtctcaaatcgatattctcgccataaacgtcgatgcacctagtccagcaaccgccgttaaaaaactaacgactaccggtgaaaacaacgcttttccgtggccatcacctgacggtaaacggatcgtgttccgttctgcgcggtccggtactaaaaacctttacataatggacgcagagaaaggtgaatccggtggtttgttccggttaacgaacggaaactggaacgatacgatagctacttggtcacctgatggtaattggattgtgtttgcatccaaccgggaatttcccggtacgttgttgatgaatatatatgtggttcatccggatgggaccggtttaaggaagctggcgcaaaacttgaccggtttggtatcgatgcatccgatgtttagtcccgacagtaagagaatcgtgtttactaccatttatgctggaatctcggcggagcagatcggtaatccgcattttaacgtcccgagtagtgagatttttaccgtgaacttggacggctctggtttgacgaggctaacgcataactcggtggaagatggaccacccatgtggttccctaagatcaaagctactggtgatgtggcttggcctaagaggtttggccctagttgctctatccaagatttcaagacgcaaaatactaccgtgaaaatgaaaatgaataagcccgcaacaatgtcatcaatgtgtgttgttccttcacaatgatttgttatgtaacttattcttctaataaaaaactccgctagttcatatcttgttaagtatttggttagcctaagaaattatatagcttgaggtttcacattttcaatattttttaaaaataatttgggtcaatattgatgttggaaatgaaatcaacggttgaattattgtcgtgtgctgcttgcaccatggtccatgctagatggaccgaccactatttttccaaacagtgcctatcctatcaagtagatattttctgaatacgtagataattgtagaatacaagaaaagaaatatcctctgtggaataaatgaataatatacttttgtcagaaacgttacaagttaaaattccacgactgattgccacgtgtaagcttatctcaaaagggccctacagtaccatgatgacgtcatctcttacaccactctctgaaaaattcctccgccttataaaaaaactcgattatcgtcttcacttagtagccaaccaccgaccaatccgccatg

SEQ ID NO: 32258 - DNA, 3000 bp, Unknown; identical to SEQ ID NO: 7531
  misc_feature (1)..( 3000): 2750-1469P.txt file - cDNA_ID_3050707; gDNA_ID_1621150; Annot_ID_173202

SEQ ID NO: 32259 - DNA, 3000 bp, Unknown
  misc_feature (1)..( 3000): 2750-1469P.txt file - cDNA_ID_3050714; gDNA_ID_1621150; Annot_ID_173199
aatcttataacaatgtatgttgaatagatgatcaatgaggtactcaatattccttttctctgtataggtgggtttctcttcagctcttcatatgatagaactatccttatatggtctctgaaggtacatatgcgtataaagttagtgataggtcctttatagatttttgtttatgttcttctcagcagctctctgatagtaaggtccttaattcgagctatataaatcgtcatgcaaaacacgctatatgcaggacttctcccatgtgcatacatttaaaggtcatcaggataaagtaatggccttgatacacatcgagggaacagaaccagtatgtgttagtggcgatggtggaggaggtatctttgtatggagcactacttttcctctggaagaacagccgctaagaaagtggtatgagccaaaagactggcgatatactggcattcatgcattggcatactcagaatatgggcatgtgtacactggcagtggagataacactatcaaagcttggtcactgcaagtaagttaatttccctgtacacctgtaattctgataagattttttcttcttcatattatctgatgatgattattttcccaggatggaagcctgctttgcactatgagtggtcataaatctgtagtctcaacgcttgttgtggtaaatggagtactatacagtggaagttgggatggaaccgttcgtttgtggagtctaagtgacaacagtttgttgacagtgttgggggaagagactccaggtattgtaagatctattctgtctctagctgcagacgatcaaactctagttgcagcttatcaaaacggagatatacaggtctatatgtttccttaaaaacaatttacttgatgtgcttcatttcaatcgtattgccagtctctaaacctgaacccttctgattccttttccagatatggagggatgatacattgatgaagtcaatgaaaatacagaatggcgcaatcctcagcattgccgtgaatggtaaatggctattcactggaggttgggacaaaaccatcaatgtacaggtaatccactagtttcttgacaaagctagtgacgaataatctttatcggaagtgtaaaaagaaaatcaatactttatccattacttgatgacggattttcctcctaataatctgttaccgaacaccggtttgtaggaattgtcaggagatgagatatcagtaaactgtgctcacgttggttcaatcccaggttcatcagtaatcacatctttgttatattgggaaggcaagctctttgcagggtttgcagataaaaccattaaggtgataatagtccaaattgtctgtctttttctttgcattcatgatttacctctgttgttaaatttggcatgtaacaagagaagttttgtctccatttcttacaggtatactattttggacgctaacaaaaactattgtgctctccagttttgctcatcttgtttttgaagattctttcttccataagttcctccgtagatgccactctcgccaaaacatgttgtgtgaatatctaaatgtaaatatatgtgaatatgaatccttcgtaccaatctgttgatgatatatacgtgattcgcatttttcttatttctcttagaacatctttatgcgttgagatcaaatcaatacaagaagagataaattcttaagttgtagtgacatactgcgaaagtctaaaatgtcgagggacttaaaagtgaaatattcataaaaagatgatccttcaaattgagtaatttagcgccaccgaacggtatagggaggcaaaacaatttgagtgaaaaatacgacagagagcttctcagttctcatccatggatacttgacctcaacaacgagaaagtcactataacgaagcaattttttttgtaaaatgggttctgtttctaatcttgtgagccctaatatttgccatccagctcccccttgtctcacatctcgaagtaataagtttccgtggacaaaaccaatatctggtcttttgttctatcggtccgtcacgccgattaagaggtgtcaccttgttcgaagaagctgtgtcgtctcagcttccctaacggtatgatatgcgtcaactctcttagtaatgtaatcgtataactctgtctgttcgttggcgcacaccaactgttcgatcatttgtctcgtctctatttcctgtgaatattttgtctactaacgattttctgtgcgatgcttttctgagactgggatgagaattttatctctcaacattctcagtggtattttacttcttttcatgttttatttatttactttagtttcattcatatttcaggggaatttgggtcgtttgaagaggaatgtacaagattttacgagcatgaattattgggttgtccgggactactaccgtctggtggaatctgtcaattcccttgaaccacagattcaaagcctttccgatgaacaggttaaacttagtgttcactgcttgagacgttttatttattgatatgtttctttaatgtattttgactttggtttgtttttgtccatagctgaaagctaaaactgctgaatttcgagaaagattagcacgaggggagtccctagcagatatgcaagctggtttgatcaatatcttactttgaatttagttaccctttattttaacaatgtacgttgttttgatagtctatgcgcttactctctcacttttgtgcgtgtgtgtgtgtgtgtgtgtgtgtgtgtgtgtgtttcccctgtctagaggcatttgctgttgtccgtgaagctgcaaagagaacaattggaatgcgtcattttgacgtgcaggtctgtctatatctttaccctcaagttttagtccatgctatttcttgggtgcatttctataatcttgaagagaggttgttaagtatacttatgtttcatttgttccatcagataattggtggaggagtgcttcatgatggatccattgcggagatg

SEQ ID NO: 32260 - DNA, 3003 bp, Unknown
  misc_feature (1)..( 3003): 2750-1469P.txt file - cDNA_ID_3050718; gDNA_ID_1621150; Annot_ID_173197
gatgtgaagcattctgatagagcaaatcatcagtctaggaatgatacaagtcacaagtcaagggaaactggatcctctagtgcccttcatcagaaatacagcaacaaaagcttacaccaacaatctacgtccctgctaggaaaatctccccccaatgtctttgcagaggtaacagtagtccgtcagaaagaaaacaatggtatgcatcagctggcaaatgtaacgggaagcagacaatctagtcaagcgtctgtaagtacattccaactgtgtctacaattacataaaatacactcagtaagttggttgcattctaaggtcgtagttttgtttctccagttttcatctcggttctgtgatatttttctggtcaatctttgcttccatgcatttttcttaccacaaagtttacatcagtcttgctttataattctgcaataacctgtctctactcagaaaaaagatggttctaatgtgaagtctaaaacctcaatcctcgagaaagccataagggaactggagaaggtggttgtggaatgtgagttttaatatttttcaagtgtgaccaactagaatagcatttggtgattttcaacttacaagaatttatgatttataagcagcaaggcctcctgctatcactgaaaatcaagaagctgatacctcatcccaggcagtgaagagaagattgcccagggatgttaaattgaaacttgctaaagttgctaggattgcggtactagagcttttccatttgttcttctcatttttttgaaacttgaaacggtatgagaaaaaactaatatgccttttgtggcagcaggcaagccagggaaaacattcaacagagttaatcaaccgtcttatgagcattgttggtcacctaatccagcttaggtctcttaaggtaaaattttctgtctcctgtatcctagtctttctgttactaaagcagacttgttaggactttcgtcaaggtgtttaaatagttagtcttcttcaggacattcatgttccagtgaaaaactcttctgtttcaggtacaagcaaacaaaatatggtttcttactctttgtaatgcttattttgcagaggaacttgaaaatcatgattgatatgggagattctgcaacccgagaaaaggatactaggttcaagcaaatcaacaatgaagttcttgatatgataaaggccaaagtttctttgatggaatcacaggttctctctctctctctctgttctaatcttaagttgcttgataggcatttctttcatccatggcttttctatcttattacattcttggaagtgtcattaacttttatgaaatctggagttctctctgataatggttttccgtagatcaagctcttcattcttttgttttcgatgttccctgtgggtcaatctgcctttgtagcgtattttcctcctattaatatgttgaggcacctgtgacatttatgatatttcttgcactatcattttatgttccataggcaatcaaaccagaaggtgcaacatcagacgattttcaggactcagtagaaaagccatctttgaagaagtttgtcatggatgcggcattggaggataaattgtgtgacctatatgacatatttatcgacgtaattatcatttacctttataatctgccatgccaattctagacatagaattagagtcaaaacggttttgttcctgttttttggtatattagggattggatgaagatcaaggtccacaaacaaaaaagctatatgtcaatgtaagcccttctccattcccgattatttttggtattctggttttttttgttccaagcttatctcatgtcttaaatcaccaattagacctagccaaaagctcaaggtggtttgttagagcttgatgaatattgttttggaattattcatgctccagttggctgaactctggccaaatagattgatggattatcgtgggatcaaacatgcaattttccgggcaaaggagagacgaaaagcattgtatggaaaccttgcgaaagagatggtagttaaagaattttctcagccctttacctctttgcattaaaattttcgcaatttgctttgcttgattagattctgctttgttaaaggatcaaacaaagatgaagaagagtatgaagcagttggtaccaagaacagactgtactgctcagcccaacaccgaattagtggttcagagacaacacagtggggaaaaaaaattgattgttgatccaaatgcaaccagcacttccgtggtcactagtcaaactatggttgacagatcaaatcagcagcagcctgagaagctaaagggaatctcaagctcttgcaatcctacagaggaaacaagagtggtcaagagaaagaacgaggctgtaatggctgagaaacaagtcgttcttgccctgaagaagcccgaacatccacagacacgtgtaatcccagctcctcagaatctgaacatcccacgaacaaccccggacctgaacttgccaagttgacatcacgattgacaaaggagctcttagaaacgccggagacaataacctctggcctcttccttccttgtattttgaggtggcacggcattagtcctggcgatgccgatgcttggtttttttagctacaaagcatggtttataaagttgtctgtattccagtttggctcttattaagttagttactctatttacgtgtcctttttcaaaactctaatgtataaagttatgattttacgggcaactctttacttttgagtaaaaaaaacagagcaggttttagtactgaattttgggtaacgtagttgaaaatttgatttcggacgataatgtaaaattgatgaaatacatcaaaatgactacattaatccttttgacacaatatgaataatcaattttaattaatattattattacttgtaaaacagtataaatatggctcattatttcacagattctcaacactctctcattctccacaatttacgatg

SEQ ID NO: 32261 - DNA, 3003 bp, Unknown; identical to SEQ ID NO: 18523
  misc_feature (1)..( 3003): 2750-1469P.txt file - cDNA_ID_3050722; gDNA_ID_2936548; Annot_ID_193958

SEQ ID NO: 32262 - DNA, 3003 bp, Unknown; identical to SEQ ID NO: 18523
  misc_feature (1)..( 3003): 2750-1469P.txt file - cDNA_ID_3050722; gDNA_ID_1621150; Annot_ID_173196

SEQ ID NO: 32263 - DNA, 3000 bp, Unknown; identical to SEQ ID NO: 7523
  misc_feature (1)..( 3000): 2750-1469P.txt file - cDNA_ID_3050726; gDNA_ID_2936548; Annot_ID_193957

SEQ ID NO: 32264 - DNA, 3000 bp, Unknown; identical to SEQ ID NO: 7523
  misc_feature (1)..( 3000): 2750-1469P.txt file - cDNA_ID_3050726; gDNA_ID_1621150; Annot_ID_173195

SEQ ID NO: 32265 - DNA, 3000 bp, Unknown; identical to SEQ ID NO: 7545
  misc_feature (1)..( 3000): 2750-1469P.txt file - cDNA_ID_3050763; gDNA_ID_1621151; Annot_ID_173239

SEQ ID NO: 32266 - DNA, 3003 bp, Unknown; identical to SEQ ID NO: 18528
  misc_feature (1)..( 3003): 2750-1469P.txt file - cDNA_ID_3050774; gDNA_ID_1621152; Annot_ID_173311

SEQ ID NO: 32267 - DNA, 3003 bp, Unknown; identical to SEQ ID NO: 18531
  misc_feature (1)..( 3003): 2750-1469P.txt file - cDNA_ID_3050778; gDNA_ID_1621152; Annot_ID_173305

SEQ ID NO: 32268 - DNA, 3003 bp, Unknown
  misc_feature (1)..( 3003): 2750-1469P.txt file - cDNA_ID_3050782; gDNA_ID_1621152; Annot_ID_173303
attttctttctttagattttattggttaaaacttaaaactgtgataaccattttcttgaactctttttattgataggagtgacaagagtgtggagggatgaccgaccatcggataagattctttcgataaccagcttctcaataattaggacgagacctgaaccctatgaatcctctgtttttgaggctgttggttacaaatggtaaagatcttagtatatcttacactctatcccattttttttttgttaattatatcttttgagctaattatgatgcaaataaataaatcaggagattggttttgtacgtgaatggtaatgaaaaggacggtggaaaagatcatgtttcactttacgcgaagatcgtagagacagaatctcttccagtaggatgggaagtgaatgttgatctcaaactctttgtctacaatggaaagctaaacaaatatttgattgttacaggtactttaaactgtgaatggatttttattagatccatatatatattctagcggaaaacggtctatttctccacgataagtatgacatcataacagatagagcccaggctttaacctcgtgctagatatgatgtcatattctagctctatatgttatgatgtcatattctagccattgctattttaagaaagtagacttcaaatactagtctcattagtaaatgaaccgatagttgattgtgatttgccttttttttttttgcataattgtggattgtagatggtacagtgaaacgatacaacaatgcgacaaaagagttgggttacggacaacttattcctcaatcaacattctacgacgggaacgatgggtaccgtgagcaggacactggtacatttggtgctgagatctacatcgttaaaccagcccaacaaaaagagaaagtcacattcatatcaaaccctccagacaatgttttcacttggaagatacttcatttctctaccttggaagataaagtctatcagtctaacgagtttcttgttggagaccgatactggttagtcattttcgtaaccggatattttagaccaaagtccaaattaatcttaaaagcttgttactgttatgtgactttcacagtattattgtataatcaggaaattaggattaaacccgaaaggaggcttagtcccaatcttcctatatgctcaaggctttaaggcaaacgcagttgttacaaccacttatgcagcgactaatctgcggttaaagaatcaacgaagcagcaaccacgtaacaacatatagtaagaaaactaacctaagaataaaagtttatctccaggagaaaaaaacaacaatgaatgaaactaggaatagctaaagtaaatttgtttatgctgctctgttttttctttgcagctgcatattggtacctgattccaagcggattaggtttgggagtgaacactataccgttatcagatgtaaaagatgcatcgaaaggatatgtggtgaatgattccattatcattgaagttgaaatgcttacggtctcggtgacgaacattgtatccgcttaaagatctctacttctttaccatagttcaaacaaccttatgaagaaagagatgtttgtaataagacaacgttaatgtttgtgatgtagtcgttacttcggtttttccgagttttctcttttctgttttgttatcaatgaaaataaaactctccgggttttaaattttataaaaaatgttgaggacgtgaagtgttaaaaatcgacttatctggagtcagaaataaacttataatttactttacataatttgttttgtagccaaattcaaacataacccaaaagaaaaaagtattgaatgtttttttttgtagccacattctatttatgcgaccgttgcccgttggagtaagggtcatgccctgatctacaattttcaatgtacaacgttttgaacgctttaatttgaccactataattcattactctcattaagttaaccatatttatctcgaaagttcatcaaccaatatatgtttcattccacttctaacatttcttatttctaccacttttaccacctctattttaagcatttcgcattagtaccggttgatattatatatgtatcaagtttaacaagattctaactcaaaaataagtggcaacaaacaagtgaggaaatgcatatttactatatatttgtgttgaattacctttacttttaagattggttatatacccatttgtgtttattagattttaaaatcaattaccaaataagttattatgagttcatttgaaaagttatgagctgccaactcaagactatgtgaatggattgtcatataagtatgttatgggcttgattggtataactaattaattatagtagagttgtagcaattacgagcaaagcaagtaagttgatgaagttgtaatctgttatatattaggttgatgatatatatataaataagttgttgctgaaattgaccaagttttgatcaggtggtcatgaacgatggtgaatgaagatgaatgatggtcaatgagagataattgagtgatgatagctcaaacctctggatattggaatgcaaggtttatccgtctacgtacgtggatatgaacattgattttgactactcggtcatgatccacagttatcgattggtagattcggccttccgcgatgatcggtatgtctatggtcattaattagaggtaagggtggtgtgatgtgagtccttacttcatagcttcatatgattggattgttaagcttaacaatccaatcatatttaatattttgaacattatgctacccacatcgaatctgatacttgacacattccaagtcaaatacaaaaataataataagtgaatgtgcatatatatatattctaccatgaatccactttcagtattatatagtagtaacttaacttgttcaataagtaactttgtctatatatatgtaaaagtcttaccaatgtctagctcatctaagaaaatg

SEQ ID NO: 32269 - DNA, 3003 bp, Unknown
  misc_feature (1)..( 3003): 2750-1469P.txt file - cDNA_ID_3050787; gDNA_ID_1621152; Annot_ID_173298
ttcccccacctttttaatatattgtaatatctcgtgtacaacgttttgcctaataatataatcatatttcgaaaacttgccacccactacctcgaggtctctcccacaaatctataaaaatattgtttaataatagaaatgggaacttgcaaaaagcattaaaataacaataacatccaaagtcaaacaaaaacaagaaaaaatgatttgtgtaaaaacatatacatatacatatacatatacatatctctcgcttttctgttcatcacttcagctgagtttctcattcaacatgtaacttttttttgaaatatgttgcaaaaacaaattccaacatatttataaaactagtaacattattatttataatttgcaaaataggtcatgaatcccttttttaatcttttttttttttcatttcccctcatgtttaattattaaactacttaatagtataatatttttcaaattttctatttatatacaaaagcctatgtttttttttctataatttgatatgtagtgtctaataaattcaaaaacatttttattcatacatctcattaattgttaagatgtatacaaattgatacatttttattcgtacaacttatttagtatacattagctatgaatatatgaataaaatatgtatattatgtacatttgtatactaaatgtgttgtatgactcttagtatacaaaacaacacaaaaaactttatcaaaaaaaaaaaaaaagctcccagacccgactcccgaggaaacctaagcttcttcttgctatggccttcgtggccgccggcgaggaccctcccttgccagaaccccctgacccgcctgatcctccctccatcttcgcccaaaccttcatacccgatccaccttctacttcttctctctttccaccttcatcgagtctagatctagatctatgttctaccgtttcttcctatggtgttactcctttcgtttttttgcgattctttactgctgtgtgcagtcccttctatcagatctgtacccgttccgtgtctttgcggttctttactgctctatgcagtccatggaaactagcctattcccagatcttgggatatcctctcgtttcaagtggatatgtttcacaggccataacctttgatgtccacgctgcccctcctacctcaactcagagagcctctcctactcgttccatggcccagacacgacaacggtttgttacttctgtaagatggtgtatgtctttgtttctggttttacccctcattcaaaatttcgtagtggtgcgatttaatgctgcagtatgcagtctctttgaactcaatctggccttttgtgctgtttgttttgtttctctttcttggtggcagtttgaaaagaaactaattaatacacctcgcctgatgaatctggttttatcgggtatttggtaccctagtagcttcttatcggagctagttatcttcccaaagttccctcctcagtggagtggtttggatgtccaagagtcgtcggtattgcaaggatcttcctcccgattgatgttcttctctgcatttgatgcagttcttgtaacctcttgtgttacgttggatacagtcttccaagaatctagccagatcgttcttattgttcgttttgccttatgttattcttatgacttctgttgcatatctatctatcctttaaccattgttatatggtctgttttggcttctgttgttgtgttttatgtagttttcttcatgttggttgtaattcctctttctgaggctcctaaaatttagtgaaaacaactattggtttgaaaaaaaaaaaaaaaaaagaatcttagtatacaaaacaaagagtaaaattgtctattttgcaaattgtaaatagtagtgttactagttacataattatgtttccaaaagtaactatatttccaacaaacccttttttaatgtatttttttgatagatatattagtagattttttttaacaatggaaaacgaacaaggttataagggcagatgagcagagtacaactgttcttaaagtctcatggcaaatcttggcacacttgtgttatctgaaatagccagtctttagattttcttgtactttttattttgttgattggagtttgaagagtgttgagagaggagcgacgaggacaataacaaatttctcagtgattaaaggtagcagagaaccctatacaattatgggttccgcattatcctttcgtaacctagattttttttttatatatagttaaactcctagcctaaaactaaaacacagttgatgactaattggtggagaaccattaaaaaaaaaaaaaaaagacagagtagactaacgaaaccacacctttacatttttctatttatctcaccttcctaaataaaaaatatttattttaaacaaaaacacattttctgtacagacgtgggtttcgtaatgtccataagtccatccatagtctaccatataatttaacatctacttctctccagtggacgcaaaagcttcgaattgaatgtgggcgttgcttctctcgtgtctaatataaaatttggataatcatgaattcttcgatgatagtgatataccgttgacactgagtagttcattgcaataagtaagatcttgtttttgctaaaaagattcaatcatattttgaacacttgccacccaccacttccaaaacttccacaaattcatagatatagtaatacacaggttacttgacaaaaggaataaaagtacaatatgatgctttacacattctcagtcaaacaaaaacgataaaatgaatgtgtaagataatattgtttaaaaaagaaaaaaagaacaaaaaaaagataatattgttttcccgacgactaatccactttcagtattttataaaataactgaactcaagttgctcgatcaaacaagtacccttaaatgtctctctgtctatataaatgtacactcttcccaaacaaaaccatatctcaaaatatg

SEQ ID NO: 32270 - DNA, 3003 bp, Unknown
  misc_feature (1)..( 3003): 2750-1469P.txt file - cDNA_ID_3050787; gDNA_ID_1620787; Annot_ID_168180
tcccccacctttttaatatattgtaatatctcgtgtacaacgttttgcctaataatataatcatatttcgaaaacttgccacccactacctcgaggtctctcccacaaatctataaaaatattgtttaataatagaaatgggaacttgcaaaaagcattaaaataacaataacatccaaagtcaaacaaaaacaagaaaaaatgatttgtgtaaaaacatatacatatacatatacatatacatatctctcgcttttctgttcatcacttcagctgagtttctcattcaacatgtaacttttttttgaaatatgttgcaaaaacaaattccaacatatttataaaactagtaacattattatttataatttgcaaaataggtcatgaatcccttttttaatcttttttttttttcatttcccctcatgtttaattattaaactacttaatagtataatatttttcaaattttctatttatatacaaaagcctatgtttttttttctataatttgatatgtagtgtctaataaattcaaaaacatttttattcatacatctcattaattgttaagatgtatacaaattgatacatttttattcgtacaacttatttagtatacattagctatgaatatatgaataaaatatgtatattatgtacatttgtatactaaatgtgttgtatgactcttagtatacaaaacaacacaaaaaactttatcaaaaaaaaaaaaaaagctcccagacccgactcccgaggaaacctaagcttcttcttgctatggccttcgtggccgccggcgaggaccctcccttgccagaaccccctgacccgcctgatcctccctccatcttcgcccaaaccttcatacccgatccaccttctacttcttctctctttccaccttcatcgagtctagatctagatctatgttctaccgtttcttcctatggtgttactcctttcgtttttttgcgattctttactgctgtgtgcagtcccttctatcagatctgtacccgttccgtgtctttgcggttctttactgctctatgcagtccatggaaactagcctattcccagatcttgggatatcctctcgtttcaagtggatatgtttcacaggccataacctttgatgtccacgctgcccctcctacctcaactcagagagcctctcctactcgttccatggcccagacacgacaacggtttgttacttctgtaagatggtgtatgtctttgtttctggttttacccctcattcaaaatttcgtagtggtgcgatttaatgctgcagtatgcagtctctttgaactcaatctggccttttgtgctgtttgttttgtttctctttcttggtggcagtttgaaaagaaactaattaatacacctcgcctgatgaatctggttttatcgggtatttggtaccctagtagcttcttatcggagctagttatcttcccaaagttccctcctcagtggagtggtttggatgtccaagagtcgtcggtattgcaaggatcttcctcccgattgatgttcttctctgcatttgatgcagttcttgtaacctcttgtgttacgttggatacagtcttccaagaatctagccagatcgttcttattgttcgttttgccttatgttattcttatgacttctgttgcatatctatctatcctttaaccattgttatatggtctgttttggcttctgttgttgtgttttatgtagttttcttcatgttggttgtaattcctctttctgaggctcctaaaatttagtgaaaacaactattggtttgaaaaaaaaaaaaaaaaaagaatcttagtatacaaaacaaagagtaaaattgtctattttgcaaattgtaaatagtagtgttactagttacataattatgtttccaaaagtaactatatttccaacaaacccttttttaatgtatttttttgatagatatattagtagattttttttaacaatggaaaacgaacaaggttataagggcagatgagcagagtacaactgttcttaaagtctcatggcaaatcttggcacacttgtgttatctgaaatagccagtctttagattttcttgtactttttattttgttgattggagtttgaagagtgttgagagaggagcgacgaggacaataacaaatttctcagtgattaaaggtagcagagaaccctatacaattatgggttccgcattatcctttcgtaacctagatttttttttttatatatagttaaactcctagcctaaaactaaaacacagttgatgactaattggtggagaaccattaaaaaaaaaaaaaaaagacagagtagactaacgaaaccacacctttacatttttctatttatctcaccttcctaaataaaaaatatttattttaaacaaaaacacattttctgtacagacgtgggtttcgtaatgtccataagtccatccatagtctaccatataatttaacatctacttctctccagtggacgcaaaagcttcgaattgaatgtgggcgttgcttctctcgtgtctaatataaaatttggataatcatgaattcttcgatgatagtgatataccgttgacactgagtagttcattgcaataagtaagatcttgtttttgctaaaaagattcaatcatattttgaacacttgccacccaccacttccaaaacttccacaaattcatagatatagtaatacacaggttacttgacaaaaggaataaaagtacaatatgatgctttacacattctcagtcaaacaaaaacgataaaatgaatgtgtaagataatattgtttaaaaaagaaaaaaagaacaaaaaaaagataatattgttttcccgacgactaatccactttcagtattttataaaataactgaactcaagttgctcgatcaaacaagtacccttaaatgtctctctgtctatataaatgtacactcttcccaaacaaaaccatatctcaaaatatg

SEQ ID NO: 32271 - DNA, 3000 bp, Unknown
  misc_feature (1)..( 3000): 2750-1469P.txt file - cDNA_ID_3050824; gDNA_ID_1621153; Annot_ID_173352
acgttggggatgatgtcacttgacaagacagatcctgcagaatgattgatatgaaaacaaaaaagctaaaatcgtgaacaatccaccattggagacgtgccatcttcatcctctgagatgtggagattctgcttcttcttatcgttactattctttgatgttagcgcggtgaaatctgcagaatcgattttcctcccaagtcaaatcggagttgaagattcccgcgtctttgaatctcttagtcttagtcctgtatgctccgcggctgatccaaacctcaactacaagccggtcatcgggattctgacccaccctggcgaaggtcgatgggacgctcgtcttcactctctgaaaaactacgcctacgcgacgaacatatcgtacatcgcagcttcgtatgtgaagttagctgagactggtggagctcgtgtgattcctcttatctacaacgagcctgaagaaatcttgtttcaggtttactctgatgattttgctcttatggattccgttcactatgtagccttctttaatcactaatcttacaactatttattctacttgaacttggctacacctgatttgtttacatcacataaacaggcaatttgaaataagttcaaggttgatgttaccatgttattgttttggctattgcttgtcaaaattagttcatgttatcttagtgaatttcatttttgagttgcagaagctagaattggtaaatggtgtgatattcacaggtggttgggctaaaacagggttatattacgatgttgtggagaaaatcttcaatgtaagttctcattatgcaaacactctctgttgctttcatgtgttagctgagctgtacaacgtaatagtcttttgaaatccttatgtttctcacagaaagttatggagaaaaatgatgctggagaacattttccggtgtacgccatgtgtcttggattcgagattttgtcaatgatcataagtcaggtcactcttttggcttcttgcttcttttgttgcttaagtaacttccatatatgtaaagcaatgtttcacactgcctaaaatttaaaagagctttaagctgcatatcttgagctgagagggatatgcagtttccatcctaaatttctgacgattttgtgtgttttgaaacagaacagagacattcttgagaggtttaactcagtaaactatgcatcaagtctccagttttttaaaaacgttaatatcgaagcaaccgtgttccaaaggtgcatatatagctatgctttaaacttttcagtgatccaaagaacaatatcccataattgtaatgtttcatatttgcagatttcctccagagctgttgaaaaagctcagtgcagactgtttggttatgcagaaccactatgttagtatctctctaattttctgcagaatatgaatataggctatagctctcaccttttgttgctcttaagtatactttgattgctgttttcttcttataagtatctttaatcctatacagttacacaattttatatttcctgttttcttgttcatgaatgatttattatattctctctgcttttctgaaatgaaatgctattgtttcccagtttggtatctcaccagacaactttcaaggcaatccttatctgtctagtttcttcaatatcgtcacaaccagcgccgataaagacagcaaggtatagttaatatgttcctatacaccgattatacaaattccacaagctgacaatttcaatgaagggataaatttatcttttttctttccagacttttgtttcaactattcgatcaaaacgataccctgtgaccgccttccaatggcatccagaggtattacacacaagttaacttgtgtctctcattagtcttctcaatcctttgttaacttatatcttttactatgctatatgctttataatggatatatgtttctaaaaagatccttaaaatatactctgcagaaaaatgcattcgaatggggatcatctgaaatcccacactctgaggacgcaattcaggtgactcaacatgctgcaaattatctagtcaggttagttctctattgatcaatgttggaaagtatcattaaaagaattatgtagtggttcaattttcttatttgaatgttggtgcagtgaagccagaaagtcaatgaacagaccatcttctgagaaagtgctgagcaatctcatctacaactacaagcctacgtactccggatacaaagggtacaacaaaaaaaaagccacttcataattggagtccaatccttacagttcttgctgtatgttaacaaatattggatcatgtatgatcaacctcgttgggtttttttttgcaggagcggtgacgacgaggtttatattttcacgtaacaaagatcccttctctgtgtgttttcgccaaaacatagcaatttatattagttactaagagcaatacagtgtttctccttatccaccattgattgtaagttgtaaccaaggtgttgaactataatttaaaaaaacacagtatagatcacatgaggcgtgaggacgcaatcacttgttcccatatcttcctctaaaacctaaatcctaaaaaatcccttttcaaagatcaagttttaaggcaaaaaagcaatcatgattttggccagacacagcgaaaggaccttgtctgtttcgaaaaactcatttaatcatgtgttattaatttattattatcaacaatacaatcgtactgggtgaccaataatgagacgcacccatcaaattgggccctccacggctccaccactgagagggatacacgaaagtcgttttacaaaaacacctattaaaaataaatgtgcataaaaatctattaccacgtgtacggtgaagattaggttctcgattttgtataagaaggtcgaagtgtgaagaaatcaaaaacccaaaatcgtgaaagttcatttctcctccattgatctttctttactcagatctttcctcttcctctgagatg

SEQ ID NO: 32272 - DNA, 3003 bp, Unknown; identical to SEQ ID NO: 18539
  misc_feature (1)..( 3003): 2750-1469P.txt file - cDNA_ID_3050832; gDNA_ID_1621153; Annot_ID_173346

SEQ ID NO: 32273 - DNA, 3000 bp, Unknown; identical to SEQ ID NO: 7575
  misc_feature (1)..( 3000): 2750-1469P.txt file - cDNA_ID_3050853; gDNA_ID_1621153; Annot_ID_173323

SEQ ID NO: 32274 - DNA, 3000 bp, Unknown
  misc_feature (1)..( 3000): 2750-1469P.txt file - cDNA_ID_3050902; gDNA_ID_1621154; Annot_ID_56971
agaaagaagagaagaaagaacaagaagaagaagaataaaaaggagaagaagaagaagaagtgttgcacttgcatgtggacttggttgtgctcagtattttcaaagtgagtgtgtgacttgcgttgctctacaaatggagaaagtgtggctgctgctgcaagcaaacaatgtttttgtaatcatgagagttatgtattgacatttaaacaactatctttatttgcatccttaatgcttaatgtattcttacgctaatggttaacagttttcttctatgctttgattccagactattatttatttcattatagaaaatgataatgtattacgaatacaagctgtatgggaaaaatatgatgagtggggttgattataagacaatggattggagaggcatggaagatgcacaattattttgacttttaataataagctcataccaaacacactatctatatacattatacacattcgtcaattatcaagttgttcgaattattacaagttctttgatttggttgattaaaattacaataataccctcaatgccaagagatccgtataacggctgggggatgaataataacttctctggtcatcgaaacaaaggcaaatcatttcaaagcgaaaggaaaaggagaaacgtaaagagggcaaagcccttcttcttcttgttcgagaaggagctgcagcctcagataaggattcttttgatgcccagttgataaaggaagcgactttattttaaccaacgagattttatcatcaggtaagcaaagctgtttgattcgttgattcttttgtatatattgaatatgtttttgttcgctgttgattggtttcttctttggcttttatctataatagggttggttaattggtttgttatttgacaaggatcattgatcaccctcttgagaacatctcgagctttcccagatctatctgagctcctgggtttataaatcgcttccttcacatatcgatggggtgcgtttcttcttccgatttctgtttttgactttatgcagaatgttttggtatttgattgatttggatttgagattctgtttgatgggctttgttcctgcgttatgtgctgcttgggattcatgttcatgatagataaaccctaattttattgctggggaatggtgtttataaggttgttttatgcagatgagatagctatctctgaaagttttatagaaaaatgttttgctaaggaaataaggatgttttttgggcaatgatcaaaagttatggttttgtaacagagcagtggctgcgtgggttgctacagagaacacagatcaactgccgccagtctgaaggatccaccttccaattccattgctcgaccgtgtaagaaaccgagtgtctctgaagatttctggtcaacaagcacagttgatatggacaacatcaccttcccttcacaggggagcttatcatcatccaatcagacttttgattctcaatctgctgctagaaactctaatgctcctcctgaatatgtaaatcaaggtactttcttttttggatttcacggaaggggagcgttgtggtctagtgttttgtgatggttatatatgaagtgggtttgtgtgtttgcaggtcttcttctttggaatcagacacgggagcgttgggtgggaaaggataaacccaacaacccggtggatcacaatcaaggagccaagttaaagtgagtggctctgttacacactattgtttgctgaaagctaagggctaaagtctggcaatgttacattttatatgtctatcatttgcagttggaacacagcaacgtatgatagcttgctggggagcaacaagttatttccccaacccattcctctcaccgtaagtaatcaaactcctccgagtgcaggaaaaaaacccagtcaactaactgtgttactgattgaaaacaggaaatggtggattttctagtggacatttgggaacaagaaggtctatatgactgaacaagacttggaagacacacacacatactggttcgggcatttctgatttattttttcttttcggttttcttttcttttctcaaagcccttgttgttaccacttatcatcttccatttggagttgatcgagaatactgggaaatgtggcttatacgttttcaccgtaaatgagaaatatcctttgtttaccatctttcagtccaaaagaattaagagcaatatctcggtttgactaatcagtatcttaatatgggacatgttcttgtgtatttttgttttgttttgttaaggacatgttcttgtgtctcatgtcccacttgcacattgatcctaccttccaggtgatctgtccagtgtttgatttccacatatatgtacattttattttaataaaatgattagaggacattccttaaattagtgctcttcactaattattagggattagacttgtgccaacaagagaatctgaacctaaaagtatcaaagcaaaaaaaatgttccgaatagtaattgggctgttgatttgggcttttagcatggagagtagtagtaggagagtgggaataaaacagaaaaagaatattcggcgtgaaaacagcagcggtcacgtaccggacctcaacaccactctccattctactttattaagcgggaaacagatacttccttatccatcgatgaaacgtcgaccacactggatacgtgtcgttctcaaagaggtctgtcactaaactatcacgtcgacccagtgtaaatttatcatccacgctctcgtggattacgtggaggaagaaatatcatttcttgtttgaaataaaaaaagaataaaaaaaattaggacagaacagaagagacacgcaaacatatccattagggtcacaacggttcttacagcttctattaccagaaaggaaagaaagccgaaatttgtttcaagataaagtaatttaagttggagcttgtttcttggtcgtacagtgtcaggtgaatagagaagaagaagatg

SEQ ID NO: 32275 - DNA, 2159 bp, Unknown; identical to SEQ ID NO: 9540
  misc_feature (1)..( 2159): 2750-1469P.txt file - cDNA_ID_3050909; gDNA_ID_1972143; Annot_ID_179285

SEQ ID NO: 32276 - DNA, 3003 bp, Unknown
  misc_feature (1)..( 3003): 2750-1469P.txt file - cDNA_ID_3050909; gDNA_ID_1621154; Annot_ID_173410
aatattataacttgaagacagaagatattagtacaattaaagacagctattctacaaatggtaatgtgatgttatgcttactccggacaagacacggtgtcgtagccgtttaatgcggcggtgaaacggccctccccctcggcgggtccagtaagtatataatttgagatacgaatattaatattaaatcaaaacatcacatcagagccgtctaattccaatcaaagcagattgatttatcttttcttggtcacgatccgccgccttctctgccagattcgaaaccctagaggattagtcagtgagccatcggaagggacttgaacgttgtttgatttttctcaaaatgttttatactgaaatcacttaatcagataattcgccaagaaggaagaagaatcaccaaatcggaaagtttgattttgtacagaaatgggaaattgtccgaaaacaaagaaagacagataatttacaaataaccagagtctgttgatcaaatcgaaaaatcaaatttaaagttttttataacaaagaacacacacatacaaaaaagaagaagaagaaagatgaaagacagtgtatactattttttcctcatgaatattattaatcctgacgcctacctcgatctacgtttcggcggccttttcctcggattaactttcttccccggcggattctttccaaacgcagagcaacaaccgcatgacgaaattctcggagacggcgggtccactgccggagaaactcttccggttgttctatgatgtcgttgagctcctccaccgttagatcgactcctctctattcctcctggtgctcctccaccggttttaatcggtctaagcttgtctttctcatcgattggtttgacctgttcagagctttccgacataggcttaggttgttcgtcgcgttgactttcgtctttctgctcgttgtttcccgatttgttgagttcggcgatgagacgatcgtcaaacactataccggaagatccctgacggcggaaagagattgttgatctttgaagaccctccatggatctatctctctctctgttgatgagctaaaagaagggcaaaactaggaaaagtgagtttaggccttataagtgattaatcaatcattgtgtttcagacttggtttccttttatttctgtcctcattattttttcatggggtcggtccactatttattgtttatttttatgatgatgcttccagtttctatttatttctttgtaacaacaatcatcggaaattaatgtaagcggattaacgatatcattcaaccggattattcaaacattaattgtaataaaaaaaaaaaagtaaaaaccattactgttattgatgattaaggcagagaattacatgttaattttttgtttgttttcacatctttaatcggattctcaacaccacataggcacataagtcctcttatatccatatttgttattttattccaaacttttggtttctttaaactcaaaaggggtaagactttttgtaattactattgttttatcagcaaattgcaaggattagataatagattagaaatgaacaggagaattgacttataggacacactaatttaatatttccttcttccccatttcggtaaaccaaatagactatttccttcttccccatttcggtaaaccaaatctattaggtgaggatgttattaaaatgccaaatctctctttataaaaacttgaaaggaaaaacaatacaaagtggtgaaagtgagtcaaagtaattcggttaccaatttgtattcaaagtcaacatcattgtactataatatggtataacttttgttcaataattcaccttcttatatcgtctgtttcttctcaggatcaccactaactaaaacatacgcatgtggtgggtttagcaaaactgtattctttggattaaagtaatgtgcataacacaaattaataaccccgtctgagttggcacaactcaccaatgttgaagattgagataaagaatttgggcccaatcgccgaatagaagtctatattcattactctcaggcccatccataaatacaattgtcaaaaagaaaataaaaaattggtggtccagctgggaacgagccagcaggccatggtgaatctgagtggcgtcgagctgtgatccgtccactgctgagagcgggaggtgatcgctgctctgtgaaaccagcctcacgcattgccctccactgcaagaaccgcctgagccaagccttcgcttaacacacacggatcactctcagcttggactgggcagcccggaacaatgccacaacagatccgacccgtgggccgagccagtgttccaccaacttattgtccccacacgggtcacaagcccacgttactgagctcgacgtacaagtattgatttaatttcatatataaagtaaaacattttgaggtatgtaaccgatgtgggacaaaatacaagtttgggcttcccagatcccacatttggtggaacacatatataaagagtctcttcgttgattagcttcccagatcccacatttcaggtaaaaacatcgtctgggctctttgccattttagcgaatgtggaaaggtgtggtttttttttgctctgctatggattttttttttcaaatcagggtttctctgttgaagtcatatcaggagcttgacatttgtttgtttgggaattagaagctagatacgtatattatatagcatcgtacatatcaaattttggtgtgtgttctaattgaatctgtacttgtttgtgtgttagtgggaggagctcttctcagaccttaagactattgctttagtggaatgcttctcgtaaatgtataagtgaggaaagaaactccattcgtatctatctactaccctaagccgtttatgcattttctgtccatcagaagatcaacacctgtttctggaggattccattgatttaagggattagatggatgatggaccatgtgggattcagtagatg

SEQ ID NO: 32277 - DNA, 3000 bp, Unknown; identical to SEQ ID NO: 7620
  misc_feature (1)..( 3000): 2750-1469P.txt file - cDNA_ID_3050916; gDNA_ID_1621154; Annot_ID_173403

SEQ ID NO: 32278 - DNA, 3000 bp, Unknown; identical to SEQ ID NO: 7629
  misc_feature (1)..( 3000): 2750-1469P.txt file - cDNA_ID_3050927; gDNA_ID_1621154; Annot_ID_173397

SEQ ID NO: 32279 - DNA, 3000 bp, Unknown; identical to SEQ ID NO: 7610
  misc_feature (1)..( 3000): 2750-1469P.txt file - cDNA_ID_3050931; gDNA_ID_1621154; Annot_ID_173394

SEQ ID NO: 32280 - DNA, 3000 bp, Unknown
  misc_feature (1)..( 3000): 2750-1469P.txt file - cDNA_ID_3050933; gDNA_ID_1621154; Annot_ID_173392
tgagctcgagaggcgttcttcagcgattttgggggtttccaatgaaatcgaatggagccagaccttttgttaactgttaattaatcgattttattttgttatttcgcgcattaaatataacgactgtgacctaggttgacccaaataaaggtatttaacgggcccaaaaagaaatttgtaggccttttaatgggccatacactttcagagcccatttaataggttgcgttgttactacgaactcattataaatatgaaccgtagccccaatcagagagattcgataccgtctgcaactctcagctactttttccccaattttgagctcaacatcgaaccctagctcaacgaaccaatcatgtcttccaagcaaggtacgttgctgttatacagagatttgagttggtgattcgttcaccgaataaagtgattagagacatcgtttacgatctgctcatcttattttggttttaaacaggaggaaaggcgaaacctttgaagcagcctaaagctgataagaaggaatacgacgaggtgactctactgtttcttttttcttttaagagttggattttctgttgatttgccttcagctaaatcggcttatattgttagctttagacctcgaatcaaacgatgcttttgctctggatctggttttgattgtccaactaacttgaattcttaaaatttgttaacattcagtgactcataaatcattaattttgctcggattcaatgatttatacgcaagttcgaattttgatccagtgtttttaagggcacagtcttgacttcttcacttgattttgtttgcatactatttgtgtattaatgactcttagacattctctaattgctgaaatgttgatttggtatcaatgcagactgacttagctaacattcagaagaagaaagatgaggaaaaggtgagttcccactttgatgctctgacttgttttctctttttgttcatatgaagttttgtgattggaaaaatgcatctagttaaacttatatgtttgggctcctctttcaatggaaagctataaaatacgaatcaaagattgtatcttcacaagagagcttctgtttagatacataggtttgtaaaggttttgtaaaggttgtgcattaatatgttccactttgtcagtttggtctactaatcaagctgactctaattatgactttatagctggtgactacaactagatgggtcatttctattaattatttgttagtttaggggtattcattacagattcttttgagatgatatggactagtttcttcttactttgatgaaatagtgaccatttgcccatgttaggatgtttagtctactttttttccacccaattgtgtgaaagactcattagcctttctttcgcatgagaagtacagtgatcatttgttaccgaaagcctgacctgttttgttttgaatgaaaatgataaaacaggcccttaaagagcttagagccaaggcatcgcagaagggatcctttggaggttctggacttaagaagagtggcaagaaatgatccgttttatccatgaagtgtgttttaaaatgcaaatttatcaagtgaaaaaaacagataatcctgtgttgatgtaactttttatcataattcgagaagagtaacttcgcttctccatacatatgtttgctttctccattttttcatgaaaaagaaaagtggtatctaccctaaaatcattttgtcaagaatcgagtagtagggtgtcacatctctatcttcagatatagtattataaactgtaagttgtcataacttgaagtggaaaatatgttgcattgatagtagttgagaataggagcgtaacttgactctacaagatgaggtagaaactgagggtggtgacaggtgattttaccaaagcggtgtgtgtaatggttaacactgttcttaagaagtgcatactctatagatgaaagaactacagatagcccgtgaaagcaaagctgatccagaggaactttaaagcctgaaggagcctgcctttctccttgaaccgttgatcttagcagaggtacgaggatcagagaactcgtaatacatgtctgtgaagaaattgtcaacaatgtcaagatacacaggacttctgatgcttgaatagcatcgaagcgcttcccttacatccaatgcgtgatccacgtctctcagatccaccatattgagatctttcatcttttgcgccaacgcgtcacctcttttctttgcatcctcgaatggctcagcgactttcttcggtttctttttatgttggttgttgagactcttctggtgtgttgtatctgccacagccgtgtcacaacagataacggtgtagctttctttggtttgggtttgggaatcttctggacagcggcggctgcaggagtaagggctcaagagaggagtgtcgttaggtaagtttttgtaatcactagagcagatagtggacttgatgctcccaagagtcttctttaagaaacgaccaactctctgaattgattttgatgtaggtttcatcatctttcttgctgctcatttttttgagaagataaccatatttatgtcactagggatctcaaaaggaaacctaacattgatttagtggcatgtagtagttgaagaagcaagctgatagtgtcagactttaagaaggtgtcatcttgttgattgtgttgtccacttttataggtaagcaatcgtcatcacattgataagcagtgttcaaaattggtcccctacttatcattgccaccaccactcactactcatattatatatactgtatgccagttgactcgaggtaatatcagaaccaggcccatgaagcccattaagaagcccatatttttggcggtaaccaatgaagatccattttgggtaggaaaaaccctaaaggacgctacacagtcgtcttctcggagccgcaaagatttctgtagagcaaactttgatcatcccctgcatctgcggcaatg

SEQ ID NO: 32281 - DNA, 3003 bp, Unknown; identical to SEQ ID NO: 18553
  misc_feature (1)..( 3003): 2750-1469P.txt file - cDNA_ID_3050935; gDNA_ID_1621154; Annot_ID_173391

SEQ ID NO: 32282 - DNA, 3003 bp, Unknown; identical to SEQ ID NO: 18563
  misc_feature (1)..( 3003): 2750-1469P.txt file - cDNA_ID_3050972; gDNA_ID_1621154; Annot_ID_173373

SEQ ID NO: 32283 - DNA, 3003 bp, Unknown
  misc_feature (1)..( 3003): 2750-1469P.txt file - cDNA_ID_3051020; gDNA_ID_1621155; Annot_ID_173486
atccaccattgaatctcttcaagaagctttcttgggagattggtctctgtgattttggtggaaagaggttagggagcgagaaaggctttcgtggttctgatcttttctcggataacaccgacatagggctaaaagttgcggttttcagagcttccatgactctctctctctcagattctccttctacaccaagaattgtccactccgtatcatcaaacttttcccaacgattaaagatgatgaagaagaagtggaagaaaagtgtcaaggacaagagcattgagccgtttctagagagctgacgtggactgtgtaatcaatcctagccaccgcttgcttgacacgtggaatattcggatgagatacctcttgatcatgttttggtgtagaggactaaagcatagtgacttacttagtccgaaattgcatgtcaaatgtgtggccagagaatattgaagatgcttcaagagaagcctctgcatatttaccaaaatgtcctttatctagaacacaaagaacagagactagactagatacaaaaggttcctcagcatttgatttaagtgaacaaagaggatcaagtataacattaagaaaacataacatgatgcaatgtatggaacttacaatagatcaaagaaataatctaaaccttgtccgatttcccagattgaaatgccgattccccagagacgagcattctcaagccgtagaaggattgacatcaatgtaggatagaaaacagcatgcttgatgttcttatcatctctatacatgaaaagatgttcgccgctctctttatcccaacggaaagttggcttgtgtttctggagtaatgcgaggtaatcccttccggtgattgctcctccacctcctgaatcttgcgcaaaagaaaacagtttatgtcagttggttttgaaagaaaggcgggaagagaacaagttgcttatataagcttggatgctttatatacctccagagattacaaaatcgttgccgtaaaagttgataccaagaagaaccttcctggctatgtttgagtctatgttgttggatgacccaagcaggagcttgagagttaaatctatccacttgacaggagcattggggccagggttctggggatttgagaaatcataggtcataagagagaacccatcaaccgaatctttcaagaattgaagatcttctggcccaaaatcgtacatttggagcttctctgaacgaggcggaccaacgacatacatgaactgcatatgttgctggttgtttcttggtgagctcgttgagtgaagagcgtctccaagttgttttacgaatttcagtgcctagaagatttataaaaaagcttgctgacatgatgcattatgtggaaaaaaaatcgcagcggcctggaagagattacagggcataccattttccgcaaatcagggtcatgcaaaacgccataagctgcccaccttgaccaagactctaacacgataccattgtattccatttccctagagttcaaggcaaacatgatgacaaggtaagtgttaaaattcacaagctctaatgtaaagaaattcatccttttcagagcatgaaatatacaggaattgtagagctttgggagacccttacttgcactctgtgacaataagactgatagctttctctcttagtttttttttgttaagcatctccccaggaattgcttctagaacaactcttggtaatatctacataaaaggggaaaaaagtccagacaatcaaagaaggaaaaacaagttaaacatcagcattttccgggtaccgatctctggccaattcagagaaggaagaaaaataggtgtgctggttaaactaccagtgcattgcctcttgaccgaagctcttgaatccatcccttatcagcattatgtctcccttccaaaaccaatccagacccttggctaccagaaacagaaaccaaaaatgtcactactattttgtggaaaccatgagataattgcaggaacttagaactcattaacaaatgtatacaatatacctcttcaggtcgtaccataccggcgataaatgtgtaaactttgagttgaatatctttgccatatcatagcctttagagttcctacacagcatttttagcatatgaatccaatccctactgccctcagtgacaacaatttgtatattttcaatatctcaaatctaaaaatgttccaaagaaaccaaccatggagtaatgtaagctaacactggataatcatagtgcctagttgaattctctgaagccttggaatgttcctgaaacaaattcaaaccaaatttaatgaaaattcatcctaaagttttcagcttttcttctttgaattgcaacattgacccaaaactatggaactcacagtgaggatttcttggaaattaatatcagttttaacgattcccttttgacgtattgatgattccgtttggatgactcgatcagcgaatttgactttgtacacagcaatcgaaacggcgggaatcacaatgaagaagattacgaaaatggtgatgagtctccgatctgaatcttgttgtacgacttgacacagtgactcgtatccgtcgttccgccgtttcaaactctccgccgccgatgaacgtcgcctcctcgccatcgagtttctcaccagtgaaacagagaacgaaacaacatcgttagaactaggagatttttggaatgatgttaattccatatttacccctgcttctggtcaaatattacgttaaagaccaataagaggatatcagagagatggacacatcattctggaaaaaagaagagggttttatgacttttatcgttaaaccccaatccaaatcttcgcgaccagaaacagattcttctgcagaacctcttactagattgaaccgaagggataaggtaagatttttttatttcctggaatcaatttttcgtcggagaatacttattaggagttatcaatttacaggcttggagtctcagaaatg

SEQ ID NO: 32284 - DNA, 3003 bp, Unknown; identical to SEQ ID NO: 29141
  misc_feature (1)..( 3003): 2750-1469P.txt file - cDNA_ID_3051024; gDNA_ID_2926150; Annot_ID_197996

SEQ ID NO: 32285 - DNA, 3000 bp, Unknown; identical to SEQ ID NO: 7660
  misc_feature (1)..( 3000): 2750-1469P.txt file - cDNA_ID_3051024; gDNA_ID_1621155; Annot_ID_173485

SEQ ID NO: 32286 - DNA, 3000 bp, Unknown; identical to SEQ ID NO: 22887
  misc_feature (1)..( 3000): 2750-1469P.txt file - cDNA_ID_3051028; gDNA_ID_2926150; Annot_ID_198000

SEQ ID NO: 32287 - DNA, 3003 bp, Unknown; identical to SEQ ID NO: 18568
  misc_feature (1)..( 3003): 2750-1469P.txt file - cDNA_ID_3051028; gDNA_ID_1621155; Annot_ID_173481

SEQ ID NO: 32288 - DNA, 3003 bp, Unknown; identical to SEQ ID NO: 18569
  misc_feature (1)..( 3003): 2750-1469P.txt file - cDNA_ID_3051032; gDNA_ID_1621155; Annot_ID_173478

SEQ ID NO: 32289 - DNA, 3000 bp, Unknown; identical to SEQ ID NO: 29151
  misc_feature (1)..( 3000): 2750-1469P.txt file - cDNA_ID_3051042; gDNA_ID_2926150; Annot_ID_198013

SEQ ID NO: 32290 - DNA, 3003 bp, Unknown; identical to SEQ ID NO: 18571
  misc_feature (1)..( 3003): 2750-1469P.txt file - cDNA_ID_3051042; gDNA_ID_1621155; Annot_ID_173468

SEQ ID NO: 32291 - DNA, 3000 bp, Unknown
  misc_feature (1)..( 3000): 2750-1469P.txt file - cDNA_ID_3051046; gDNA_ID_2926150; Annot_ID_198014
agtatatggactatgatgttggagaaatctgcaatgatgattggagattagctcagaagcttatggttcatggatgcgatccgttgcctagaagacggtgcttctcccgtggcccgcagttataccacaaaccgtttccaatcaacgagtctttatggaagcttccggataatcggaatgtgagatggggacagtataagtgcaagaactttgcttgcctagcaagcaacacaacagcacgaaaagggttctttaaatgcactgattgcttcaacctcacgcaccacgaatctccgagatggcttaaccgaggcgaaatcgatcctgagacgaaccaaactgcggatttctcgatagctgaagtactcgagattaaaccgggagagattagaatcggactggatttcagcattggcactggaactttcgcagcaagaatgagagaacagaacgtcacgattgtatcagcaacaatcaaccttggcgctccattcaacgagatgatcgctctgcgcggtttagtcccgttgtacttaaccgtgaaccaacggttaccgttcttcgacagcacgcttgatatgattcacacgacgaggtttctcgatggatggattgatctaatacttcttgatttcgtgctgtttgattgggacagggttttaaggccaggtggattgttgtggatcgatggtttcttttgtctgaaagaagatgtgagtgattacatggaagcgtttaaagcgttgaggtataggaaacataagtgggttgtggtacctaagaaagataaagatgataaagaagttttcttctctgctgtgttagagaaacctccaagaccctttagatgattgatcattgcatagtctctgtctttactattatctttgtaatcatattcttaaaacaaaacagaatgtcaaaataaactgagttatattttagttatatgttccaatttgcttgtataaattcagactaagaatttcaccaaaagtgttatatgtttgacatttatgtttgtaatccattgtgatcaatatgatacgacgtagtaatgtaactctctgagcgagaaagagggttctccattttgttgttaacaacaaaagcaatctccactaggttcgggatgaacgaaccaacaggctcggaccgtggaacgcgcggtatataaacaactttgcctctttgttcatcgattccgttacatcggctcattggaggaaatcggagaatggaggaggagaagctagaaatcgtcgggcctttggaggagccgttgatgggaaacatcgtaccagaggagatcaatggcttggattcgcttacgtcgtcggattctgatagcgagaaaccagattcccccgttcccataaatgctccgatctaccggatgtttggaagagaacgaccaattcacatggttctcggcggaggtaaacgtatgaaacattctctacactcgttcccattttcatttctcacagattggttcggtctgatgatatatcgcacttagggtttggatgatgattagattgcgtgtgaaactgtagaaatagagattaatggggattgattgaatatgtgacctaatttgttgaagctgctgatgtgttgctatggagagacaagaaggtcacgttaggattactcagtgcagtgactgtgatttggcttttgtttggatttggtggtcgtcgtcttctcacatctctttgtcgtggatccattctctttctgcttctatcattcctctggtccaatgccctcaacaagtaaagttctttttgttcgccacataaccctgaaatatgttttaagtaaaaactcaatccttgtttgctaatctatcatttatagatctccagagaacatgatggatatttacatacctgagaagccattactccaagctgcttctgcgatgacatttgagcttaattgtgcttttgcaaccttaaggagcattgctttagaaagagacatcaagaactttgtaatggtacttgtttagtttctcaagtctttttttagagaagcctctgatatgatgattgctttctttttgttctgaaacataggcagtcataggactttggctagtatcggtcatcggaaactggttcagcttcttgtcattgctctacatttgtaagtacacactggttcttctcagactcttgttttttctttctatttagggataatgtcatgacctaaatgaaaccaacaggttttgtactaattcacacggtgccaatgctttatgagaagtatgaagatgagattgatccaattgcagagaaggctgtgattgagatgaagaaacattaccaagtttttgaagctaagtttttaagtaagatccctcattagccaaaccactcaaaacatcgaaattgaattagattcgatttgcttagtttagttcattcatttattctttctttagagtccaaatcatttcgagtcattcctctgttcatgtggttttggttacttcgtcctcaagtcatctaaacttttgtggatacaaaattggctgggccttgaaaataattctctacatagctatgaaattctaaagcttacagtttaaattagttaagtttatgtgtttattttttctttagctaagatagcaacaaatcacacaaaaaacaaccctttaacgaacaaaacaaaaaaaagaacacatttgaatgggcttaacttcaatgtttcaagcccaatagacaccgacagatccaacattacaacccgattttaaaacgggtaaacaaataataaacacttcccaatcgccattgttactctgttttgagatctccctccacgcacatatcatcagatctacacttcccactcaaaattttccagaattcccaaattcttctctgtatatttcctctaacactctcgaattcactccctaacttgtgatttaaaacaagtcttctcaaattttgttcatctccagctacaaaaaaaatg

SEQ ID NO: 32292 - DNA, 3003 bp, Unknown
  misc_feature (1)..( 3003): 2750-1469P.txt file - cDNA_ID_3051046; gDNA_ID_1621155; Annot_ID_173467
aagagtatatggactatgatgttggagaaatctgcaatgatgattggagattagctcagaagcttatggttcatggatgcgatccgttgcctagaagacggtgcttctcccgtggcccgcagttataccacaaaccgtttccaatcaacgagtctttatggaagcttccggataatcggaatgtgagatggggacagtataagtgcaagaactttgcttgcctagcaagcaacacaacagcacgaaaagggttctttaaatgcactgattgcttcaacctcacgcaccacgaatctccgagatggcttaaccgaggcgaaatcgatcctgagacgaaccaaactgcggatttctcgatagctgaagtactcgagattaaaccgggagagattagaatcggactggatttcagcattggcactggaactttcgcagcaagaatgagagaacagaacgtcacgattgtatcagcaacaatcaaccttggcgctccattcaacgagatgatcgctctgcgcggtttagtcccgttgtacttaaccgtgaaccaacggttaccgttcttcgacagcacgcttgatatgattcacacgacgaggtttctcgatggatggattgatctaatacttcttgatttcgtgctgtttgattgggacagggttttaaggccaggtggattgttgtggatcgatggtttcttttgtctgaaagaagatgtgagtgattacatggaagcgtttaaagcgttgaggtataggaaacataagtgggttgtggtacctaagaaagataaagatgataaagaagttttcttctctgctgtgttagagaaacctccaagaccctttagatgattgatcattgcatagtctctgtctttactattatctttgtaatcatattcttaaaacaaaacagaatgtcaaaataaactgagttatattttagttatatgttccaatttgcttgtataaattcagactaagaatttcaccaaaagtgttatatgtttgacatttatgtttgtaatccattgtgatcaatatgatacgacgtagtaatgtaactctctgagcgagaaagagggttctccattttgttgttaacaacaaaagcaatctccactaggttcgggatgaacgaaccaacaggctcggaccgtggaacgcgcggtatataaacaactttgcctctttgttcatcgattccgttacatcggctcattggaggaaatcggagaatggaggaggagaagctagaaatcgtcgggcctttggaggagccgttgatgggaaacatcgtaccagaggagatcaatggcttggattcgcttacgtcgtcggattctgatagcgagaaaccagattcccccgttcccataaatgctccgatctaccggatgtttggaagagaacgaccaattcacatggttctcggcggaggtaaacgtatgaaacattctctacactcgttcccattttcatttctcacagattggttcggtctgatgatatatcgcacttagggtttggatgatgattagattgcgtgtgaaactgtagaaatagagattaatggggattgattgaatatgtgacctaatttgttgaagctgctgatgtgttgctatggagagacaagaaggtcacgttaggattactcagtgcagtgactgtgatttggcttttgtttggatttggtggtcgtcgtcttctcacatctctttgtcgtggatccattctctttctgcttctatcattcctctggtccaatgccctcaacaagtaaagttctttttgttcgccacataaccctgaaatatgttttaagtaaaaactcaatccttgtttgctaatctatcatttatagatctccagagaacatgatggatatttacatacctgagaagccattactccaagctgcttctgcgatgacatttgagcttaattgtgcttttgcaaccttaaggagcattgctttagaaagagacatcaagaactttgtaatggtacttgtttagtttctcaagtctttttttagagaagcctctgatatgatgattgctttctttttgttctgaaacataggcagtcataggactttggctagtatcggtcatcggaaactggttcagcttcttgtcattgctctacatttgtaagtacacactggttcttctcagactcttgttttttctttctatttagggataatgtcatgacctaaatgaaaccaacaggttttgtactaattcacacggtgccaatgctttatgagaagtatgaagatgagattgatccaattgcagagaaggctgtgattgagatgaagaaacattaccaagtttttgaagctaagtttttaagtaagatccctcattagccaaaccactcaaaacatcgaaattgaattagattcgatttgcttagtttagttcattcatttattctttctttagagtccaaatcatttcgagtcattcctctgttcatgtggttttggttacttcgtcctcaagtcatctaaacttttgtggatacaaaattggctgggccttgaaaataattctctacatagctatgaaattctaaagcttacagtttaaattagttaagtttatgtgtttattttttctttagctaagatagcaacaaatcacacaaaaaacaaccctttaacgaacaaaacaaaaaaaagaacacatttgaatgggcttaacttcaatgtttcaagcccaatagacaccgacagatccaacattacaacccgattttaaaacgggtaaacaaataataaacacttcccaatcgccattgttactctgttttgagatctccctccacgcacatatcatcagatctacacttcccactcaaaattttccagaattcccaaattcttctctgtatatttcctctaacactctcgaattcactccctaacttgtgatttaaaacaagtcttctcaaattttgttcatctccagctacaaaaaaaatg

SEQ ID NO: 32293 - DNA, 3000 bp, Unknown; identical to SEQ ID NO: 32291
  misc_feature (1)..( 3000): 2750-1469P.txt file - cDNA_ID_3051046; gDNA_ID_2926150; Annot_ID_139274

SEQ ID NO: 32294 - DNA, 3000 bp, Unknown
  misc_feature (1)..( 3000): 2750-1469P.txt file - cDNA_ID_3051048; gDNA_ID_2926150; Annot_ID_198015
ccactcaagacgtgtaagatgcaaaaacttcttttcagattgcactgcagtctactcttttttattctcaggcccaaggacaggttttggttgggaaaagtacagttgttgacgaggatgcaatatcgagtggcgtggctgaaaatgagttagcagtagatgaaatctacacttgtgaggcaagcttttctatgaaaaagaaaaaacctataattgttgttataatcttgtttatgatgtttgtctctgacttgtttagatttgcaccggttgagtctctcgagctcgccaaaccctgtttcccatctccaagttactttatgttgtgtgttctacaaaatcgttgagaataattcattggattctatagtttgagactgaactctgatcttttgaatctcctggaacttaatggtttcgatgcaaaagattgaggcctctattcttcaaagcctaatccttgagtcccctatggcagcgcttatattattttgtgtatttccatgctactctgtagattccactttcttgtttgatgatcaagatttctgctttgatttcaggaattacttaacagatctggtgcaagaactttggaaccaaggacgatgacgaaagagagcactaaagttgatctatagttttcactttcctagtacagtactgtgtgagtgtgagtggattgatgatgtacagcagctgacattttccctctgtaatttctctaatatacagcagctgatatttccactataaattatgggatgtgtatcaatatggaaatatattaagataaatactttattaaaaggttttgatttataagctttctcattacttgctgctaaatttattagtttcctccttgaattcagcaacttttcttgggtttagccttgtaccatcgtggcatttcctataaacttcagaaatctccatgtgcattctactacgcttgtgctttaagtatgttgaatactattagataatttcccaaggattatattaattccactaatccctaggttagctgcaagatgaagttaaagttcacaactttatctctgcaactagattttgagtattttgcttctcatttcagatcttctctaagaaaagacaaaagaagatggtgttagcttgtgttcttgttgattttgtctgagcttgagggatggggaagacgaatgtattatcgaagatcagagctttcaatggcgtcaatagacccatctatgtgttggcaggtttggcttttcttatctcagtagctacattagctaagttcaactacatcactccactacgcttctctgatcggttctgtaactatcatggaagctttgacggcgacaactacaacatcggaagccaaatgagaaagacaatcgaaaccgccatttttaaaatccaccaagaaatggatgatctcaaggctttagaagctaattcttctactcctccatcctctgtttcatcagcttcaggatccatgtttaggcatgtagcttttcttgcggatgttctttcgctagttcagtcggttcatatggaattgccttcgttcgaagagagatccgtagcagatcatccgttgaagcagcagaaaggtgaccctggtgagcattttatgagagaagagataaagaagtacataaagatcaaacctaaccggctcgggaagcagaatttcatgggagctaacggaacattcacctcgatcgggcacgcttgttttgcgatgaagaaagatctagaagagtatatggactatgatgttggagaaatctgcaatgatgattggagattagctcagaagcttatggttcatggatgcgatccgttgcctagaagacggtgcttctcccgtggcccgcagttataccacaaaccgtttccaatcaacgagtctttatggaagcttccggataatcggaatgtgagatggggacagtataagtgcaagaactttgcttgcctagcaagcaacacaacagcacgaaaagggttctttaaatgcactgattgcttcaacctcacgcaccacgaatctccgagatggcttaaccgaggcgaaatcgatcctgagacgaaccaaactgcggatttctcgatagctgaagtactcgagattaaaccgggagagattagaatcggactggatttcagcattggcactggaactttcgcagcaagaatgagagaacagaacgtcacgattgtatcagcaacaatcaaccttggcgctccattcaacgagatgatcgctctgcgcggtttagtcccgttgtacttaaccgtgaaccaacggttaccgttcttcgacagcacgcttgatatgattcacacgacgaggtttctcgatggatggattgatctaatacttcttgatttcgtgctgtttgattgggacagggttttaaggccaggtggattgttgtggatcgatggtttcttttgtctgaaagaagatgtgagtgattacatggaagcgtttaaagcgttgaggtataggaaacataagtgggttgtggtacctaagaaagataaagatgataaagaagttttcttctctgctgtgttagagaaacctccaagaccctttagatgattgatcattgcatagtctctgtctttactattatctttgtaatcatattcttaaaacaaaacagaatgtcaaaataaactgagttatattttagttatatgttccaatttgcttgtataaattcagactaagaatttcaccaaaagtgttatatgtttgacatttatgtttgtaatccattgtgatcaatatgatacgacgtagtaatgtaactctctgagcgagaaagagggttctccattttgttgttaacaacaaaagcaatctccactaggttcgggatgaacgaaccaacaggctcggaccgtggaacgcgcggtatataaacaactttgcctctttgttcatcgattccgttacatcggctcattggaggaaatcggagaatg

SEQ ID NO: 32295 - DNA, 3003 bp, Unknown; identical to SEQ ID NO: 18572
  misc_feature (1)..( 3003): 2750-1469P.txt file - cDNA_ID_3051048; gDNA_ID_1621155; Annot_ID_173466

SEQ ID NO: 32296 - DNA, 3000 bp, Unknown; identical to SEQ ID NO: 32294
  misc_feature (1)..( 3000): 2750-1469P.txt file - cDNA_ID_3051048; gDNA_ID_2926150; Annot_ID_139275

SEQ ID NO: 32297 - DNA, 3003 bp, Unknown
  misc_feature (1)..( 3003): 2750-1469P.txt file - cDNA_ID_3051057; gDNA_ID_1621155; Annot_ID_173460
aatttggggtttagatctcagcactttgattctaccacctttaccatcaggtccaatagagatgagatcatcttttcttggaacagaacctcctagtgatggagttgcttcgtttctctctccatgtttgctccatctaccaaggtttctatttgttccacttgactgccaaatgtttccactacctgcattggacaatcttcaatctactactacactcaagaacttgaattcatgatgtacaacaaaagtaccattgctgtaaggtgacactgatgatgtcgggtcttttctgatgttgaactttatatccttcaccatggaattatcacctttctcttcaatattagtattccaatctctaatgccagaagtgttggtttcaggaacataatcatcatctacatctataaccgagtctgttctgctaacgaaggagtcttctcttccccttaagcatgatccttgaatggtaaagccatccttttcttctaatttaccaggtggtgtggagattttctccactttgttgtctgatgaaagcattctgaaagaagacatgctctcgattgcaggctcggaaacttctgtgtaactgcatttctttgaaacgtttatgtcccgtagagctctgttctctctctcttcagttatcaactcaagttccctcattcgtttctggtcatagaataaacataataagagccagatatagaagacacaaagaagatcgagataaacaccaaaacacacacctttagtttttctatcttttccaaagctttttcaagtttctcagaagatcgtgcttcgcctcttcccagctgattgcacttggctagcaattccttataactcctgtcagagtaagaaagattgttttttattagagacttcataaaagaaaattcaaagacctaagagaaaagaaacgcaatgttcaatcctcctttcctcaaattcttgaccatacctacttatgaaatttcgtaatttcagtttaacaagttgttgttacgaatgaactaaggtaaatcaccatttcataagtcactgaaggtcaaattaatcttttttaatcggattacactgctgtagacatgacaaatgggaaataatgaaccaagttcactaagtcaatgaccaaaatgagagcagggaaggagtgacaactaagtgctaagcacctacctatatcaaataaccaaaactaagtgaagccatgtgaactgagtggaactaatctatgtgacaaacctattccgaataaccaaggacttgactagtgtgtctattgtatctttcgtcttcgcgttattccccaacaaggccaacttcagtacatcatcttcctccaagcttaaatcagaaaccctggatgcaaaacaagatattagactcagaaaaggtttaaccatacgagtgaatgattaaattagaacctgaagacactaaaagagcaatatgaaagatgttatcttacaatttaagcgatgcgagctccttggcaagagccacagttctctcctgtagcttaacacactgtgagttaagctggatacattcctgtaacaaacaaacacactaagaaactcaacacaaaattctgcctgtgaagcaaaaaggatctaaaatctaaggatgttgtatagtttaaacaaacctcagattttaacttaagcaaatgctgagtcgttgatatttcttgaagagcctcccaccttttcactttatcctccttcaattgctcattgcattgatgcaactgagacacacacaaacaaaaacaaaaaaaaaaaaaatcacataaccttatcttatcttataaaccattctaatcaaacgaaatgaacaaaattaaccttatcagagacttcaacattctcctttttcttcgcctccagagccgaagtaagattctgtaccttcccttcaagccgcttcacttctcctctcaacaaaaccggatcttcttcgattccaacaaccttatccgaggcaatcgaatcggtttgattcccagaagactgaaagtaaagtcgacaaggatcctttagagagcacttctgcttacaaatcggacaatttcgcttgttcgtactcgggcaatactcaaaccattgctgcaaactagggtttccgaaagaaatcgattaaacacataaatctataaaatttcggagataataaacttcattagagaattgattttgccgtactaaccaaagttcgtgaaagacatggccacaagcggagattgattgcagattctcaaccaccggtttaagatcttcgtagcagattgaacaaattgcattccccgccgcgttttcttcggccatagctatctctccggcaatcaccgactagtcagtttccgacacagtcaccattttcttctcgagaaaatcaaaaggcaaatatcagagagcaaacacatggcgcggataaaaagttgaaatttcaatggtaagcgcgaaaatctggggaaggatagcacgtgtaagtcacgtgagataaaaacataaacaaccagtggcttgtattaggcccaacgtttttaccctataggtccattaaagcccaaatcagctattgatcagtggtcaaacacaatgtttaaattaatgttgacttaactcgtttttagtaatactagtacatcttttcgcatgcactaattaactcactctcgagagtagcgttcgtgagtctcgaggtttctcactattttttcttccgcagcgtcaccgactcagatttggtggtgctaggtcaccgtgttcttcacggcgttcgggagaatgtcttagttaccccagcttctccctaaggaaactccactactgttcaaaatccctttcctacacatctgtagttaaatgtcacataatctgttgaattacttgaggcttaaggtgtaaatgttatttttccttggcagagacctaaggtttatgtgtgtcttccagtttaaattatgtgtgggtgactcagagaatg

SEQ ID NO: 32298 - DNA, 3003 bp, Unknown; identical to SEQ ID NO: 18574
  misc_feature (1)..( 3003): 2750-1469P.txt file - cDNA_ID_3051064; gDNA_ID_1621155; Annot_ID_173457

SEQ ID NO: 32299 - DNA, 3003 bp, Unknown; identical to SEQ ID NO: 18583
  misc_feature (1)..( 3003): 2750-1469P.txt file - cDNA_ID_3051072; gDNA_ID_1621156; Annot_ID_173519

SEQ ID NO: 32300 - DNA, 3003 bp, Unknown; identical to SEQ ID NO: 18584
  misc_feature (1)..( 3003): 2750-1469P.txt file - cDNA_ID_3051076; gDNA_ID_1621156; Annot_ID_173518

SEQ ID NO: 32301 - DNA, 3003 bp, Unknown
  misc_feature (1)..( 3003): 2750-1469P.txt file - cDNA_ID_3051080; gDNA_ID_1621156; Annot_ID_173515
gcagccactcctgctcaccctgaaggattatatggttagagctctctcactagttcattatcatattagaggccatggttatatcacttatggcatttcccatcatgatgacattttacttgtttttgatcagtcttatatgcaagttgtttggttggaaatttggttgagcaactttggaattttgcttggccgtccgccattgcaatgctatatccgagcttactacctgtggcagtcatggggtttgtcactaaattggcgataattgctggaggccctgtggttggaaagtttatggattatagtccgagagttcctacatatatctcgttgaatgtcattcaggtaaacttttcaaaaaacactgaatgaaaacatcacacatgactttgtggttactttccttcaacttttgtcacctgacattggaattaagtgtccatgtcataaacttattttatgtctacatgtttaggcagccgctcaagtgctatctgcaggaatgataattcatgcatacacggttccttccacatcggcgtcatcaattcttctgcagccttggttttttgcattgttattcgcaggggccattgacagtctatgtggaatagcatctggagtcgccattgaacgtgattgggttgtattggtatgctttctttgtgatgccatagaatacctgtttttataagaagataaaccgactgaagtaattaatttatcatttggtagttggccggcataaacagaccaatcgctcttgctcaagcaaatgctgttctccacagaatagatctgctttgcgaggtatagtaattttctctatggaatctatgtactttatgccctttgaacttttgaactccagtaattcatcaattgacataattgtaaccttaaatagatagctgggacgatgttatttggcattctcctatccaaatatgaccctgtgacctgcttaaagtttgctgccacactaatggtgggttctttgccaaccatggtaagtagcacctataaacttgtggttattcttctttcgtccaagctaaataagggaaacacaaagctgctgtgttgtacgaggctgaactatgtgtaatagaatcattcctgtttcctatgtttcaagtttcgaattcttttttcttcaattaaaaaggcagtctttctcgtttaggttttggataattggagcttagcctagatggagtattattagttcttttaactagataaataagctgtcatcaacattggagtgatactgttctgcttcagatcctagaagcaattccacttgcgctttaccaatttatatgggacttcttaccatcttgcacttctaatagaagaaatctgttttcttcagacagctcttatatggctgaccaacaagttctcctctggagttctggaccgtcctaaatgctccttgaacagctgttctgctgaaggatctcgtactaataccgacagtatttgtaaggaaaccttttactttatactacttggatacgcataatttatgatttgagcatgtagtagacatcacaaaataccatttgctttgttcatcagttgatattggcatggaaactatcaagctcggatggaaagaatatattcaacagccagttcttcctgctagcctcgcatatgtccttctctactttaacatcgtcctcaccccaggcagcttgatgactgcatttctaacacaacgatgtatgctacttcgactcggtcccttacttttctttagtgcttggatgaaaatcgtaattaatcttgcgagagtctttgtgctattacctattactctttcaaattagtcaccaatctgtcttttttcaacaggtgtgaatccatcagttattggtggtttcagtggattatgcgctgttatgggcgtcgccgcaaccttcttatcagcaaacttggtcaaacgagttggcattttaaaggtgaaatgttttcccgccatttgttatcttgagcttgtattgcgttcaagctgattaatgttattgcgtttgcgttttaaaacgatgcaggcgggtgcagtaggattgtttttccaagcttcactccttgccgttgctgttgctgtgtattgtagctcttctctatcccataaaagcccactcttcttcttcttgtccatgatcgtaagttgtttcttcactctctctctcgaccagtaatatgcggttttggtgttgactaaaaggtaacaaacaaatgcaggtattatcaaggctaggtcacatgtcttacggcgttgtgggagctcaaatacttcaaaccggcattccatcatccaaggctaatctcatcggcgcaacggagatctcagtggcaagtctagctgaatcgcttatgctcggagtagccatagcggcgaatgacgcttcccatttcgggtttctcgcggttctgtctcttttatcagttgttgcggcctcattgatattctgcagattgctgagaaatcccactgatgaacaaagacgactcttctccttcgaccctctctcaaattgatttggagcttttacattgaaatatttgtatagtagtttcactttcagtgtataaattctttatataaagtaaagaaaaaaattgactttggtgtgaaaaattcaagaagtattccacttccaccattactactctaaacaaaaagtactaaactggctaaaccttagttatttttctaaaccgagaattaacgagataatttaacaatcgatttcaaaaaccagcaaaccgaaatcacccaatttttggtcggtttggttcgattttgttttctttcacccctgacgaagaaaaaaaaaaccctagtcacactcagataacataaacctttgacaacaaattttgatgctccttcgtcttacggctcgctctattcgtcgtttcacaacttcttcttcgtctctaccattgctctcatcgtcttcgttttgtactgttccaacaatg

SEQ ID NO: 32302 - DNA, 3003 bp, Unknown
  misc_feature (1)..( 3003): 2750-1469P.txt file - cDNA_ID_3051084; gDNA_ID_1621156; Annot_ID_173514
cctcctcttctagtcttcttatgattatttttcttcctcatcttgttttttttttttcagacaaaaacctagatagctaaacatgccttgtttgttcatcttcatagctttgcttctaagttcttgtattggaacgttgaaagcccttgatcagacttgtggcaacaaagtcgtgaacacaatcgtcgtcgaccaagccggttcaggtaagttccgtactgttcaagctgccattgattcggttggtgaattgaattctctatggatcaaaatcaaagtaaaacgaggtgtttacgtgtaagtaaataccaactctctactgtttttctttttccaattttagaactcagcgttcttgaccacaattttctagcatttgatttgtttcgaatgtaaaatattactgtcgttggtgtagaaataatgacctagtagcacttgacttcatcttaggcctctccacaattctacatttatactcaaataatttttctagtttcttcgttgttttggagagaattaaagcatagttgatatcattaaatcttgaattcgtgatgttctggttcatagaattctagaaccgtaattaatctaatttacaacgatttcgatggatttgcaattgttaattttcttaatagtaagattaacattaatagtaacatattgttttgtatgataatgaatgtataaaacagagagaaggtgataataccatataataaaccgtgcataatagtagaaggagagggacaaagagtcaccaccatcacgtataatggtcatgcagccactgacgtcagctcaactttcacttcatatccatcccatattgtcgtccgaaacttatcaatcatggtacgtaacggaacggaccaacatatcttttgacttatatactatattttgttacgtaacaatataattttgataatgataacattttatatgtttttgtggcagaacacttataatcgtttgactagtctaactaaagcaaacggtatgagttgggatataaagccagcggttgcgatttcggtttatggcgataaatcagcgttttacaactgtgatttcttggggttgcaagatacagtgtgggataatcttggcagacatcacttcaaaaattgttacatcgaaggtgctatcgatttcatttttggaagtggccaatctgtttacgaggtatgtatacttaatatctctctctattacgtacacttcgattttcaatggcaaaacacgaaaactgtacttgatcactatttacacaaagactgttacattcacagtacaaacacacttttataaaatctttgtttcaaaacgccctagaaaggagctaggcacagccacaccctgtactaaaatcagctttttgttctagaaaaagtaacatttcagtcattcaaataatagaaacaaacttggttaaaaccttgtttgtagcatgttttttcctagaacaaaactaaacatgtgacttgactagctaggaggactgattttttgtaagtcaacaagttgattttgagacaccaacgattaagatctatgtgaaacatgcatgaatcgtataaaatgtttgacaggactgtcatataaacgcaacggcaggagcattggcatcaaaagtgtcgtttgggtacataacggctcaaggaagaagtagcgattcggacccaagtgggttcgtgttcctacgaggtagtgtttcagggagcaccagtgtctatcttggacgagcctatggtccattcagtcgagtgatattcatccaaaccgatctctcttccgtcgtgcaccctgagggttggtactcttggcactatggtggatacgagtaagcacatctctaactataatatatcatatataccattatcaaactatatgtgataatgatgtttttttttgtgtgttaggatgagtttcacgtatgcagaagttgagtgtaaaggagcaggatcggatatgtcacgaagagttccttggattgataaacttcattctttttacactaaacaacaattctctatctctaatttcattgaccaagatcaatggatctctaatattcctcgtttttaaataaatcactttctcttttgttagattctagttgttttatgtaatttgtatttttcctttcttgttgaatattattgtctctttgaagtttgaactatgaagactttttattttcttaccttgtattcaaaccaaactgaaccgactatatatgtatgttttctcgtttcgattctggtacatttcgatcgctctttttatatgacttcggttttcatttcaattcggttcatctattacccgagtaaaccaaattgttattattattggttcattcattcattgtatttcaaattttgattctttatatttagtactctgccaattttcatcaaaattgcactaaaacaaaaacaaaaaaattagccaaattgtaaacgaatttgaaccaatatttggtaaaactgaaccgcaattccattcccagaattataccgaaccgttataaatacggttcaaagttcaatctcttcaactaaaaccgaacttttatctattcgaaccgaaccaacagacccaatggccatggatgatatggttagccaggtggctatggattactggttacaaataaatctacgtggcttaatctcccttacacaaaactctctgtgccttttcttccccacttgagctaattcgcttaaacggcgtgcttcgcgacgaaccgccacagataaggttcttctttttttttccaatatctctggattttttttcccctcgttgaagaaaatctagtggtgattaagccataggggaaacaaaacccagagagacgagtttgctagattttttttttttttggaggctgcatgagtttggagaagaaggcgagtagtacaaattacaactccagaaaggagaagaggagaatcaatttatagaatggttgtttcaatg

SEQ ID NO: 32303 - DNA, 3000 bp, Unknown; identical to SEQ ID NO: 7667
  misc_feature (1)..( 3000): 2750-1469P.txt file - cDNA_ID_3051091; gDNA_ID_1621156; Annot_ID_173501

SEQ ID NO: 32304 - DNA, 51 bp, Unknown
  misc_feature (1)..( 51): 2750-1469P.txt file - cDNA_ID_3051116; gDNA_ID_1621156; Annot_ID_57040
cttaatcattattttgaaatttgtaatgacttatgttctcttgttttcatg

SEQ ID NO: 32305 - DNA, 1943 bp, Unknown; identical to SEQ ID NO: 7672
  misc_feature (1)..( 1943): 2750-1469P.txt file - cDNA_ID_3051118; gDNA_ID_1621156; Annot_ID_173538

SEQ ID NO: 32306 - DNA, 3003 bp, Unknown
  misc_feature (1)..( 3003): 2750-1469P.txt file - cDNA_ID_3051169; gDNA_ID_1621157; Annot_ID_173590
ttcagttcccacttggtactcatacccgagaatctgaaagaagaaaatccaatggctcctttggaaagtccagcaaccgcttcttcaagcgaagttgagagttcttctgaagagatctttaagtcttcttctgaagaaagcaaacccaaagatcctgtcacagttccttcctctaaaaccctaaaatctccttccgccgctgtgaattctaagacagattcttctgatgactcagagaagcagtcattcgtcttaaccaggcggaagaagaaagaaggtgctgctgaatcaccggcggtgaagtcagggaagaagcgagctggtgaaggaagcacctcaagggacatgcatgtcaaaagagttaagaaagaggacgataacaaaaaggcgaatcctcagagagtatggagtgaagaagatgagatctctcttctacaggcagtgattgatttcaaagctgagacaggtacaagtccttgggatcataagaatgcgttttttgatatcgccaagaaatctataagctttgatgttagtcatgtccagttctttgacaagattagaagattaaagaataagtattttgttaaccggaagaacaaaagtggtgaatcgaatcatgataagaaatgtttgggtttggctgttttgatttggggatctgatggtatgaacgttgaatctcctgtgaagaaagatgaatctattcttgttaagggtaaggctaatagcaaggagaagaaggtggagaaacctttggttatagaagatgagcaagtgattcttggagcagattcggagtggtttgaggagtcttttcttgttccggttatcgcgaatctcggtttggatgagtattctgtgaagaagaagtggagcaaggtgtctctggagactaagaagaagattcaagagaagatgaaggttgtggacgctaagaaatgtgagttgttgttggcggagatggatgttttgaaggatgtgacttcggtgcttgctcaaaccaactaagaagaagaagaagaagaagctatcttagggattgtatagggttaatctaaggatgtaatgccctcttttgttatctatcttagggtttatctttctatctacgtttatggatttttagtcttttggattctcgtgtgagaattagctataacaagattaagataagttgtctaacaaaccttttggtcgatggttgtaatgaacttttaggattttgtaaatgtgcttctttttttaatgtctctctactcaaaactcatgaccagagttattacaaaacaaagaaacacacaatagaatggattcacaaacatattcaacaagagttctaaatagcttatatggtgataggttcaacctcattaaacaaaatggattctgaaatgatgtttgtaaattgtatatttattgtttatgataattacgtgcagtttgagttattctggtgacactagttcctctttctcaagtaccaaatgcaaccaaaataaaacatatacatttagttacaatctttcacagaagttattatgtctataataaaaaaattaagagattctgcatcttgaaactgcaaagtaggtgaggaaataaaaagaaacataaattgtgtttatgagcatgcttgttgttagagtcccaatatgtagtagagtagcttgcaagaaatcagagttaattatgcgtttaagagcatgcttgtgtgtgtaagtgtttcaagtaaaactataataagtatgtgtgtttgtatcttgtaagagaatcacccaagttttattatcaagacatcatgctcttaaacgtgttcttgtttctctctaaagaaaacaaaagcaaaacagagtgacaagagagtgagagtgctgacctcaaaagaatgttggaagaggtagtttgagagtgaaagtgtgattttcaacagatatcttcctcacgtagaagaagttgaatggttaatatcaatattgttatgtataaccaagaaagctatagaattgcactatgatattgtgaagctgcagaaaaataaacaacagtaaagtacatacttgaacaagaaaatgaactttgttagtccgcgtacttgtcttaactcttatgcaggggtagccaagcaatatgaaacatttagtgtggcccattttttttttttcaaattctttaacaaaaattatttacaaaatggccccaattttattgattttaacgataattggccctaaattttaaaacctttcaaaataatcttggattttttgtttttttgtatgttgcccataaaaccgtcaggtcttaggtaaaacatctataaattaatattcaataaattaataaactttataaattaataaattcattcaatcccgagttgaaaccagtgtaagaattgatacaaatcgataaattaataaaataataactttttgtgaaaatcatatgtaaatatttggtcccatcaatattataaattcactaatttatatatatatatatatagatatatactaaaatatgaatatagtattcaatttgtattaattctttgtagaatttaattctaatatttttactaaatcgaaaaatttagttttggtttttaaacttgataattgtttaataattgtaattggtttcaaaaatattattgattataagaaaagaaaaaaaataccttttttgattgaatattataagaaattacataatttgtaaaatttctttataaattaatatctcttcaaattaataaattttatcaatcttaaaattattaatttatagagattttacctaatatgcatttttaactaaaagtcataatgttatatattttatttatatttagagaataatatatatattaaaaaaaaaaaaaaaaaaggttgacaagtggaaatatgtgaccggcaatagtaagttaagttgaccaaaaccaaaaccaataaaatcaaaatcgagagactctttcttcccccaagcgaagaagcgatg

SEQ ID NO: 32307 - DNA, 3003 bp, Unknown
  misc_feature (1)..( 3003): 2750-1469P.txt file - cDNA_ID_3051180; gDNA_ID_1972020; Annot_ID_178030
tcattcattaactcgctcttggttgcttattcaagatttatttgaatggatggtacgaatgtaacatgtgcagtaaatattagatttaatgtcttagtgagcattttgcaataaaaatctgtggatttcatgtttattacaaacagtttcttataaaacatttccttcattattcattaagaaaattaattaagagcacaaacatttccttgttcgtttgccctagacaaggcaataaatcatatcctagagaagcgtaatcgatcattcgattttctttacctaagcgtacaattgaatgttttcttatattatttcttccgttcctttgtcttattattccttaagtctatgttcttacttacgttcactctttttttcttggttactcggacagattccaagtttcttattctacaagataaatgaatcttggttaaaatcaaacgtggaggttgtgaagaaatggacaagacaagtcagttgcctgatgaattgctggtgaaggtattatcatttcttccaacaaaagatgctgtaagaacgagtcttttatcgatgcgatggaagtctctttggatgtggctgccgaaactggagtacgattttaggcattattcagtttcggaaggccaagggttagctagatttattactttgagtctactaggacataaagctccggccattgaaagcttgagtctcaagcttaggtatggagcaattggatcaattaaacctgaagatatctatctctgggtttcacttgcagttcatgatagcaacgtccgtgagttaagtctcaagctttgtacttttgcggagcgtccaactaaattgcccaaaagcttatataaatgcaaatcgattgtgatcttgaaactgaaagacgagattctcgttgatgttcctcgtaaggtatgtctcccctccttgaaaacattgttccttggacgtgtgacttactcggatgaagattctcttcaccgacttctctccaactgccctgttcttgaggatctagttgtggaacgagatagaattgacaatttggggaaattgagtgtggttgtcaagtccttgcagagactaaccctaaagatgtcttgtccttgtcatcttgatgggattatgatgaatactccttctttgaagtatttgaaagtcactgatgaaaggcaagagagtgatagtgataatgagagtgatagtgatagtcctcgatacttctacgattttgaagatatgcctaagttggaggaggcagattttgtattgacattccaaaatatcaaaaagttctttaaatttgtcacatctattaagcgtctttcgttatgcttgggagtctacaccgaagaggtaatctgtttccatcaatctatcaaacttatttttgaacaatattcttgaagttgaatcttttgtcatcttatgcagtctttatatcatgagggtcttgtcttcaaccagcttgaacaattgaagatatgttcatgtgattcagattggtcaattttactttctcggttactcgaaagttctcccaatttacgagagctcgaggcttacgtgatagaagtaagtttcttcgttagagacatattccattggttcaatttactatattgtttaagccaaacttctcatgtttgatcacaggatcatccagataggcgtgtggatctaccaaatcagtggggcaatcagctgaattgtgttcctaaatgtttgttgtcgagtctcgaaacgttcaagtggagtgagatgtatggattgctgcagaaccagatggatgtggctaaatatatcttgagaaatgctcgatgcttaaagtctgcgacaatcttttttccgacaacctatgctaaagaaacaagagatgagatgatcgaggagttgtcactttcttttcaaggtccagagacatgccaagtcttcttccattgaggatgtgaatcataaggattcaaacttgcatttccatagacactaccctccatattacaatggttttttatttgcagcaacttgatctaaacttaaggtgttttttttgtctttgttttttttgtatactttatctttgagcatactatttttcttgagacattggctttatctttttctgagatcttaacaaataaccgaactttgaagagacaagacatgacatgaacttttatttgcagcaacttgatcataacacaagactcaaacacaagactcaaacacaagactcttcagcttatagatcataaagtagatcaatagcacaaaaagatatcaattagaagatcagtcaacaatatagatgttgtagaaatttgcatcctaataaagttcattacaaagaaatgacccaagtttcccacacatatccgcatcaaaaaaacaagtgccataacattgcattaagattcatattcatattaccaaacagagcacttgcacacatacatcaacacaaaaccggcaagaacatcataggaacactcatttgaaaaaacccaaggaatagattcgactatgtaaacacaaacaagtatctaggaaaatcaaaaacataagtaatagaagaatatgttaccttcaaagaagaacgagattttctcagcgctctcaaacccgggttctcaaacccgaaccggaccggaaccggaccattacccatttaacccgacggtttacccataagccgagccctaattttttcaaagaaaagggccctaaacttttcgtcttctcgcttcccttcctctatctcgtcttctcgcttcccttactctatcccatagaaaaaccctgaatttggtttggccaatgatgtcaaaactcttcattgatacttaagaaagttttctccattgttcttcttatggtctcattcacatttggtaagtctcttcaacgattttggttttgtgagcacttacttcttcttacaagaattacatgtctttgttcaggttgtaactgttgatctgtttctgtcacaaaatg

SEQ ID NO: 32308 - DNA, 3000 bp, Unknown; identical to SEQ ID NO: 7706
  misc_feature (1)..( 3000): 2750-1469P.txt file - cDNA_ID_3051180; gDNA_ID_1621157; Annot_ID_173575

SEQ ID NO: 32309 - DNA, 3000 bp, Unknown
  misc_feature (1)..( 3000): 2750-1469P.txt file - cDNA_ID_3051184; gDNA_ID_1621157; Annot_ID_173571
acttagaaaggaatattcaaacctttttggcacgtttcacagcaaaggttttgccatctctgagtttgaccttgtaaacagtgccaaaaccgccttgtccgatcctaaaggacggagagaagttcttggtcgcgtcgtagatttcatcgaaggtgaatcttgtatgctctgtttcgtttgcatttccataactcctctgtacactactacttcctgttgagctacgtctactacggatattattgtctgctcacacagagaccaaataaaatcatcatcaactgtttccactaaaagtctaaaatctaagaattactgatcaaactataccggaagaggactttgaattgtcgatgtagttggaggaaacggaatcgggaggagtgaagcagttgatgaagataccggagatgcgacgagcgatggaggtggttgtgtcggtggatgtacgggcaggggttgtcgggaaggaacgatcggtgaaagtagtgttactgtaattggaagatgtggttgcaggagatccgacggtgtagctatgtctccgacgactgggcatcggaaagttcgtggagaacgtgtagcaatggtgaacacggaaggaaggaagagtcggagagactgactttacaattttttcaactttttcttctccgttgaaaaagacgactgttttgggtatttattgacgccagctgtacaacttgacgttctctgattaacaaaatttaaactcgacaagctaagataattaatgtgtataatttcctttttttttattacattttgtctaatgatttgtaataagcttttttattccttagatttaaattcgataattattaattttgaaaaaaaacgattggtttcaaattttattgaataactaaatactttgtatataatagtagttctcggcgttcagttatccattccgttatcgattttttcggttttaaagtttagtatccattcggttatttgaaagttctgttcggtttcgattttaaaatttagtatccattcggttatttcatttaaaatatttcggttattttgaatatttttaaatatttttagatatttccaaatatttttactattttatttatattttcaagtatttttagttatttagtctagaaataattaacacttttaaaaatatatttatactttagatattttacccaaaatattttggtttgtatttattcggttttatttcagatatttcggttatagaatttaatatttattcgactagtttccaatttttggttcggttcgatttaattttttttttcttcaattttggttcggtaaattcgattcaatttatttacagtagtactttaattcggtttaaacgctccaaaacagcacgtacatggaaaattgcatatgtaagattattaaataattttagtatttagaacatctactaaattctgtcattattgaatttatagaggataattagttcaatgccagacgtaatctatccgaatgatttgaaaattttcaactaatatcttgttagcgattattccgccgccaccatattaaatgccagatgggtctatctctattaatgcaataatcgaactcgcatttaatttgtatttttttttacaacaaagataccaagaaaaaggtataatatttttcttataaagttactattagatacattttatatgaaaaaggcttagattagaggaaataataaaatggtagattaaattactttgattagaagtcaatcaatattaggttacggttaacaaggaagattcataggcaggtgaaggatgatgagaattgagaccttaccagcaaaatattcaatagcctctgatagcgacagagggtttgaccttctgtagaatggaccatggtctaaaatgtttatagcccatgtttcagaaaacaaaagcccaatgattagcccgtatccttaaccgacgtcgtactatttaaaaggtatttaatgagatttgagaataattaggcaaactaaataaagtaaagtaggattacagtataattacttactatgatgaggttattcgactagagaaaaggagctctgtgtgtcgaaaccctccgtcgccagcatttattcttctcacttttcttcaccggagaatcacgacaacatcaaattctccggcgacatctcaggttatcttcgtttactgctctcatcggttaattattccatctctttttttgtttcccggagtcggctttcgtgtactttttgtttttggtcttttcggcttcttcaattttagggttcgcgtactgtttagtgttgtttagtttctgatttagatgtgcttactgtgttcatgttgtcgtctattcttatgagaagatcttatggtagagttacatatcaatgatgttaccaattttgaaggttattgtgttgtgtttgattaaaattggctcaagtgtgaaatgcttttgctcgcgtcactgttttcattgcaacttgactgaatcctagaggttgttttagaatatagattcaagtttcagctattgatgggacattacaacagagcataaggaacattcccatacctttgtgtttcttatggataactttggcatcagatcaactttttcttttgtcattttgcttattaacactgtaataatcacttgttattgggatttctcaagtctgctttgattaatcttgtttcgtaatgttcttctcactattcactcttcccatacctttgtgtttcttatggatgactttgccatcagaccaacttttcttttgtcattttgcttactaacactgtaataatcactttttttttattggggtttcttaagagtacttttgattaatcttgttgcattcaagtaatcgttgttcagttcactcttttcctgcagtggcagtgcatctgtaaaatgcttcaaggactgttgttcgctactcttgcttaattattactatagctggtgaaaatg

SEQ ID NO: 32310 - DNA, 3000 bp, Unknown
  misc_feature (1)..( 3000): 2750-1469P.txt file - cDNA_ID_3051191; gDNA_ID_1621157; Annot_ID_173567
ttagagatgctaaacttgtttgtgtggttgaaacgtctaagctttgggaaatagctgcacctatagctttcaacattctttgtaattacggtgttaactccttcacaagcatcttcgttggccatatcggcgatcttgagctttctgccgtcgccatcgctctctccgtcgtctctaatttctcctttggtttcttggtgattaaaataaccttcctctactctgcttttttcctcctctgtttcttgcgttttctctaactttctagaaaaaaactgcagctgggaatggcgagtgcgttggaaacgttatgtggacaagcgtttggagcgggacaaatggatatgttaggtgtttatatgcagcgttcttggcttatcctcctcggaacttccgtctgcttgcttcctctctacatctacgcaactccacttctcattttactcggccaagaacccgaaatcgcagagatctctggcaaattcactacacaaatcatccctcaaatgtttgcgctcgctatcaacttcccgactcagaagtttctccagtcacagagcaaagtagggatcatggcatggatcggtttcttcgctttgacccttcacattttcatcctctacctctttataaacgttttcaagtgggggctaaacggtgcagcggctgcatttgatgtctcggcttggggaatcgcgatcgcgcaggttgtttatgttgtagggtggtgtaaagacggttggaaagggctgtcttggttagcgtttcaagacgtttggccgtttttgaaactgtcgtttgcgtctgcggttatgctttgtctagagatttggtacttcatgacgatcattgtcttaactggacatcttgaagaccctgtcatagccgttggatctctctcaatctggttaaccgttagacctcttcacaaactcaaagatttacattttcttctatatctgataacacttttctttctctcagtatgaacattaatggatgggaaggaatgttgttcataggaatcaatgcagctataaggtaaaaagcaaaagcaatctttgtgtcttctaaaagaaggcgttagacttatatatatgtttctttcagtgttagggtgtcgaatgagctaggatcgggacatccacgagctgcgaaatactccgtgatcgtaacggtgatagagtctctcgtcattggagtagtgtgtgcaattgtaattctgataacacgagatgactttgctgtgatttttacggagagtgaagagatgagaaaggcggtagctgatcttgcgtacctgctcggtataacgatgattctcaacagtttacaaccagttatatcaggagttgcagtaggaggaggatggcaagcaccggtggcttatataaacttgttttgttactacgcttttggattacctctagggtttttgttaggttataaaacaagccttggcgtacaggtaaagccacatagcctccggtctaattattttggtttaagttgatgaaattgctttatgtggtttttcaggggatatggattggtatgatatgtgggactagtcttcagactctcatacttttgtacatgatctacataaccaattggaacaaagaggtacccccactcatttcaggttttataatcaaatctttcacacaaattgaagtaaaatgattcactatcttaatttattaggtggaacaagcttcggagagaatgaaacaatggggagctggatatgagaaattagaaaaaatagcaacttaaatgattttgggaaaaaaaattatatatacacttcactttatatcttatgttatacagcaatatatttttcattgtatatatcaattttttttgtaataccaaattgtatatgtcatcaaaatataatttatcatacatttgtaaatttttaatcttatcaaaatgatgatttaaatctactaattcgaccttattcaatcatttcattatttttacctactacggccgattgtcaggaataaattaggccggacaaaaatccagaatcggttatccgaatcgaaatcaacccaaaaaattggatccgaaatcaaactcgaacccgaagatttatcctattaggtcttaaattcttctaccgaaaaaaacgaacccgaatccgaaaatactcaaatattttattcaaaaatctaaattttacctgaaactcaaaattttacccgaaaatctggatatttacccaaaaaatctggatatttacccaaaaattcggatatcgattccaaaaaagggtctaaaaatctatatccaaactcgattggacccgaaccgaaattgaaccgacattttagatttaccctattggatcctaaacttctaacccgaaaaatctgtatccgattggattttatccgaatccgactcgcttacccgaatgtccagtaaatgaaaccggtctacccattacccggtttggtctttgcttcccagagaataattcttttgtagagtatattttcacacttgcagcgcaatcgaggcggtttttggttgcaatcgtctcatcacaatcacatcatcatcgtcttcgtcttcttcttcgtcggcacatactttgtcttctcatctcctccattattttgatcttatcgcaacagatctctcatctccttcacttgttgactgtgtaagtctatccgattctttcgtcttccctggatttttttctccgtcaacgatcctttgttcagatcgatctgtttcgtctagtctcagtttcaatttcgtgctttgattggtttatgagtttgatttattggaatatatgatcttatcttatccatggttgacgatcgtgtctagaatcgaagttgctgaatagctttgatcgtcgttagcttatatgaattctgatggtttttgttattggatcagcttaagattattcttgttgatttgttgttatttgatcaaattttgtagttataccacaggacaatg

SEQ ID NO: 32311 - DNA, 3000 bp, Unknown
  misc_feature (1)..( 3000): 2750-1469P.txt file - cDNA_ID_3051195; gDNA_ID_2926128; Annot_ID_196772
cagtttgttcagagagaaggagattactaggcagattactcaagtacatgataaaagatatgataaaagaggaaataaattgcttaaactgggaaaacataaagcatcaaatgttcaacgacaaaaaccaaaagaaatcaaagacaaaaaccaaaagttcaaaagagaagagataaagagaagcgatgaatgatcctgataagtgatagcagacaaaactaagcatctctcgagacaccatcttcctcagtgttccttgagctagaatgactatcgacaggtttcttttttagtttcagccgtttgggtgcggcaaaagaaacctcttcaagcgtcatgtctttaaattcttccttgtcttcaataaacgttgcaacttcctttatagatttaaacctctttcgtctaggagccaatgattcatagtaaacatcgactttcacgcagtttgttctcacgaccaaaactctcttcaaaccttgaggggttttgggtatactatgttcatcctgaaaccaacgcatagtaagggaatcaaagttcattaccatatctccaggttcttcacatctcttgcattcaaaaaacttttccagtgttttactacgaatctcttcataatcttcttgtgactctatagatctcactttaagacacttccaacattgtgcagcgtatgagtcaattaacgtggttttcactacacacataaaaccaaacaaagactaagataaaaataaaacattgtcgataccttgtgagatgcaatgataaaaaacgaatcttcatgtaatgataaaaataaaacaccatatttcaagttttgggatcttcatgcattgacaaaacaaatcttcatgcaataataaaaataaaatattgtcgataccttgtgagatgtagcttgagtagtcttcctcaccatatttcaagttttgagagagataaaaatatttttttgggagtttagccttttagttgaagtgaagaagaactaaatatatcctttagattcgtaaagtgaagtgaagaaggaatgaaatctttactgcaatagcatttaagttggcttttaagccttataagaagtatctaatcaagtactattataaccagaactcgaagagatagtagcttgcggtgattcgaaaagtcggagccattaattttgattttgcatgtactttctccaaggagaggaaaaacaatgctttgaaaattgtattaacgtaaatttggacgcttgagatacatgtaggttagggctagccttacatcagtaggacaggcgttttagttccttcaaccctagataatattaaaagttccaattcttaaaaaaactttaatatgcagcccaatagaatcctatagcgtcagtgaccacttcatttggtgtcaaccaattaaaaactgatcagttatagaaatattaaactagtgataatgcgcattttgaatgtaagacaagcatacatataaaagttttatgagttatttaaattattcaattttggtttaagattttaaatgatgtggacatatataagaaggcaaaaccatatactgtactgtattatataatccattcttcgtaacatttggtctgttcttggctcggaaattgtctctgaccagagcagtgttctacatgattatgcaatgtctcggagccatctgtggtgccatctttaagactagtgaatatcggcgcatctttaagcctagtgaatttcggcccatcttcaagactagtatggaggcctgttaagggtcttctaatacagctcaacatgcctttttgtgtaagcctagtgaatttctaatacactttgtctctggtcaaacactttcatgcgttttttttataaatatgtttaatgagcataaatgtgcggctcaaagcggtgcaactcccaacggtcaaataaacaaattaagctcaactgctcaagtagtgagaacaagatcaacctaacttgcacaacgaagaatttttgttgttgttgtggtcatatatatttttacactaactaattattttgacaaaagtaatcaatttgtgacattctacaaaaaaaaatataaaaataatcgaatataatttttttattggtcaaaatatcgattgcaaaatacaaaaatcaaggcataacaagttaatctataaattatagtcgtgttttaaaattaagtcgtgtgttttgcggttttgtcctcgattttgttccttcctttgtgtcgaattagtcctacattttatagagaggtcttcttgaccctaatccacgtgggattttgactcgagccaccgcctctattgaaatgataagatcgtttctagaatgaggttacggcccgtattggtccggttcttgtcggttttggctaacactgatctttcataaagctttctagaatatcctttattattttccctattttgatgggttaagaaatttaacagagtttattcaatatcatctccaagatttaaattattcccaacagtaatgcaattaaaatctaatatcaactatatattggtttagtaactaaaccaatatatagttgatatctaagctacattaaatctaaaacttttctaacaacttcacttcaactaaataattaaacccaaatctaagacaaagtctctaaaaagattatagacaattcgactgtgtcaacaatatcaccacatgtatagatgcatataatcattttcatataatgaattcgacatgtggccctacactttacgctcttagtggatatttcatagttaatgacatatacatatatatatatatatatcatattcattcacatagatatagattatagatataacccactgaattaatattacggtcttcaatataggtgcatttaaaacataacgttccctctcttgtcttcttatttttgctctctgttctttagaactgccattaacgagagtgagagagagagacacacacacagcgagtgaaaatg

SEQ ID NO: 32312 - DNA, 3000 bp, Unknown; identical to SEQ ID NO: 32311
  misc_feature (1)..( 3000): 2750-1469P.txt file - cDNA_ID_3051195; gDNA_ID_1972020; Annot_ID_178043

SEQ ID NO: 32313 - DNA, 3003 bp, Unknown
  misc_feature (1)..( 3003): 2750-1469P.txt file - cDNA_ID_3051195; gDNA_ID_1621157; Annot_ID_173560
tagcagtttgttcagagagaaggagattactaggcagattactcaagtacatgataaaagatatgataaaagaggaaataaattgcttaaactgggaaaacataaagcatcaaatgttcaacgacaaaaaccaaaagaaatcaaagacaaaaaccaaaagttcaaaagagaagagataaagagaagcgatgaatgatcctgataagtgatagcagacaaaactaagcatctctcgagacaccatcttcctcagtgttccttgagctagaatgactatcgacaggtttcttttttagtttcagccgtttgggtgcggcaaaagaaacctcttcaagcgtcatgtctttaaattcttccttgtcttcaataaacgttgcaacttcctttatagatttaaacctctttcgtctaggagccaatgattcatagtaaacatcgactttcacgcagtttgttctcacgaccaaaactctcttcaaaccttgaggggttttgggtatactatgttcatcctgaaaccaacgcatagtaagggaatcaaagttcattaccatatctccaggttcttcacatctcttgcattcaaaaaacttttccagtgttttactacgaatctcttcataatcttcttgtgactctatagatctcactttaagacacttccaacattgtgcagcgtatgagtcaattaacgtggttttcactacacacataaaaccaaacaaagactaagataaaaataaaacattgtcgataccttgtgagatgcaatgataaaaaacgaatcttcatgtaatgataaaaataaaacaccatatttcaagttttgggatcttcatgcattgacaaaacaaatcttcatgcaataataaaaataaaatattgtcgataccttgtgagatgtagcttgagtagtcttcctcaccatatttcaagttttgagagagataaaaatatttttttgggagtttagccttttagttgaagtgaagaagaactaaatatatcctttagattcgtaaagtgaagtgaagaaggaatgaaatctttactgcaatagcatttaagttggcttttaagccttataagaagtatctaatcaagtactattataaccagaactcgaagagatagtagcttgcggtgattcgaaaagtcggagccattaattttgattttgcatgtactttctccaaggagaggaaaaacaatgctttgaaaattgtattaacgtaaatttggacgcttgagatacatgtaggttagggctagccttacatcagtaggacaggcgttttagttccttcaaccctagataatattaaaagttccaattcttaaaaaaactttaatatgcagcccaatagaatcctatagcgtcagtgaccacttcatttggtgtcaaccaattaaaaactgatcagttatagaaatattaaactagtgataatgcgcattttgaatgtaagacaagcatacatataaaagttttatgagttatttaaattattcaattttggtttaagattttaaatgatgtggacatatataagaaggcaaaaccatatactgtactgtattatataatccattcttcgtaacatttggtctgttcttggctcggaaattgtctctgaccagagcagtgttctacatgattatgcaatgtctcggagccatctgtggtgccatctttaagactagtgaatatcggcgcatctttaagcctagtgaatttcggcccatcttcaagactagtatggaggcctgttaagggtcttctaatacagctcaacatgcctttttgtgtaagcctagtgaatttctaatacactttgtctctggtcaaacactttcatgcgttttttttataaatatgtttaatgagcataaatgtgcggctcaaagcggtgcaactcccaacggtcaaataaacaaattaagctcaactgctcaagtagtgagaacaagatcaacctaacttgcacaacgaagaatttttgttgttgttgtggtcatatatatttttacactaactaattattttgacaaaagtaatcaatttgtgacattctacaaaaaaaaatataaaaataatcgaatataatttttttattggtcaaaatatcgattgcaaaatacaaaaatcaaggcataacaagttaatctataaattatagtcgtgttttaaaattaagtcgtgtgttttgcggttttgtcctcgattttgttccttcctttgtgtcgaattagtcctacattttatagagaggtcttcttgaccctaatccacgtgggattttgactcgagccaccgcctctattgaaatgataagatcgtttctagaatgaggttacggcccgtattggtccggttcttgtcggttttggctaacactgatctttcataaagctttctagaatatcctttattattttccctattttgatgggttaagaaatttaacagagtttattcaatatcatctccaagatttaaattattcccaacagtaatgcaattaaaatctaatatcaactatatattggtttagtaactaaaccaatatatagttgatatctaagctacattaaatctaaaacttttctaacaacttcacttcaactaaataattaaacccaaatctaagacaaagtctctaaaaagattatagacaattcgactgtgtcaacaatatcaccacatgtatagatgcatataatcattttcatataatgaattcgacatgtggccctacactttacgctcttagtggatatttcatagttaatgacatatacatatatatatatatatatcatattcattcacatagatatagattatagatataacccactgaattaatattacggtcttcaatataggtgcatttaaaacataacgttccctctcttgtcttcttatttttgctctctgttctttagaactgccattaacgagagtgagagagagagacacacacacagcgagtgaaaatg

SEQ ID NO: 32314 - DNA, 3000 bp, Unknown; identical to SEQ ID NO: 9192
  misc_feature (1)..( 3000): 2750-1469P.txt file - cDNA_ID_3051205; gDNA_ID_1972020; Annot_ID_178048

SEQ ID NO: 32315 - DNA, 3003 bp, Unknown; identical to SEQ ID NO: 28372
  misc_feature (1)..( 3003): 2750-1469P.txt file - cDNA_ID_3051205; gDNA_ID_1621157; Annot_ID_173556

SEQ ID NO: 32316 - DNA, 2059 bp, Unknown
  misc_feature (1)..( 2059): 2750-1469P.txt file - cDNA_ID_3051209; gDNA_ID_2926139; Annot_ID_197325
cgtgacgttacaatatatgcacacgagtcacaacaaaatattatatctataatcgacggttgaaacaagaactctagctaatgttttggttacactcggttttcggacatggtttagaaaagcacaactcttccttaagagaatgacaaaacgtcgtcgttaactttagattaatgacttggtcaatgaaaacaatcgcatttggtgtaataatctcaaatactacgtgttctccatattccataaccagccaagcaaaagcaccaatgaccaattacgtctctcctctttggccgcgcccactcaattcttataatttatctatttgcaccctctttctctaaaaagttacaatttgacccctatagtttcactttcacttattcttataatttatctatttgcacctttttcctctaaacgttacaatttgacccctatattttcacttttattcatacaagcccattttgtttttctctctgctttcatgctcgcagacaacaatcctcgtcactgccatgtctcaaattcagagctttgagagatcaattatttaccggtgaggctaatgatgaaggctgttgaaaaaatctctgcaaaatacttttcttccatgtaaagcttctaactttttctctctctctctctctctctcctctgttgtttctgtagagaggaatagaagatgatgggcccattttccaactgtgattgttctctttatatttctttctcctgtggaggctagcaaaggccacgacgttgtggttgtcaaattggcataaagttttccacttttttactctgattttttctcccatttctctctcactttttctttgcctttgcccaattcagagaactaatggctttgtcggtcatcgatagataaacaaaatttaatctttatctctctctttctcttgtttgtcaaaagatgcccaccaacacagaaatgaggaaaaaaagatctcttttttatttgaatgttgaacagtaagaagaaggtttattctattctattgggttgggttgttcatcaactttggaaatttaaagatgcattttttatgatccttttttctccgcctttgttgttgatttgatcgtgtatgattacggaagcttgggggggtttttatcagacagaacctggaaaagttgtcagatgaaacaatgtggcttggagattggatcatcaacttttcctctgttttcaactttataagctatcattttgcttaatcttcttcattctcttctctcggccttggctttgaagaaatctcaattttcttcttcttcttcttctaccgttttgtccggcgatcagagctggttcaggagaaaccttaagtcttggtatcaaaagaaagaaagttttggaatttacctctgctgctgcaacttgcaacactttttttatatatattggatttttctatggctttgctcaaacgtaagcaaagcagatgaaatctagctacaatcgctgttgcccttgtatgaagtttggaatttaaggaattcaggagaatctaagaggtactttcttgtactttcctcttctgtctttttccaatagggaaaggtatcttatttgctccattagtctgtatctctcaggctttgtgttctcttagttctccttaatctttgccttattagttgaacaagtaagcaaattataaaaggagtttgctttagggaactggtagaggatcctttacttcttacttgttatcttaatttatttctcaagaattccattgcagtgtttaggaaggctaattctttcttctctttttaagtactcctaagcgtggaaattttttggtcttgttctcttgttgtttgttactcaaggatctgagattgttgtccataagtagaatttaccggagttgtaatttctatatctgaaactcattattgtaccgttgtgtgtggtgtgtcttatagtttgctgcttaatagttttcttgttcttcttcagcatttctaaaggggcaacgttatagaaggttaggaaggagcatttgtatagaaagtcatg

SEQ ID NO: 32317 - DNA, 3000 bp, Unknown; identical to SEQ ID NO: 7688
  misc_feature (1)..( 3000): 2750-1469P.txt file - cDNA_ID_3051209; gDNA_ID_1621157; Annot_ID_173553

SEQ ID NO: 32318 - DNA, 3000 bp, Unknown; identical to SEQ ID NO: 29154
  misc_feature (1)..( 3000): 2750-1469P.txt file - cDNA_ID_3051230; gDNA_ID_2926151; Annot_ID_198069

SEQ ID NO: 32319 - DNA, 3003 bp, Unknown; identical to SEQ ID NO: 18617
  misc_feature (1)..( 3003): 2750-1469P.txt file - cDNA_ID_3051230; gDNA_ID_1621158; Annot_ID_173615

SEQ ID NO: 32320 - DNA, 3003 bp, Unknown; identical to SEQ ID NO: 18618
  misc_feature (1)..( 3003): 2750-1469P.txt file - cDNA_ID_3051234; gDNA_ID_1621158; Annot_ID_173612

SEQ ID NO: 32321 - DNA, 3003 bp, Unknown
  misc_feature (1)..( 3003): 2750-1469P.txt file - cDNA_ID_3051249; gDNA_ID_1621159; Annot_ID_173659
gtttctctcaaaaaaatccccaagtgtttccgatctagtgtctcttttgtccaaaaacgacagtgtttaggaaacctaggagaatgaatgacccgatggtccgaatccgattcgaaattggttcgaattgtaataactaacatacaatattccggtttgaatgataagaaaaaacacattcgatccggttagaacaatatattaacaggcccattaaaacatatgggccgatcttgatcaactgggctattcatcgttgatacatgcggccgcacaggattaaaatccagttccgttttataaaaggatactagtttccaaacgaacggtggttgtctcctttccagaacaatctaacgctttctcgaacatcttcttcttcttctttctcgaaattatttttccagtaatcaatttcttctcttctagatttttacaggaactaattttctgctctgaggtatcagatgagtagccgatggaatcgtacgatctacgttgggaatttgcctggagatattcgcaagtgtgaggttgaagatctcttctacaaggtttgaaaattcctcttttctctcgataaaaattgaattcattatgacttgtttgggttcataaatttgcaattctgtcttgctgagacaatttaaatcgactcttatgtatatttgtttcagtatggaccaattgtggacattgatttgaagattccaccgagacctcctggttatgcctttgtcgaggtatattgatcaagtacaaatttgtttttttcttcttcttgtaatagtataggctaatgactaagatagtttgttattggtggcagtttgaagatcctcgtgatgcagacgatgcaatttatggacgtgatggttatgattttgatgggtgtcgacttcgggttagtaaacgcatgatgaaagctagcttaattttctgtaatttcttgtaaaggtgttatctttgtgtgatgtttttaggttgagattgcacatggtggtcgtagattttcaccatcagttgataggtacagcagcagctacagtgcgagccgtgcaccttcaagacgctctgactaccgcggtttgtagagtcttctcgattgtgttatttggtgttgtgtaaaattttatatttgaaaactcatttttactacctaaacatgtagtgcttgtgaccggattaccgccttctgcttcgtggcaggaccttaaggtaagggacactatatagtctttttctctgaatgttggttctctatatcatgttttggatttatctcttttctgaaatgatgttatttgctatttacgggtgattaggatcacatgcgcaaagctggagatgtctgcttctctgaagttttccctgaccgtaaaggtgagttgacattcgatagtttggataagcttttgattgatgtgttagtaaattagtctttgtgaaggagaataggtgttaagcatctgaactgctaaactcacattcagtatttctttgtaggcatgtctggggttgtggattatagcaactatgatgatatgaagtacgcagtaagttttatatctttgcaacgcaaatgttcctggacttatgccttagactgcttttgtttcatagtataccgagctgaatttatcttcctggaggccagtgttggatctttgatgttcccttaaaatttttgatgtgacagataaggaaacttgatgccactgaatttcgaaatgctttctctagtgcttatatacgggtatgttgtattgctttctttgattttgttaagcataagtggatatggagtcatctctgaatttactgttcaggtgagggaatatgagtcgaggagtgtgagtcgaagcccagatgattctaaaagctatagaagcaggagtcggagccgtggtccaagctgtagctatagtagcaagagcaggaggtctttttttttttttttttttcataaacctaagacatataagggatttttattgtaacttatttatgaaattaactgacttctaaatgcaatgcagtgtgtcacctgctagatccatttccccgcgttcacggccccttagtcgttctcgctcgctatacagctctgtctcaaggtatgagtgttagatttgtatcattattatatatgtagttaccccttcatggatcacttgttcttgcatagtgaactccttactagctttattacttacaactaagcaccttttgttgcttccgtacacagttgaatttgtttgagtcttttttccctcatagtggactagtctattgtcacttgattttcttcctttgttgatgttttctatgtcatgcaaactccaatatgggtaaaggttacctccttgtttgggattaccagagttccttttcatttcttacacgtgaatgtgtttgttttttatgttttgagttcttgacagagatgctcccatcatatttagtccttttcctttctctttgtgtcgttctcttctggatgtttccttctgataaagctttacttcttaacttttttccagcgacggtgaatttattacgtatcaatcttcattatccgacttataatttaaagaacacttagctagatgtttcactttttgaaaatttatttctatcggaagggggaagatggatttctgaggcatgtcctcgatcatttaccgtgattacaattgtattgcgttgtttgttttctagatctggctcactgctacgagctggggattggatctagatgggtcatctagatggattcttggactggatttacaaagctggattagcatgaacttgaacttctgtttttacggtctggtctggtctggtactccgcgcgtatcagctgtaggatctgatcgcaaagttttggactatgattactctgattcctcaatatatttatctttttgacaatagtggattctgtgttgagttcttttctaggacagcatttaagctcccgggactagatgggagatg

SEQ ID NO: 32322 - DNA, 3003 bp, Unknown; identical to SEQ ID NO: 18622
  misc_feature (1)..( 3003): 2750-1469P.txt file - cDNA_ID_3051250; gDNA_ID_1621159; Annot_ID_173646

SEQ ID NO: 32323 - DNA, 3000 bp, Unknown; identical to SEQ ID NO: 7743
  misc_feature (1)..( 3000): 2750-1469P.txt file - cDNA_ID_3051283; gDNA_ID_1621160; Annot_ID_173682

SEQ ID NO: 32324 - DNA, 3000 bp, Unknown; identical to SEQ ID NO: 7744
  misc_feature (1)..( 3000): 2750-1469P.txt file - cDNA_ID_3051287; gDNA_ID_1621160; Annot_ID_173681

SEQ ID NO: 32325 - DNA, 3000 bp, Unknown
  misc_feature (1)..( 3000): 2750-1469P.txt file - cDNA_ID_3051291; gDNA_ID_1621160; Annot_ID_173676
gtctcttcctcacaaacaaacaaacaaacaaaaggatttttttctattttttgttttcgtaaagtttggtaattttgtaacttgagcaattatttgcttgtgaaaatgtttgactctttttcgcaatccacaaaagaaagagattttttcccttttttttgttatttcgtaaatgttggtaattttgcaatttgagtaacttatttacttgtgtaaatgtatgggtatgtgtaattgtcaagaatttacttttgctcaaatattattaatttaggatttttaaaacactagttcagatttacttgtgaaaaatataaaattatcattaaaaataatattttctaacgatttaatacacgacaaaagaaaaacttaattttataaggttggagcggtttgagttttcgattttgtgaaatgtatgtatattgtcatgaaaccctagtttggatttacttgaaaaatataagatcatcattgaaaatagtactttttaacagacacgacaaaaaaattaattttatcttgttggatcggtttgaggttttagatttttccaatagtgttaaagatatgcatgtgtattgtcatgaaaccctagtttgaattttcttgaaaaatgtaatatcatcattagaaatagtattttctaacgacaaaaaaaacttaattttattggattagaacggtttgagttttggatttttctaattttttgaaaatgtatgtgtcatgtacatgaaacatttactttaatttaggatttcaaaaccctagtttagatttgcttatcaaatgtataagatcatcattgttaaaaataatattttctaatgacgtaatacacgacaaaaaaaccctaatttgtacggtttgatcagtttgaattttggatctttctaattttgtacaaaaaaacaagtctcaaatagaaccattttattcaagtttgcatcttattatataaaatagggtttttaaagttgctaactaacgtgatcacgcacgagtcaactacattgatgagatatcgacatgtgtcaaatctaagtttttgttaaaatatttaaaaacaaaaaatagaaaatttcctaaccgaaaagaatctatatacatgaatcacaaaaaattaattatatattcgtaattattaattatttattatataataagataattcataatataacagatttataaaaaatggggaccttccaaataagtttttttagtatttgtcaaaaaatttctctttttcctattgctatgttaagataactataaaatatagatctcaacaaaacacataaatggtgtgatgcatagataaagattataatgggaaaactcaatagtacaaagatgaatgagaattaagtataattatgtttgagtaaaacgttaaggataagttactaatatttaaagtcttttttatcgtcactaatatttaaagtttaagttacacagtagtaattatttagtaaacaacaaaaataactgacgttatttaaagatatattgagagaataaataaattgagataaaagtaaaaacactaaatatagaaaaaatgtgtggtttactattaaaattttaaatatcattaaaaaaaaacaattaagatagaatatgtgtttttttttttgggtcacaagagtgttatttttatatatgaaccattaaaatggacaaacccatagtaaacaaaaacctatcaactagtacaaaacaagattactgagactaaacttgacaatcactaagacatggagatgactaacaattaaagactccaaagcaattcactactagaaactcttcaccacaagaaaggttacaaacaaaagccttgaagaaaaccaaatcattagaatgccttcaaaagagaaagcccgagaaaagggctaaaccgagctcacacaaccactacctcagcagaaatgaagacggataatcaaatagagtagagcaaagaaccaaactaatactaccttccagcaaccaaagaagacgagaaagcaaaggtacaaggagaaaacttgatatccgaaggggaaaatgccaaagaggaccctcatttcttacacgaggacatttgtagacccaaccaaagccttaaaactaaggcttcaatccacaaccattctcaaaaaatcagtaaacgacaccacaattctttagccaagaactcagtcccaaactaaaaacagaatgaatagccgagaaagagaagtaaagcccaactaagaacaccaaatcgcctacaacgatgaaaataatattcaaagtggtgatagaaggacaaaacctccgatctagcaaccttccaagatgacatatgaaagaattaacaaaggagctcagcaccgccgacttcactccacaccaacgtcaccatcttcaccccaaattgaatcagatttgtcacttccaaagcaaaggctaatcaaccaccaaagatttcaaggctaaattgagtggatcaacaagtaaatttctttcttttataaattaaactggttaagtatcttgatccattaaaaatattattttatcatcatgttttcaaggatgattgcttaaataagtatattgattaatgattactaagtaccaagacaataatatcataaaaataaattgaatatattaagagtttgttggtcaattaagcaaattaccattaattttctttattaagtatagatgaattatattttcccgactgcctattatttgtcttgtataatgaaaattgactttgaaacaatggaataatgagccaataatttattgacacgtgtaacaataaacaaaagttacttaagatttttgtcgtaaagaagggaaagaaattgtaactttgacacacacacacacacacacagataaagagtaattaaaattggagtttctgatttctagggcacaaaatctttagattcggtgaagtcattcattacttcattgccaaagcttgtaaccaaaactcccatg

SEQ ID NO: 32326 - DNA, 3003 bp, Unknown; identical to SEQ ID NO: 18635
  misc_feature (1)..( 3003): 2750-1469P.txt file - cDNA_ID_3051299; gDNA_ID_1621160; Annot_ID_173673

SEQ ID NO: 32327 - DNA, 341 bp, Unknown; identical to SEQ ID NO: 278
  misc_feature (1)..( 341): 2750-1469P.txt file - cDNA_ID_3051331; gDNA_ID_1563306; Annot_ID_147438

SEQ ID NO: 32328 - DNA, 3 bp, Unknown
  misc_feature (1)..( 3): 2750-1469P.txt file - cDNA_ID_3051342; gDNA_ID_1563308; Annot_ID_147441
gac

SEQ ID NO: 32329 - DNA, 278 bp, Unknown
  misc_feature (1)..( 278): 2750-1469P.txt file - cDNA_ID_3051389; gDNA_ID_1563324; Annot_ID_147470
tcggcgtcttcttccacgagttcgccgactatcggaggtctctctttgcttttctccggcgcttccgtcaaatcatcttcctcttcttcctcatcgcatccatccgtagagaggaattagcttcaatacgccatgatcgtagcgaggatcggaccttaagcggatccttctgttattctccgagcaaattcattggttcttcatacctaaaacgagatcatcaaagccctgtctcggtgcttcacggtccaatttcatctggtaacagtcctccgatg

SEQ ID NO: 32330 - DNA, 3 bp, Unknown
  misc_feature (1)..( 3): 2750-1469P.txt file - cDNA_ID_3051454; gDNA_ID_1563348; Annot_ID_147518
tct

SEQ ID NO: 32331 - DNA, 31 bp, Unknown
  misc_feature (1)..( 31): 2750-1469P.txt file - cDNA_ID_3051488; gDNA_ID_1563356; Annot_ID_147533
aaatgacagtattgaagcaatctcatctatg

SEQ ID NO: 32332 - DNA, 3000 bp, Unknown; identical to SEQ ID NO: 9080
  misc_feature (1)..( 3000): 2750-1469P.txt file - cDNA_ID_3051510; gDNA_ID_1971978; Annot_ID_177620

SEQ ID NO: 32333 - DNA, 732 bp, Unknown; identical to SEQ ID NO: 285
  misc_feature (1)..( 732): 2750-1469P.txt file - cDNA_ID_3051510; gDNA_ID_1563361; Annot_ID_147542

SEQ ID NO: 32334 - DNA, 92 bp, Unknown
  misc_feature (1)..( 92): 2750-1469P.txt file - cDNA_ID_3051514; gDNA_ID_1563362; Annot_ID_147544
cgtaccacaaatttctaactaaagcattcatagtctctcgaaagcctcttttcagaaccgaagctctttactttcgtccaccgggaaatatg

SEQ ID NO: 32335 - DNA, 277 bp, Unknown
  misc_feature (1)..( 277): 2750-1469P.txt file - cDNA_ID_3051520; gDNA_ID_1563367; Annot_ID_147553
atctagataatttgaataatgtaatctagatcttatgtaagaactctctagacttaagattaaaatattttagatattttgtagtttggaggctataaatatctcctccccctctcaaatgttgcaatgttgtgaagttgtcttcaagtttaaagcaaagtaataaaagttctatttcctaaaaaactctctcaaaacacttaaacactttctccattacctctaaaagaattttactctaacaaagtggtatcagagcttgaagatcctaaagatg

SEQ ID NO: 32336 - DNA, 257 bp, Unknown; identical to SEQ ID NO: 287
  misc_feature (1)..( 257): 2750-1469P.txt file - cDNA_ID_3051561; gDNA_ID_1563381; Annot_ID_147576

SEQ ID NO: 32337 - DNA, 133 bp, Unknown; identical to SEQ ID NO: 292
  misc_feature (1)..( 133): 2750-1469P.txt file - cDNA_ID_3051713; gDNA_ID_1563432; Annot_ID_147668
  misc_feature (127)..(127): n is a, c, g, or t

SEQ ID NO: 32338 - DNA, 3 bp, Unknown
  misc_feature (1)..( 3): 2750-1469P.txt file - cDNA_ID_3051821; gDNA_ID_1563472; Annot_ID_147745
gag

SEQ ID NO: 32339 - DNA, 436 bp, Unknown
  misc_feature (1)..( 436): 2750-1469P.txt file - cDNA_ID_3051890; gDNA_ID_1563491; Annot_ID_147783
cagtacgtagaaactttctgatccaaaggtattttattcacaagaccaactttatatgtctgtcgggtacttgagatatagtgagattaatattttataatttagatggtatttggtataatctggtctatgatcttgggaagaagagacagattgaccatcgatttgtgcatgtggtctcaaatcaggaaataaatatgcagtgattctgatattgttctctgtttaattgtttgaggacaataataagttgttgaaataatgtaccaaatccccaattcaaggggaagagagggtcaaggggggagttagttatatgaatgtcttaaattagtgttaagagagtttttgctttcttactttctttatatttgtgaaaagcttctgacatagtatatttttatgttcaacaattcagcataactcaaacacaatg

SEQ ID NO: 32340 - DNA, 17 bp, Unknown
  misc_feature (1)..( 17): 2750-1469P.txt file - cDNA_ID_3051925; gDNA_ID_1563505; Annot_ID_147808
aaaaaaaaaaaaaaatg

SEQ ID NO: 32341 - DNA, 256 bp, Unknown
  misc_feature (1)..( 256): 2750-1469P.txt file - cDNA_ID_3051977; gDNA_ID_1563519; Annot_ID_147829
agatgtaatattaccgatgtagagagcagcactaagtttacattcatattcaaaaagtcaaaatctatcatctactcgttacgcagataatctttctctcgacatctctatggattcgaagacagagtcgaagctcctatcgctcacatctcaaataatgtctcccgcaaaacaaataagatttgatcttgattgggttggtgaaaagaggatgaattctttcattactaaagtaatgtctctcgtcagctcaatg

SEQ ID NO: 32342 - DNA, 246 bp, Unknown; identical to SEQ ID NO: 298
  misc_feature (1)..( 246): 2750-1469P.txt file - cDNA_ID_3052021; gDNA_ID_1563537; Annot_ID_147861

SEQ ID NO: 32343 - DNA, 3003 bp, Unknown
  misc_feature (1)..( 3003): 2750-1469P.txt file - cDNA_ID_3052024; gDNA_ID_1620345; Annot_ID_154137
ctccaagtggttcttatcaccactatgaattaaaagacttgcaaaggtttaaccagaatcaacagagattgtcatatcagaacgattatgttaatcaatcttataggtatgatactattggtggtggtaatgggatgcttaacaatagtttcttgaatggagttccttgtgcttcaagaaacaatgtttcagattactacactaatatttttgggtatggagttaacaattcttggaggagtaatgaaggttgtacctataatcaagatcaggcggcctcgtcgatggagaatgggaggggctcgtacttttccattgctacagaccgagtatggagcaaggaattggagaagactatctttgtgggtactaaagagacgattgatatgattttcgatggtctcattgtcggtatttgtgagttgatggttgatccttttggtaatgatgttgttaagctgcttatcggaaaatgcagctctgaacagatcattctgattgttgatgttgtcactcggcacatttctaagtttgttaacatatgctttaatccgatcgggtacacacttctaatcattattctttaactttgagatatgattgtgcattgtttccttggatcttgattttctataattctttcttttggagatatcagaactttggcaatacaagttctgttaactagtattcatgagcgtgctaacaatcaaatcccgcgcattatggatgctataagctcggtagcacttcaattgacaaggaacaccaatgccaaatatgtgattctagcatgtttccgcatgtttacttcgtcgcagtgtagggtaagcatctcattcacatattaatctacttcagttctcaaaacctatatagaatatttgtttcttgtcatggagttgtttgctagttttgtttaagcttcaagtcactttcttataccatatagttgatgaaagaatctactatagaacacctcaagtagattaatcaatttgatgtttgagtttgcttgttatcggttaattttgcaatgtttgttttcttaagttcctagaatctgtatgttttaattgagcagatctgacctcaattattttctatcacgtggtataagtaaaatgtgccattattgaccatggatcacaagtttaatcttctttcacaagtattcttgagaaatgacaatctttcttctgtttttacagcgtcttcttgaagttgtctctcaacattgttaccagatagcgattgatcaaaacggatgctgcttgcttcagcaatgttttgacaaggaacgtgttccgaatcatgagataaggcaacgtttgatttcggaagttatcgaacatgcgttgaaactctgcttgaactgtcatgggtaaacatgatatgaatgatatctacacaactctactttctcatatatgatccactttattttttactcacaagtatgttctccttcagaaactatgtggttcaatatgtcgtggagctcgataatcaacatgaaacagatttgctcgtgaataagctacttaggaactatgcgcatctagcccgcaacaaatatggaagtcatgttgtgcagaagttgttgaaactaaggggtatcgactctaagctgattgttgttgacttgcttagagggattgatacacttcttcttgacccgtttggtaactatgtcattcaaaccgcatggtttgtgtctaaggtaatgtcttacagttttttttcattacggtgatctgattagagattttgcgagattatgagaatcttgtttggtgtgtgcaggaagatgtgcgccagatgttgaggtattatatagagcgtaacattcgattgatgaggtgcaacaaatttgggaacaaaattctggagaaactcaatatctagagagagctgaatggtagaaagaagaatttgtttttgatgttgtttagttggtttgttatgattgattcattgtgttgtcattggtaatgatgatggttcttatgtgttttcttgtaactttcgttgaatcttaggaaattgttagacaaaactagacaatgttctcaccaaaacagaatgtctttctcttgtaaggtttgtgtgttgtgttgtgtttttagctttttttctctatgtaaatgattgaattgttcaaagtttattttattttttattttttattttttatttttttttgtcaaggaattcaaagtttattcattttttttttttttataatgtttttctgctctgttttttttcattgcttacttaggtaattttctatattttgatgatatttcttttcgaatgatttgagctttttattctaatttcgttcagaaagaattctacgaaagctaaaaaagataaatacaaataataattactggttgtgatcaaatacaaaattgagactagtcggttgagttggtttagcagatacaaccaacgatagtagatgtgatatattccgaaaagtatttggtttaaatttttgtgaacttcaactaatcaaacttgttttaatgctcgtctagtttaataattcgcaaaaagatttagaattctagaaattaggcataactaactcacgacaatggcttccacaatctgcatatcataatccacctttttccgtttttttccataattactttgtttgatgtgtttaatccgcaccgtttctcaatttgccggtctcccactcacatacctacctttatcagacatggtaagaagagttatgattcgttgacttcacaagacttgttcaaacagacacgtggcactacattattcgttattctaaccaaaaaaaatattgaatcatgaaaccaccgtgagagacaaattccattcactctctctctctctctcttcctttcttctcatttttcaaggacgacggagccacggtggagttgactccgcttaaaccccctccgtcgccaccggcgttcttcaatttcaaaccccaatccaccacccatg

SEQ ID NO: 32344 - DNA, 32 bp, Unknown; identical to SEQ ID NO: 299
  misc_feature (1)..( 32): 2750-1469P.txt file - cDNA_ID_3052024; gDNA_ID_1563538; Annot_ID_147863

SEQ ID NO: 32345 - DNA, 21 bp, Unknown
  misc_feature (1)..( 21): 2750-1469P.txt file - cDNA_ID_3052036; gDNA_ID_1563541; Annot_ID_147868
caaacattaaaaagatagatg

SEQ ID NO: 32346 - DNA, 3000 bp, Unknown; identical to SEQ ID NO: 2693
  misc_feature (1)..( 3000): 2750-1469P.txt file - cDNA_ID_3052046; gDNA_ID_1620577; Annot_ID_161007

SEQ ID NO: 32347 - DNA, 973 bp, Unknown; identical to SEQ ID NO: 301
  misc_feature (1)..( 973): 2750-1469P.txt file - cDNA_ID_3052046; gDNA_ID_1563544; Annot_ID_147874

SEQ ID NO: 32348 - DNA, 3 bp, Unknown
  misc_feature (1)..( 3): 2750-1469P.txt file - cDNA_ID_3052078; gDNA_ID_1563559; Annot_ID_147899
aca

SEQ ID NO: 32349 - DNA, 325 bp, Unknown
  misc_feature (1)..( 325): 2750-1469P.txt file - cDNA_ID_3052160; gDNA_ID_1563586; Annot_ID_147948
  misc_feature (30)..(30): n is a, c, g, or t
  misc_feature (32)..(32): n is a, c, g, or t
  misc_feature (143)..(143): n is a, c, g, or t
  misc_feature (205)..(205): n is a, c, g, or t
  misc_feature (220)..(220): n is a, c, g, or t
aaattagagtcttgcttattacagataaancntatacatgcacttgcaaaaaataccactaccaaaacacctgcgtcatcaatcacacacaaatgatatattgagtggaaaattgttttatgtgaggtcttggttatctgtantgatttgttttttttgctagtataaaacaggatggttctctgaagcgctgcttgacaatttngagactccgtgtagnctgtgaggtttgtatctgtgtttcctgagccaggtttcgaagacgtttttaaatctattcaagaagagtttgagaggtctgaaaagacacgaattcagaaagatg

SEQ ID NO: 32350 - DNA, 185 bp, Unknown; identical to SEQ ID NO: 307
  misc_feature (1)..( 185): 2750-1469P.txt file - cDNA_ID_3052173; gDNA_ID_1563592; Annot_ID_147957

SEQ ID NO: 32351 - DNA, 577 bp, Unknown; identical to SEQ ID NO: 308
  misc_feature (1)..( 577): 2750-1469P.txt file - cDNA_ID_3052265; gDNA_ID_1563621; Annot_ID_148009
  misc_feature (14)..(14): n is a, c, g, or t
  misc_feature (107)..(107): n is a, c, g, or t

SEQ ID NO: 32352 - DNA, 868 bp, Unknown; identical to SEQ ID NO: 309
  misc_feature (1)..( 868): 2750-1469P.txt file - cDNA_ID_3052285; gDNA_ID_1563627; Annot_ID_148020

SEQ ID NO: 32353 - DNA, 1134 bp, Unknown
  misc_feature (1)..( 1134): 2750-1469P.txt file - cDNA_ID_3052325; gDNA_ID_1591401; Annot_ID_150932
  misc_feature (668)..(668): n is a, c, g, or t
aaggagatgtacatctctatgttatacatagttgattcatgtttcataggttagataagtggcatcaattgggttttcttagaagatttatatctcttatggtctacaataggtccttcatgtgtcaaaaagtggattcgaggtcgcaaaatccaagtgttttccgataagtttgcctactagtccatatattcttatgtatgtcatggggtaggaacttattttatattcttaaaagaaagaacaacgattagcttagctccccaaatcatcaagctcagtcttttagcaacctttgatttgaggcagttctcatttctttgttcctaacataaatcagtacttcgttgcactcaacatgaagtgattgctaaagccttgaaaccaattcttcctgcaggttcgtggccctacttgtgcgagaaggctcgtgaattatcttgatgagaagaaagaagatactggaatcaaaaacatcatgatcttggaacgcggctttaacggttgggaagcttctggaaaaccggtctgccgctgtgcagaggttccttgcaagggcgattgcgcctaaaccctactaaaccatattgggacctaattgatgttccacattgtcatgtactaaagttgaatgaagattatcataaataatctcttatcagtatgtntggtttacatggagcacaaacaccaaacttgcaacaacaatactaaaagggcttttatggtattgcacgtttgtggagcgtcaaagccacgttgatatcttaacgccgtcaaaataataatggatttttcggtatcttctctggaagaggcacgttactttattaacgccgtcaaaactctctcgctgatacagagtgtttgctttcttttgtagatttttaaagtcataaagcaaaagcaacgacgacttcagagaactacaatcataatttgtgatctctctccaattttcatcttttggtcgaaattcccaattccctgagtcaagaaccctaatttcaacatggtaagatttgttcgatatcgcttgtttttttttatggatctagcttccgtttgtctatcttgcggcttccatttcagattgtttgaagaaattcctgaattttgtaggtttgcgttatg

SEQ ID NO: 32354 - DNA, 3003 bp, Unknown
  misc_feature (1)..( 3003): 2750-1469P.txt file - cDNA_ID_3052325; gDNA_ID_2926221; Annot_ID_142428
ataactatatccactaacagcaaagggatttgaacaacttcataacaaccacaaaccttccctccacttcgtcgctgctgaaaccacttgttgatgcaggaatatccatacaagtgtccacagggaagacaacttgtaccatcacaccagattaaaaaagaaaagagaacattagttgcactcaaaatattagacgtgaccagagtaatcaaatagttaaaagagatactaatcacaatccagttcgaaagttttgtatgacaaaaacctaatcaactaagaactatataattgccagtagcaaattactgtcataattcatcaaaattgatagacctagatcatgagattatcaaattgctaaaacaaaacataatctatacactatagcctctaaagagccaacgaattccaaagctaaattactggaatcgagaataccagacttggtgttggccaccgctggtccaaacttccatacagatagaacaagacaatccctcagtgtcaccttgtttccattcgacatcctcctgcgatccggaagacgatgaacaaacaccttgtgacctattctgattctctatcccttcactctcgttctgtgaaaccctaacaggtgagtctaggacatcgatgtattccctggtttggcgttcggaatcttcttcctcctcttcctcctcgtcttcctcttgtacttcaccatagtcgacatatgcttcctcttcgtcttcctcttcttcgtcttcttcttctccatagtgtccaaatgcttccccaaattcaatgaatcgtgcaattgtacctccgtgaccactgaaggggtaactccggcgaggcggcattaggttcgtttctgttactgtatcagatttcggaagagaagaaggccaaaacgtctcggcagagtcgcagaggtatcgaataagagagactcccggaattaataaaaataatatttaaaagtaaaaaaaaatagttaaaagataaaatattataacaatgcggtgagcgtggatcgaacacgcgaccttcagatcttcagtctgacgctctcccaactgagctatccccgcttgttgttatcatttaatatttaaactttaataatctctaaacgtaagcgtcacgtcaaattggtcgcagtcttcaatgaaatgttcgtgacttttagggaagaaaaggtgtttggagagatatggggagaagcatattttcctttttcactaagaagaaaaaaatggcgatggcgagaagcatctcttacatcacctctactcagcttctccctcttcatcgtcgtcccaacatcgccatcatcgatgtcaggtataacataatcgatttatttccgtcgattttagtcactaatctgatcctttaccaaattttagttcgaatcaatcccgattattgttcttaggtttgattttgctctactatgtaatactgatatgcgttttaagagattactttacttttgaactctggggatcaattaattatgaacatgttttctaaaactggatattttgtagaatctctgtcgaaaaacaactattagggacctcatgagcttggaacaaaggttttgtggttagatgggctgagaaagaaacagactttttgtaatacttatataggttcttctgatacatagttatggcttaaacaaatttagactttttatgaacctattgtatagctcacattggaggaattgtatgtttttaagggatgaagagaggaattatgacgggcatatagctggatcgctacactatgcgagtggctcgtttgatgacaagatctcacatcttgttcaaaatgtcaaggacaaagacacacttgtcttccattgtgccttgagccaggtgtgtgttttacactcttttcacttccccataagatcttcttttcctcttttttgagaaacaacacataggttagataagcggcatcaattggctattcgtagaaggagatgtacatctctatgttatacatagttgattcatgtttcataggttagataagtggcatcaattgggttttcttagaagatttatatctcttatggtctacaataggtccttcatgtgtcaaaaagtggattcgaggtcgcaaaatccaagtgttttccgataagtttgcctactagtccatatattcttatgtatgtcatggagtaggaacttattttatattcttaaaagaaagaacaaagaacaacgattagcttagctccccaaatcatcaagctcagtcttttagcaacctttgatttgaggcagttctcatttctttgttcctaacataaatcagtacttcgttgcactcaacatgaagtgattgctaaagccttgaaaccaattcttcctgcaggttcgtggccctacttgtgcgagaaggctcgtgaattatcttgatgagaagaaagaagatactggaatcaaaaacatcatgatcttggaacgcggctttaacggttgggaagcttctggaaaaccggtctgccgctgtgcagaggttccttgcaagggcgattgcgcctaaaccctactaaaccatattgggacctaattgatgttccacattgtcatgtactaaagttgaatgaagattatcataaataatctcttatcagtatgtttggtttacatggagcacaaacaccaaacttgcaacaacaatactaaaagggcttttatggtattgcacgtttgtggagcgtcaaagccacgttgatatcttaacgccgtcaaaataataatggatttttcggtatcttctctggaagaggcacgttactttattaacgccgtcaaaactctctcgctgatacagagtgtttgctttcttttgtagatttttaaagtcataaagcaaaagcaacgacgacttcagagaactacaatcataatttgtgatctctctccaattttcatcttttggtcgaaattcccaattccctgagtcaagaaccctaatttcaacatg

SEQ ID NO: 32355 - DNA, 3003 bp, Unknown; identical to SEQ ID NO: 32354
  misc_feature (1)..( 3003): 2750-1469P.txt file - cDNA_ID_3052325; gDNA_ID_2926221; Annot_ID_203312

SEQ ID NO: 32356 - DNA, 3003 bp, Unknown
  misc_feature (1)..( 3003): 2750-1469P.txt file - cDNA_ID_3052345; gDNA_ID_1620619; Annot_ID_46977
tgagccgctcggatccttcgtatacagaggcgttgcagttcctgcgcaagctcagcgcacagcgattaaaacctcatgttaaacgggaacctgggatacatgattgattaaccatggttaggttaaccgaagatgaaccaaaggtcattggttttggctaattgacgctatagtttttttcatttcttgtgtgtacataacaagaaccacgcttaggctcttttgtttcattttacacattgtttcatctgtattactggattacacaattggaagtaaatataaagattctcaatttcatttgccagtgttcttaaactcgtgatgaataacgaacgatgatgattttaataacaagaaaaagaattaaaaaaataatcacgtgacttgtggaagcaagcaaggcaacgcgttacaaaagcacgtgacgtagcgtattggtggcaatttctcattttttcctcagaatacttactttagagcactaatccaattatcatacgacgcgtgtcccacgtttacttccttctctcatataacaacaaacaacccactccgaattttctggtattattactaatttgccattacgtcgtactgtagtgttttcttaaatttgacgtaagaatgaatgaatgttggaagagtaaaagaaaatgttaataatgtccaacattaatataaactggtttcattttcacatttaccttaagtgatacactgagatcttacatttattaaattttcttcgaacaacaaactatattaattcatagatgatagatcgaactcatatttcatggaatgcttttgcaattttaaaatgaaaaaataaaaagagcatgattaagggtattttggtcaatgtctaagagagatagctgtttccaagacttgttctccaagctggtagtgcaagatctcgttaagtataaaaagggaagctgaggaacacaattttgatacttttgagatacaacgtagaagagaagctctaaggttttcaagttctgctcaacaccactgcttactaattaaggtatccaatgattaatgtgttcatctattttaatcattagttaatcttcttaaccatcatacttccttcaagcaagctctaattattaatgtgttcatctattatgtggttaatgattagtgtgattactacattaaaggcttgcttggtatagtttccattataatccactaaaagagggaaaaagaagaagaaaatggattgaattaaaagtttgttattattttttgggtaaaaaaagggaagcttgtttagcacatttactcagttactcgtccaccaaaatcttttctatgttttattttgggtataatcttgttttcttttcacacaatcacacatcgatttcgggtaacctaagttataatatgtcattgttttgctttctgcacacacttatatatatcagcatatcgctaatcatgcacaaattatacatcacgatttctacccaacaatgacacactcattggaaaaatcccatacgtatgcaaatgtgcatatcttgataagaataatcacattttattgattaaaaatatttcgttgaatagaatgatataggcagatagtttcttcctaagtgtttttttctttggtgtgtctcgttttttgtttgttgcttaatctacatttatactcaacccattagccgcccctatataataacaaacacatatttgcatgaattttaattgtgtgatgccccgttgcttttaatcttgaaactgttagaaattaaagagaatatctagcgagagataacaaaaatatatggctatatgctgcatttttaaatatataaaacaagtcaacacaattaaatacgagacttatcgtgtaagaacttaaataacacacattttcaaataccatttcgggtagggccatatacattttaatcgtcacaattcacatcgtcgtatcgattatcacacgtttgagaagatcagaaaaatacttatactattaactctgtgtgtagattcatgtctaatatagagaaatactcaaatacaaataactaatgagataaggagttgatgactcatcacataatcataactatatattgtctaactccagtgcatggaaaactaaaacagtgcgtaacattttttagccattacattatatatagtttagtgagtaaatacatttttatcaattatatatgtaaatgcaacaatatttcgaagttttttttgtagttctttcataaacaaacaaaaaaattgtagttctttaacaacgaaaaaacagtactttgtagtgtcaatccttagaaagattgtgtgtgtttattttccttcaaagagggatattgtgaatacgttacatattggtgacgcacacaaaaacaaaaacagaaatgtatagaatacgtttaatatcaatttgacacgcacacaaaaacaaaaacagtagattgtgaaaaaagatgatttgttttgtaagtattggcgtaggccaaaaggcggcttaagtagagagtaaacgtttgcttcccgcgttatacaaagccctaattctcatcatcatcatgcgtgcaagctattttccatttcctttaacgattctcattcttactctcttcaagcttcttctttctttccccaatatcttttctcttttatattcattatttttctccctttttctctcccaaatcttttttttttctttttcccggaaaattctctctgttgttgttgttgttgttgtctctctcctgataagctcgaccaagtttatctctttctcgctaatcatttctctttaaacttctctcatcgttgaaccattttgttttagtacataaagattcttcttcattctttttgtacgcgtttctatgttacaaacgcatttctatcataaaagttattattacttgagctcaatcttcattggtttattcatatattcagatcaatcgagttcggtactgcgacgttctaatg

SEQ ID NO: 32357 - DNA, 3003 bp, Unknown; identical to SEQ ID NO: 32356
  misc_feature (1)..( 3003): 2750-1469P.txt file - cDNA_ID_3052345; gDNA_ID_1620619; Annot_ID_162195

SEQ ID NO: 32358 - DNA, 3003 bp, Unknown; identical to SEQ ID NO: 32356
  misc_feature (1)..( 3003): 2750-1469P.txt file - cDNA_ID_3052345; gDNA_ID_2926207; Annot_ID_141781

SEQ ID NO: 32359 - DNA, 3003 bp, Unknown; identical to SEQ ID NO: 32356
  misc_feature (1)..( 3003): 2750-1469P.txt file - cDNA_ID_3052345; gDNA_ID_2926207; Annot_ID_202297

SEQ ID NO: 32360 - DNA, 205 bp, Unknown
  misc_feature (1)..( 205): 2750-1469P.txt file - cDNA_ID_3052391; gDNA_ID_1563671; Annot_ID_148094
  misc_feature (133)..(133): n is a, c, g, or t
tgcaggacatggaactctaaatcctacacgatggccatcacttaggagtgagctgattcagtttctactggagaaatcaaatgcccatgattctagtacatgtgtaacatctcgattgaattatttgaacctntaccatctgctagaaatggatactgaagccactttagatgtcctaagatatgcatttgtagaaaatgaaatg

SEQ ID NO: 32361 - DNA, 715 bp, Unknown
  misc_feature (1)..( 715): 2750-1469P.txt file - cDNA_ID_3052423; gDNA_ID_1563684; Annot_ID_148118
  misc_feature (213)..(213): n is a, c, g, or t
  misc_feature (230)..(230): n is a, c, g, or t
  misc_feature (241)..(241): n is a, c, g, or t
  misc_feature (287)..(287): n is a, c, g, or t
  misc_feature (367)..(367): n is a, c, g, or t
  misc_feature (373)..(373): n is a, c, g, or t
  misc_feature (376)..(376): n is a, c, g, or t
  misc_feature (378)..(378): n is a, c, g, or t
  misc_feature (525)..(526): n is a, c, g, or t
  misc_feature (543)..(543): n is a, c, g, or t
  misc_feature (563)..(563): n is a, c, g, or t
  misc_feature (570)..(570): n is a, c, g, or t
  misc_feature (683)..(683): n is a, c, g, or t
  misc_feature (686)..(686): n is a, c, g, or t
  misc_feature (702)..(703): n is a, c, g, or t
gatggcggacatcgacatcgccgtcgggaaagagccgctgataaaccatgaaaacaacaacaacacgaacaagatcttcaatcgctgcgtttcacaccaacaagacgagctacacagcttccgcaaatacctaaggtggatgtgtgtagatcactctagtccatggacagcgattctctcttggaccatgttcatcgtcttcacactcgtcgnttccggcgatctctcanttcctcctcgnttgtgctgattgcgacagttaccattcaagaccttacgactccgtnttcagctttctctaagcagcgtcgccaccgtctctttcctctgtctcaccagattcgttagcaagtatggtcttcgacgnttcctnttntnttgataaactctgggacgagagcgaaaccgttcgacgaaattataccaatcaactcaatgtgagtttctctattttcgaatcacaagtttttttatttctttacaaattctgtaatcgcaaaaaaagaaaaaaataataatcatatnntgtcacaaactcatatntgtcatatctgttaatattnctattanttttaggattatgtcaaataatttgtccaaagaataaagtgagatttgaaaaaaaataatagaataaagtagaagaatcatgaatattataaagtaaggaaacaactcgacgnatnttaaggattgagcaannaaaacaattatg

SEQ ID NO: 32362 - DNA, 46 bp, Unknown
  misc_feature (1)..( 46): 2750-1469P.txt file - cDNA_ID_3052589; gDNA_ID_1563738; Annot_ID_148213
gatcttcaccactgtgattagcgggtggtgtagcaatggaagtatg

SEQ ID NO: 32363 - DNA, 5 bp, Unknown
  misc_feature (1)..( 5): 2750-1469P.txt file - cDNA_ID_3052627; gDNA_ID_1563752; Annot_ID_148238
ggatg

SEQ ID NO: 32364 - DNA, 323 bp, Unknown; identical to SEQ ID NO: 319
  misc_feature (1)..( 323): 2750-1469P.txt file - cDNA_ID_3052635; gDNA_ID_1563754; Annot_ID_148241

SEQ ID NO: 32365 - DNA, 112 bp, Unknown
  misc_feature (1)..( 112): 2750-1469P.txt file - cDNA_ID_3052638; gDNA_ID_1563755; Annot_ID_148243
ttctctcttcagtcttcagcctccgcccgttattgttgaaaagttttagcctttttgttaattactactttactactcttgttgtgaatttgctgctactgttgaagccatg

SEQ ID NO: 32366 - DNA, 647 bp, Unknown
  misc_feature (1)..( 647): 2750-1469P.txt file - cDNA_ID_3052649; gDNA_ID_1563760; Annot_ID_148252
aggtcggttttgttaagctactgataatagtttattatatacgttaataacttgttggagaatctaatcaagtcctgattataagaaggataaagaaaagggaattagaaaagaagacattgattccgattggattctgcttttttcttttcacgtttccgattgtttctggaactttttgtgagcctaaggtttatctctctcttctagtcgtcgattctggtcatcgaagattccaatcagctaaggttacattcatctctctctctctctcgttgtcttggttttgattttggcagattgtgcttggaatcaacagtttcggttattcgatatatgagtactgttaattctagggttctatcactttcctcttcggatcttttgcctatgggttccagaataaaagttttagggttcttcttccctttattgcgaattaagtcatatgcattgcctctgattgtgcgaatcatgttgtagttccaatctttctcttaatacgatgagaataattgtagttagttgctaatgaaccttggtttaacaatttctaggtaaagtgctatatctcgtttcccctgtctcggttcaagctttcaagagaattgtgattgattctataagggctctttgtcagtacaatg

SEQ ID NO: 32367 - DNA, 519 bp, Unknown; identical to SEQ ID NO: 320
  misc_feature (1)..( 519): 2750-1469P.txt file - cDNA_ID_3052666; gDNA_ID_1563768; Annot_ID_148263
  misc_feature (457)..(457): n is a, c, g, or t

SEQ ID NO: 32368 - DNA, 216 bp, Unknown; identical to SEQ ID NO: 322
  misc_feature (1)..( 216): 2750-1469P.txt file - cDNA_ID_3052707; gDNA_ID_1563786; Annot_ID_148294

SEQ ID NO: 32369 - DNA, 261 bp, Unknown
  misc_feature (1)..( 261): 2750-1469P.txt file - cDNA_ID_3052812; gDNA_ID_1563824; Annot_ID_148358
tatgaagcctaattactgtaagaaactgtggaaaaattgaatctaacctttgagttccttaatgtatagccttagtccataacgttcttgattcagaaaaatctcctgcaaatggcattttatcatataaaacagatttgattatattagaaaaagaaaagttgtatatgtctatgtaactatgaagtttatagcatcctcataattcatgatcaattatttgatgttttctagatttagcactaaggaggcgcggagatg

SEQ ID NO: 32370 - DNA, 3003 bp, Unknown
  misc_feature (1)..( 3003): 2750-1469P.txt file - cDNA_ID_3052858; gDNA_ID_1971876; Annot_ID_176720
ttaatttgacttctaacaaaccttgaattcctcaaatgtcagattaggaatatcttttggatcacctccactgtcaacaccatatgtattttctggggataaggcctaataaaagtgaaaacagtagtagctgatttcatcagaaccactatatcaaggaaattcaaatatgtctcagattatctaacaaggtttttgttccaagtgtccaaacgactctttcatgatggctatatcatttagttgattaataaggtcaaaacccaagatcaggttaaaccaacaacgagaaacttctagttatagtaagcaaaacacaatacttgcctgttgagcaattcgccctaaaatattatcaggctgtgaatagacccctttcatctcattaaaaacaacacctgaaatcaaacatcaacaatgagataggatgagtgggtatctgaagtagctgataaactaaaagatatcatcgatactaagaaaagtagaggaaaagagctctaaaatggaatcctaggtaaataaaacctttgtaagatatgtcttccgagggatcattaagttcatagtgccagccctcttgctgaaaggtgtgagcgtcatccacacacttggggaagaagacagcatccaaatatacatcgacaagattgtaaaaatcctaccatagatagtgatagtgatgagttgtgatcagaaatagactcactttagataacaataacagaaagaaagaggttagcccactgaggacaacaaaagaaggacttaatgtttggctcattgtacctttgtattggtggaagcaactgggtagcaggtcctatcaggatatgtgaatgcatttagaaaagtatgcaaacttcccttgagtagttcaacaaatggctcttttaccgggtactttcttgacccacatagaacgctatgttccagtatgtgcggaatgccagtggaatccttcctgcattaacaacgaaactatgatctaaaattgcttccattattagtttttgcaagtctttcacaaggaggtgcctgtgggaccaatatctactgaaagtgcagttgctcatatcgacttttaacaaagcgttaagtaatttgacaagttgtaacctccaaaacttagaccactttacaagtaccaatatattagaagaagaaacgaaatgactaggtctaatcagaaaaaaaaagctttgatgagtagagataaacttgaccatttcaattagttaaattcaaggagtgaagctttaggtaccaatttcaattgcctaatacatactcaggtcaaatttacagagagtaaaaattattatgaagtaaacttacggaggagttctgaaaacaacaccgaagaccttgttctcatcctcatttgacacagacatcacctcgcaaccagttttcttgtgtttgaagagtatcgcctttgatttacactctgagatgaattcttccgacactttttcaaatccaagcttctcagcctcatcttgacctacatctgaatccaaacaaccaaaaataaggaaaatcacgcatcagcagaggttacacatggctccatttgattacaaagtagacacaaagcatgagatgaaaaatgcaccacacggaccacacctatctacaattcacaacctatcctaaagtaagaaccacaatttcacaagtgccacaaatcaacatgtccgaattaagagaacaaatcaattagcaattaaacttcaaacagattgaaaaaaagaagtatatgtgaaaaattccaaccaggataaagtggagcgggttgtgtggcgacggcgcgaacagagaggcgagagaactgcccattgacactgcgaactgcggcggagggaatcctcaaacctcgtcggagcaaaagacgtctaccggcgactgagggagaggaaattcggcgaagattgcgactggggacacggagagctgccgtcgacgatgtgagagacatgtaagagcgagggaactgacgaaagaagcgaaagaatagagaggacgagctgcgcgaagctaaacaagagacggttcggagcatagctaccggaaaaaaaatattcccggcggagactgctactgacggagacgaaattaaggatattgcaaagaagctaaataaacccaacggcaagaggttttatccttgtgtagttgtgtgtttttgcttgtagaggaaaaaagtaaaataaaataaaatgaaatacctcatttcttgtacaacacacaaaattattgtgaaaaatattctctattttactaaattggcattttatttttctgaatttttaagtcgggacaaaaaagaggtgctgatttgcaagaaaggaaacgtggttctcatatagccaaatgtgtttgagtgttgcaatttgctatcctccaaaaatataatgactacaaaatatcttaaatcttttttcatgatattaaacttaagtgaaagtattacaaaatctgatcaagttaaaagtttacaccagacatatactttccaggtatttgattcagaaaaaatcatattgatcagatttaaacaaattttaaattatatataagttttttcttacacacaaattaaacctttgatcagtactagactactggtagcatgcgatgagcttgcagtagtttctctcgcacattagttatgggccgagagctaggcccatgtccagggacggataaaataatcttccagatgtttctttattatccacgtggcgtgatcacgtgaccacgtctcgtctcgtctagtcctagattagcagagcctctctttcggccagcgggttaccttattatcgtcacaagacgaaactttcagaaaaaggcaaaaatcactgtcaaaactcaaaagccttgagaccaaatttccgattttttctcctctgaagaaatccaacaaattgtaccatgattccagcttcactctacttcttctagggttcgttcgttttctggagctgttgcgcaatg

SEQ ID NO: 32371 - DNA, 912 bp, Unknown; identical to SEQ ID NO: 582
  misc_feature (1)..( 912): 2750-1469P.txt file - cDNA_ID_3052886; gDNA_ID_1592113; Annot_ID_151985
  misc_feature (1)..(1): n is a, c, g, or t

SEQ ID NO: 32372 - DNA, 788 bp, Unknown; identical to SEQ ID NO: 358
  misc_feature (1)..( 788): 2750-1469P.txt file - cDNA_ID_3052886; gDNA_ID_1564341; Annot_ID_149285

SEQ ID NO: 32373 - DNA, 5 bp, Unknown
  misc_feature (1)..( 5): 2750-1469P.txt file - cDNA_ID_3052967; gDNA_ID_1563881; Annot_ID_148454
agatg

SEQ ID NO: 32374 - DNA, 268 bp, Unknown; identical to SEQ ID NO: 330
  misc_feature (1)..( 268): 2750-1469P.txt file - cDNA_ID_3053090; gDNA_ID_1563924; Annot_ID_148524

SEQ ID NO: 32375 - DNA, 385 bp, Unknown
  misc_feature (1)..( 385): 2750-1469P.txt file - cDNA_ID_3053265; gDNA_ID_1563985; Annot_ID_148634
  misc_feature (4)..(5): n is a, c, g, or t
  misc_feature (114)..(114): n is a, c, g, or t
taanntctgataacgaagatttagtgggaaatcttagcgattctgagatcatgtcaccagcatctaggcattcttgggactgtccaaaataggtttgacagtcttttctctccntccctctttcagcagagcttcattttctccagagtcatctgtctgcagagaggcgaagaagcgactttctgaaagatgggcgttgatgtcagtatcgggaagaactcaaccgcttaaacatgtttcaagaacctcaagcaccttaggggaaatgcttgcacttacagagaccaaagtgacaactgaatccggggaagggagctatgaaatagtaccagcaacgagggtatcaacatcatgcataactagtgatctgagtcaagtggaaatg

SEQ ID NO: 32376 - DNA, 430 bp, Unknown
  misc_feature (1)..( 430): 2750-1469P.txt file - cDNA_ID_3053309; gDNA_ID_1564002; Annot_ID_148664
caattatccaataattaattatggccaaatccaagttctagagttttctctagaaatatcatcatttccacctccttaaaagattctagaaattttctagaatcatcttccacctccttaaacataaaaaatctagatactctaatagaataatctagataatttgaataatgtaatctagatcttatgtaagaactctctagacttatgattaaaatattttagatattttgtagtttggaggctataaatacctcctccccctctcaaatgttgcaatgttgtgaagttgtcttcaagtttaaagcaaagtaataaaagttctatttcctaaataactctctcaaaacacttaaacactttctccattacctctaaaagaattttactctaacaaagtggtatccagagcttgaagatcctaaagatg

SEQ ID NO: 32377 - DNA, 756 bp, Unknown
  misc_feature (1)..( 756): 2750-1469P.txt file - cDNA_ID_3053335; gDNA_ID_1564011; Annot_ID_148680
ataaaactggataaatcgtgactaggggctggagatcaataaatcgtgacttccctccaactgatacggattctacaactatttgaattttataaggaatttcaataacttgttcactttttaaatatacaatagttttgtacaactagtaaaaaatattcatatttccattataatcatttatcattccattctgcttttttttttgggttctcaattctgccattccaccatgtttcttatcggaatctaaggaattaatgcattaagtagttgaagatgataattttatttgtttccaaccattttgatggttaacttaaaaaacataaaattttaggtttggtggaaaaaagaaagggacacttggccttacgacaaagcgaagggtcacatgttaatacaacaatttcaggatattcgaatctctaatattggaatccctaatacatggctcactctctttgattcaaacataaactgcactcgtttatttaatctttgtttgacagctaaaaagatttttattttcgggttgataaacctataactcctccaacggacaaaatttactagatagatctataacttttcgtgggctatatataacttctcgtaggcttcgaggcccaaaaatgtttaaaagtgttgaaaaccaagacaaaaaaaaatggagtgaaaaagatgaaatccctaaattgaatcgcaaatcgcaatttgaaaaaaaaaagatctctctctgaagaatccgtcatg

SEQ ID NO: 32378 - DNA, 533 bp, Unknown; identical to SEQ ID NO: 337
  misc_feature (1)..( 533): 2750-1469P.txt file - cDNA_ID_3053350; gDNA_ID_1564016; Annot_ID_148689

SEQ ID NO: 32379 - DNA, 19 bp, Unknown
  misc_feature (1)..( 19): 2750-1469P.txt file - cDNA_ID_3053452; gDNA_ID_1564051; Annot_ID_148755
catcggtttaccagcaatg

SEQ ID NO: 32380 - DNA, 611 bp, Unknown
  misc_feature (1)..( 611): 2750-1469P.txt file - cDNA_ID_3053631; gDNA_ID_1564125; Annot_ID_148898
  misc_feature (173)..(174): n is a, c, g, or t
  misc_feature (593)..(594): n is a, c, g, or t
aacttttgcatttatatagatatttcctttattttcattataatttttccacattgccacaaaaaatgatatccacaattaattaattttaatttgtagttggatctaaatctaatatgaaagaaaaaagaaaaaacatattgagtctgaatcatatggatacacataccaannaatcagagatcacggcaagacaactttttgtcttatcttttagttttttatttgtcaacgttgtttgttgtcttactaatttattttaattattttttcccgaatctcatttttctaagagggaaaaagaaaaacatttcttttttctcttatgcaataaaactcgcttcttttgtctttgatattaggaaacggacaaatcagtctagtcaaatagagccattcaaagtacggcaacacaaaccaagagagtgtaagttaagcgacatgtgttagagatatccggagatctcaaccgttggattctttctccttcaaatcaaattataaatcccatcaaacagagagagagagagaagaggaggagaattcgaagaataaaagataagaactttgacgttttgaagcttaaagcttknnmmcttgttwcatccatg

SEQ ID NO: 32381 - DNA, 589 bp, Unknown
  misc_feature (1)..( 589): 2750-1469P.txt file - cDNA_ID_3053643; gDNA_ID_1564131; Annot_ID_148907
aatcawatttgttttgtctgattaaaaaaagtttaawatatgkaaattaagkaagracmtcaatgaacmttwaacatagaaaatattwacaaagagcagttwactatcaaggggrccaatttgattaaaraaattattttttgttcccattaraaattggcaawaacgttgaggktgttytytcaaattaaaaaaaaaaatattttctattttgttggtgtgctcttaaattccccattgttacattgaggttgccctctaaattttaaaatattttatttttttgttggtgtgcccttaaatcacccattacacaacaaacaaaaaaagagactaaccaaaaaataattttataattaattttgtttcttcctacctacaagtatttacttaaccattgcctcgatcttttaaaccatccacattttttgaatcaccatcaacatctttctctcttctctttcttctctctatctgagtccagaaacattcacattaattacaaactgaaaaaacattgaaacttttgaataaactcacgagaagtactctgttttctcttcttactctgtttcttgttgatacaatg

SEQ ID NO: 32382 - DNA, 809 bp, Unknown
  misc_feature (1)..( 809): 2750-1469P.txt file - cDNA_ID_3053665; gDNA_ID_1564139; Annot_ID_148922
aaaaaaaaaagttcmccaatttcaaaatacttctatagttatatttcmcctagaaatagcatcatgaaccaattatcaaaataagaataaacagaatctttattaaaaaaaaagtaccccggccctttatacagtcttttgtgcaaattgatgatggtcgtatacagtgtgcgctacggcaaggagacgattatattgattaaaaaaacttctgcatacagtattgcgaagttaacgtcgacgtttgatatgtctttgtggatagcgattacatgtttaagtcaattgagtttaagtcccatagacgcgtttatgccagtaagattattaaatttgagaaagaaaaaatataaagggtagactagttacgatttatgcgtattcgtaaacctattattttcttgctatcacatttaatcttgtgtccaatactttgtaccaagattagattgtagactgatttttttctggttattactgaatatcacactaaaatttgtttcgtggtcaaatcaaagcgtattagtatacacgtcaaaaagatagcacaaacaagaaaattaaaattcaaaattgagaatatatgacggcatgatcgttaccaatccattggttggtataaacatatatacttttcttttttgcttcaactacaatgaaattacatattaatatatttgattattaatttaaattaaaaacataagtccccacatctatataaacacatcgattcaagactcaaatctcatcaatcaaaatcttcaaacacaaacttctcgtttctcaaaacagttggtcttatgatg

SEQ ID NO: 32383 - DNA, 3000 bp, Unknown; identical to SEQ ID NO: 1756
  misc_feature (1)..( 3000): 2750-1469P.txt file - cDNA_ID_3053837; gDNA_ID_1620444; Annot_ID_157257

SEQ ID NO: 32384 - DNA, 286 bp, Unknown; identical to SEQ ID NO: 350
  misc_feature (1)..( 286): 2750-1469P.txt file - cDNA_ID_3053909; gDNA_ID_1564215; Annot_ID_149054

SEQ ID NO: 32385 - DNA, 106 bp, Unknown; identical to SEQ ID NO: 353
  misc_feature (1)..( 106): 2750-1469P.txt file - cDNA_ID_3053939; gDNA_ID_1564228; Annot_ID_149077

SEQ ID NO: 32386 - DNA, 629 bp, Unknown; identical to SEQ ID NO: 355
  misc_feature (1)..( 629): 2750-1469P.txt file - cDNA_ID_3054102; gDNA_ID_1564282; Annot_ID_149174

SEQ ID NO: 32387 - DNA, 3 bp, Unknown
  misc_feature (1)..( 3): 2750-1469P.txt file - cDNA_ID_3054145; gDNA_ID_1564302; Annot_ID_149209
ccg

SEQ ID NO: 32388 - DNA, 3003 bp, Unknown
  misc_feature (1)..( 3003): 2750-1469P.txt file - cDNA_ID_3054173; gDNA_ID_1972174; Annot_ID_179960
atagattaaacacactcacctaccaaagttgcataccagccgttagattactcataagtgtattccaccgtcggatttaactactttttaaagagtcaacctcaataagaatcttgttcccaaagataagggtttgtgttgagtttaagaccggtttaatctgaaaactccgtcaaaccaaaaccaaaccgatttatcataaaaaaattcatatcatctacttccattggctagagacagattgtaacggtgtcgtcgtcgccaaacgatttgcctcttcctaaaggtaggttcttcatttctctcagtgcccctttgcgtgtttcagcttcttctttatgatctaattcatgtctatgtttcgtttgattctttgttcaattctgaattgagaaaatggcgattcgagatctgtctcttcggttttttagttcgactgatttgggaatgtgaagagatcagattgatttgttgacagagtcttgggggttttcaatcttattcctctagattttcgaaattcgattcctttacatcagatttcgcttaattctctgtcctagtgagttttacgatctttagtcttctggtttgtcaaattctatgtcttttcatgttcttctgagttttaatggttgatcttcaattacttggccacaatctctagagtttgagactcttgacttgtcttgcatatattcctctgtagattggttttatgtttggtttcaattccttgttgaactattctgatacggaagttttcctttctaaggtttggtgtttcctttttctgataaatagtgatgaagatcgattatgatgatcatgtaagaatataatctagctttggtgtttgtattggtttacctgagggaagaaaagtctttctctttgggactttaaactttgattacttaactccaacattatcatagttgggttctgtagttcatttcacttatagcagtaataactcattgattgatgcaatcaatcaatcctgtgatggaaatggaatcatggaaattgagggattcagggaggattgattgattagaatttcatatttatgagagaataagagaactgatgtgtgtttcttttcctacttcttaaagttgtgctctttcctatttctataagctcttgtggataacaacagttgattaacgttcttatgcttgtttagggtacaacaagaatggaagaagagtatgagagtcgtcgattgaggagatgggaagagttggacactgacatcttagtaagaattttccagaagtttagcgtctttgagttgacttcgggattagctcatgtttgtagaggatggagagctgcttgttgcgatccgattctttggaagacggtggatttgtcaaacatgagatctagtttcatcaagatcccattagagccttatgtctatgtggaacgccgatctgatgaggccctaacccgcatcctgaaactctccatgaaccttagcggaggaagcacgaggaccttgatttttcatttcaacttgttcttgagtgatgatcagcttacttacaccgcagaaaggtatgtccttttcgttcttccacttatttgtcttccaaattgtttcatcatggccgtaaactatggttttttagtcaaaagttggttcagtttttggtttggttaagttcatgtacccactttcagtcaaaattgctgaattacaattaagctgaatctcgcaaatgctaaaagttgaaaaatttgttgtactgaatattttgcaggtgtccagggttgagacgggtcgtcctaccggcttggaacagaataaagaagactggtatatgcaaagcgataagaatctggaaagatctagagtcactaacaatgccaagcatcgcaaacccgccttatctcttaacagaaattgccaagaactgcaagaattttaaagagctgaagatcatgggtccattcgaggtcttctttgcaaacacgctcatcacttgcctcccaaacatcaaaacactcagcatcagatgctcggcgataaagcgggaagcactgatgaaaatccttgacggattaccaagccttgaagtgctcaacatatcacactctcacctagtggagtacagcggttggcagcctcagcagaaggtgattgttagagagctcgataagacgataatggagaaaacagcaaggctaaagaaattcttgacttgcatggatcacaagacgtgtgtgatgtgtcagaggactgaaaacgatgaagggattgtgagatggtacaagtatgaggaaggagactggaaggttgatgaagtgagttctcttcatctttgatgtttctgctgtgatcattctctgtgaaggacttaacttgttattgttctcatctttgactgttgaattgtttatttctttgtgttgtttgttttgatttgaatcgtattatgtgtatatatctgtaggctatgccaatgaatgtctgtagtgatcaacttttgatcaccaccaaccttgcacaccaaataggaaaataaaacaatattgttacaattatttgtcttgatattagcattattagtcacatttgttttgcaaatcatctaccttttttttttggtctatatcttattcttcttagttcttacctaccagtcttctccggcggcattaacgacaccgttttatcgagctcagccaccactagttaggtaacgatatatattcttaaaaacgtttagaaaatttctatgtatgtttcacacgaacaaaaagaaaatatttttcagacatcaacggtcattatggacgacgactgttaaacaaaatcgtttaaaattcttgttgcgtaatttgaccattttattttattttataccaaaaattgaagatattatatatatgttttaattcgatcgcaaataaatctgaaaattaaaacacaaaacgttactcttctctctcattctctttcgcttctcgatagcttctcaaatcatg

SEQ ID NO: 32389 - DNA, 80 bp, Unknown; identical to SEQ ID NO: 357
  misc_feature (1)..( 80): 2750-1469P.txt file - cDNA_ID_3054173; gDNA_ID_1564312; Annot_ID_149225

SEQ ID NO: 32390 - DNA, 3000 bp, Unknown; identical to SEQ ID NO: 2614
  misc_feature (1)..( 3000): 2750-1469P.txt file - cDNA_ID_3054206; gDNA_ID_1620565; Annot_ID_160684

SEQ ID NO: 32391 - DNA, 60 bp, Unknown
  misc_feature (1)..( 60): 2750-1469P.txt file - cDNA_ID_3054238; gDNA_ID_1564332; Annot_ID_149264
ttcytsattaattgagtttttttttttggaatgcaaatagtytgagattataataacatg

SEQ ID NO: 32392 - DNA, 7 bp, Unknown
  misc_feature (1)..( 7): 2750-1469P.txt file - cDNA_ID_3054262; gDNA_ID_1564339; Annot_ID_149280
aaaaatg

SEQ ID NO: 32393 - DNA, 668 bp, Unknown
  misc_feature (1)..( 668): 2750-1469P.txt file - cDNA_ID_3054324; gDNA_ID_1564359; Annot_ID_149319
cgtaagctagaatattacaggatagatgagattaaagaaatagtcccaaatagcaagcaacaaaactaaaacattaacacaaacaaattctaaaaatagagacacaaacttaacaaagatacaatgaaacctcaatgaattaatactcgatatactaataccttaaaatattttttctagttctaaattaataatttaacctaaaaatatcacttctataaattaataattacgataatttaatgaaatttagtaaaccattaatctcaatattcttaatttatagaggttttactaaattgtagaaacaactaattcgagtacatccctgaattaataaattttagaaatgtgaattaacgaatacttttgttcttgtgaatggttaaaaaaaagttacttatcaagacaagtatgaagtatcacgtgattaaacgtttaatgacaccaacctaatgacaatttgtttgatttatttgtcacctaactagagactctctcacagtcaacgcagcttatgtgtcatagtaagactttttgtctactatagaagaaagacgaatttataacccctttaggtkttttctaacacacgcctctaatctccgcgcacacacacacaccctcacgaagaagaagaagaagaagaagacgaagaagaatcaatg

SEQ ID NO: 32394 - DNA, 312 bp, Unknown; identical to SEQ ID NO: 363
  misc_feature (1)..( 312): 2750-1469P.txt file - cDNA_ID_3054388; gDNA_ID_1564379; Annot_ID_149354

SEQ ID NO: 32395 - DNA, 49 bp, Unknown
  misc_feature (1)..( 49): 2750-1469P.txt file - cDNA_ID_3054406; gDNA_ID_1564385; Annot_ID_149365
cactcaacaagttcatgaaatggtggatgtaagaaatgacgagmcaatg

SEQ ID NO: 32396 - DNA, 10 bp, Unknown
  misc_feature (1)..( 10): 2750-1469P.txt file - cDNA_ID_3054564; gDNA_ID_1564448; Annot_ID_149473
ggagaatatg
